United States Patent Application Publication US 2023/0212319 A1 - sequence listing, part 11

SEQ ID NO: 19037 - protein, 726 aa, Artificial Sequence
  Synthetic Polypeptide
MALPVTALLLPLALLLHAARPSYVLTQPPSVSVAPGQTARITCGGNNIGGKSVHWYQQPPGQAPVVVVYDDSDRPSGIPERFSGSNSGNTATLTISRVEAGDEAVYYCQVWDSSSDHVVFGGGTKLTVLGGGGSGGGGSGGGGSQLQLQESGPGLVKPSETLSLTCTVSGGSISSSSYFWGWIRQPPGKGLEWIGSIYYSGITYYNPSLKSRVTISVDTSKNQFSLKLSSVTAADTAVYYCARHDGAVAGLFDYWGQGTLVTVSSATREQKLISEEDLGSGTPFPSLAPPIMLLVDGKQQMVVVCLVLDVAPPGLDSPIWFSAGNGSALDAFTYGPSPATDGTWTNLAHLSLPSEELASWEPLVCHTGPGAEGHSRSTQPMHLSGEASTARTCPQEPLRGTPGGALWLGVLRLLLFKLLLFDLLLTCSCLCDPAGPLPSPATTTRLRALGSHRLHPATETGGREATSSPRPQPRDRRWGDTPPGRKPGSPVRAKRSGSGVKQTLNFDLLKLAGDVESNPGPSRSRGHMTEYKPTVRLATRDDVPRAVRTLAAAFADYPATRHTVDPDRHIERVTELQELFLTRVGLDIGKVWVADDGAAVAVWTTPESVEAGAVFAEIGPRMAELSGSRLAAQQQMEGLLAPHRPKEPAWFLATVGVSPDHQGKGLGSAVVLPGVEAAERAGVPAFLETSAPRNLPFYERLGFTVTADVEVPEGPRTWCMTRKPGA

SEQ ID NO: 19038 - protein, 539 aa, Artificial Sequence; identical to SEQ ID NO: 18762
  Synthetic Polypeptide

SEQ ID NO: 19039 - protein, 309 aa, Artificial Sequence; identical to SEQ ID NO: 18763
  Synthetic Polypeptide

SEQ ID NO: 19040 - protein, 451 aa, Artificial Sequence; identical to SEQ ID NO: 18143
  Synthetic Polypeptide

SEQ ID NO: 19041 - protein, 285 aa, Artificial Sequence; identical to SEQ ID NO: 18144
  Synthetic Polypeptide

SEQ ID NO: 19042 - protein, 557 aa, Artificial Sequence; identical to SEQ ID NO: 18766
  Synthetic Polypeptide

SEQ ID NO: 19043 - protein, 327 aa, Artificial Sequence; identical to SEQ ID NO: 18767
  Synthetic Polypeptide

SEQ ID NO: 19044 - protein, 463 aa, Artificial Sequence; identical to SEQ ID NO: 18147
  Synthetic Polypeptide

SEQ ID NO: 19045 - protein, 297 aa, Artificial Sequence; identical to SEQ ID NO: 18148
  Synthetic Polypeptide

SEQ ID NO: 19046 - protein, 644 aa, Artificial Sequence
  Synthetic Polypeptide
MALPVTALLLPLALLLHAARPSYVLTQPPSVSVAPGQTARITCGGNNIGGKSVHWYQQPPGQAPVVVVYDDSDRPSGIPERFSGSNSGNTATLTISRVEAGDEAVYYCQVWDSSSDHVVFGGGTKLTVLGGGGSGGGGSGGGGSQLQLQESGPGLVKPSETLSLTCTVSGGSISSSSYFWGWIRQPPGKGLEWIGSIYYSGITYYNPSLKSRVTISVDTSKNQFSLKLSSVTAADTAVYYCARHDGAVAGLFDYWGQGTLVTVSSATRGSGIQNPDPAVYQLRDSKSSDKSVCLFTDFDSQTNVSQSKDSDVYITDKTVLDMRSMDFKSNSAVAWSNKSDFACANAFNNSIIPEDTFFPSSDVPCDVKLVEKSFETDTNLNFQNLSVIGFRILLLKVAGFNLLMTLRLWSSRAKRSGSGVKQTLNFDLLKLAGDVESNPGPSRGHMTEYKPTVRLATRDDVPRAVRTLAAAFADYPATRHTVDPDRHIERVTELQELFLTRVGLDIGKVWVADDGAAVAVWTTPESVEAGAVFAEIGPRMAELSGSRLAAQQQMEGLLAPHRPKEPAWFLATVGVSPDHQGKGLGSAVVLPGVEAAERAGVPAFLETSAPRNLPFYERLGFTVTADVEVPEGPRTWCMTRKPGA

SEQ ID NO: 19047 - protein, 676 aa, Artificial Sequence
  Synthetic Polypeptide
MALPVTALLLPLALLLHAARPSYVLTQPPSVSVAPGQTARITCGGNNIGGKSVHWYQQPPGQAPVVVVYDDSDRPSGIPERFSGSNSGNTATLTISRVEAGDEAVYYCQVWDSSSDHVVFGGGTKLTVLGGGGSGGGGSGGGGSQLQLQESGPGLVKPSETLSLTCTVSGGSISSSSYFWGWIRQPPGKGLEWIGSIYYSGITYYNPSLKSRVTISVDTSKNQFSLKLSSVTAADTAVYYCARHDGAVAGLFDYWGQGTLVTVSSALEDLKNVFPPEVAVFEPSKAEIAHTQKATLVCLATGFYPDHVELSWWVNGKEVHSGVSTDPQPLKEQPALNDSRYCLSSRLRVSATFWQNPRNHFRCQVQFYGLSENDEWTQDRAKPVTQIVSAEAWGRADCGITSASYHQGVLSATILYEILLGKATLYAVLVSALVLMAMVKRKDSRGRAKRSGSGATNFSLLKQAGDVEENPGPTRGHMTEYKPTVRLATRDDVPRAVRTLAAAFADYPATRHTVDPDRHIERVTELQELFLTRVGLDIGKVWVADDGAAVAVWTTPESVEAGAVFAEIGPRMAELSGSRLAAQQQMEGLLAPHRPKEPAWFLATVGVSPDHQGKGLGSAVVLPGVEAAERAGVPAFLETSAPRNLPFYERLGFTVTADVEVPEGPRTWCMTRKPGA

SEQ ID NO: 19048 - protein, 699 aa, Artificial Sequence
  Synthetic Polypeptide
MALPVTALLLPLALLLHAARPSYVLTQPPSVSVAPGQTARITCGGNNIGGKSVHWYQQPPGQAPVVVVYDDSDRPSGIPERFSGSNSGNTATLTISRVEAGDEAVYYCQVWDSSSDHVVFGGGTKLTVLGGGGSGGGGSGGGGSQLQLQESGPGLVKPSETLSLTCTVSGGSISSSSYFWGWIRQPPGKGLEWIGSIYYSGITYYNPSLKSRVTISVDTSKNQFSLKLSSVTAADTAVYYCARHDGAVAGLFDYWGQGTLVTVSSATRGSGGGGSGGGGSGDGNEEMGGITQTPYKVSISGTTVILTCPQYPGSEILWQHNDKNIGGDEDDKNIGSDEDHLSLKEFSELEQSGYYVCYPRGSKPEDANFYLYLRARVCENCMEMDVMSVATIVIVDICITGGLLLLVYYWSKNRKAKAKPVTRGAGAGGRQRGQNKERPPPVPNPDYEPIRKGQRDLYSGLNQRRIRAKRSGSGVKQTLNFDLLKLAGDVESNPGPSRGHMTEYKPTVRLATRDDVPRAVRTLAAAFADYPATRHTVDPDRHIERVTELQELFLTRVGLDIGKVWVADDGAAVAVWTTPESVEAGAVFAEIGPRMAELSGSRLAAQQQMEGLLAPHRPKEPAWFLATVGVSPDHQGKGLGSAVVLPGVEAAERAGVPAFLETSAPRNLPFYERLGFTVTADVEVPEGPRTWCMTRKPGA

SEQ ID NO: 19049 - protein, 664 aa, Artificial Sequence
  Synthetic Polypeptide
MALPVTALLLPLALLLHAARPSYVLTQPPSVSVAPGQTARITCGGNNIGGKSVHWYQQPPGQAPVVVVYDDSDRPSGIPERFSGSNSGNTATLTISRVEAGDEAVYYCQVWDSSSDHVVFGGGTKLTVLGGGGSGGGGSGGGGSQLQLQESGPGLVKPSETLSLTCTVSGGSISSSSYFWGWIRQPPGKGLEWIGSIYYSGITYYNPSLKSRVTISVDTSKNQFSLKLSSVTAADTAVYYCARHDGAVAGLFDYWGQGTLVTVSSATRGSGGGGSGGGGSGFKIPIEELEDRVFVNCNTSITWVEGTVGTLLSDITRLDLGKRILDPRGIYRCNGTDIYKDKESTVQVHYRMCQSCVELDPATVAGIIVTDVIATLLLALGVFCFAGHETGRLSGAADTQALLRNDQVYQPLRDRDDAQYSHLGGNWARNKRAKRSGSGVKQTLNFDLLKLAGDVESNPGPSRGHMTEYKPTVRLATRDDVPRAVRTLAAAFADYPATRHTVDPDRHIERVTELQELFLTRVGLDIGKVWVADDGAAVAVWTTPESVEAGAVFAEIGPRMAELSGSRLAAQQQMEGLLAPHRPKEPAWFLATVGVSPDHQGKGLGSAVVLPGVEAAERAGVPAFLETSAPRNLPFYERLGFTVTADVEVPEGPRTWCMTRKPGA

SEQ ID NO: 19050 - protein, 674 aa, Artificial Sequence
  Synthetic Polypeptide
MALPVTALLLPLALLLHAARPSYVLTQPPSVSVAPGQTARITCGGNNIGGKSVHWYQQPPGQAPVVVVYDDSDRPSGIPERFSGSNSGNTATLTISRVEAGDEAVYYCQVWDSSSDHVVFGGGTKLTVLGGGGSGGGGSGGGGSQLQLQESGPGLVKPSETLSLTCTVSGGSISSSSYFWGWIRQPPGKGLEWIGSIYYSGITYYNPSLKSRVTISVDTSKNQFSLKLSSVTAADTAVYYCARHDGAVAGLFDYWGQGTLVTVSSATRGSGGGGSGGGGSGQSIKGNHLVKVYDYQEDGSVLLTCDAEAKNITWFKDGKMIGFLTEDKKKWNLGSNAKDPRGMYQCKGSQNKSKPLQVYYRMCQNCIELNAATISGFLFAEIVSIFVLAVGVYFIAGQDGVRQSRASDKQTLLPNDQLYQPLKDREDDQYSHLQGNQLRRNRAKRSGSGVKQTLNFDLLKLAGDVESNPGPSRGHMTEYKPTVRLATRDDVPRAVRTLAAAFADYPATRHTVDPDRHIERVTELQELFLTRVGLDIGKVWVADDGAAVAVWTTPESVEAGAVFAEIGPRMAELSGSRLAAQQQMEGLLAPHRPKEPAWFLATVGVSPDHQGKGLGSAVVLPGVEAAERAGVPAFLETSAPRNLPFYERLGFTVTADVEVPEGPRTWCMTRKPGA

SEQ ID NO: 19051 - protein, 657 aa, Artificial Sequence
  Synthetic Polypeptide
MALPVTALLLPLALLLHAARPSYVLTQPPSVSVAPGQTARITCGGNNIGGKSVHWYQQPPGQAPVVVVYDDSDRPSGIPERFSGSNSGNTATLTISRVEAGDEAVYYCQVWDSSSDHVVFGGGTKLTVLGGGGSGGGGSGGGGSQLQLQESGPGLVKPSETLSLTCTVSGGSISSSSYFWGWIRQPPGKGLEWIGSIYYSGITYYNPSLKSRVTISVDTSKNQFSLKLSSVTAADTAVYYCARHDGAVAGLFDYWGQGTLVTVSSATRGSGGGGSGGGGSGQSFGLLDPKLCYLLDGILFIYGVILTALFLRVKFSRSADAPAYQQGQNQLYNELNLGRREEYDVLDKRRGRDPEMGGKPQRRKNPQEGLYNELQKDKMAEAYSEIGMKGERRRGKGHDGLYQGLSTATKDTYDALHMQALPPRRAKRSGSGVKQTLNFDLLKLAGDVESNPGPSRGHMTEYKPTVRLATRDDVPRAVRTLAAAFADYPATRHTVDPDRHIERVTELQELFLTRVGLDIGKVWVADDGAAVAVWTTPESVEAGAVFAEIGPRMAELSGSRLAAQQQMEGLLAPHRPKEPAWFLATVGVSPDHQGKGLGSAVVLPGVEAAERAGVPAFLETSAPRNLPFYERLGFTVTADVEVPEGPRTWCMTRKPGA

SEQ ID NO: 19052 - protein, 758 aa, Artificial Sequence
  Synthetic Polypeptide
MALPVTALLLPLALLLHAARPEVQLVESGGGLVQPGGSLRLSCAASGFSFSDFWMSWVRQAPGKGLEWVATISQAGSEKDYVDSVKGRFTISRDNAKKSLYLQMNSLRAEDTAVYYCASGVYSFDYRGQGTLVTVSSGTGGGGSGGGGSGGGGSEFSYVLTQPPSVSVAPGQTARITCGGNNIGGKSVHWYQQPPGQAPVVVVYDDSDRPSGIPERFSGSNSGNTATLTISRVEAGDEAVYYCQVWDSSSDHVVFGGGTKLTVLLEDLKNVFPPEVAVFEPSEAEISHTQKATLVCLATGFYPDHVELSWWVNGKEVHSGVCTDPQPLKEQPALNDSRYCLSSRLRVSATFWQNPRNHFRCQVQFYGLSENDEWTQDRAKPVTQIVSAEAWGRADCGFTSESYQQGVLSATILYEILLGKATLYAVLVSALVLMAMVKRKDSRGRAKRSGSGATNFSLLKQAGDVEENPGPTSMDWIWRILFLVGAATGAHSFEQLQLQESGPGLVKPSETLSLTCTVSGGSISSSSYFWGWIRQPPGKGLEWIGSIYYSGITYYNPSLKSRVTISVDTSKNQFSLKLSSVTAADTAVYYCARHDGAVAGLFDYWGQGTLVTVSSATRIQNPDPAVYQLRDSKSSDKSVCLFTDFDSQTNVSQSKDSDVYITDKCVLDMRSMDFKSNSAVAWSNKSDFACANAFNNSIIPEDTFFPSPESSCDVKLVEKSFETDTNLNFQNLSVIGFRILLLKVAGFNLLMTLRLWSS

SEQ ID NO: 19053 - protein, 762 aa, Artificial Sequence
  Synthetic Polypeptide
MALPVTALLLPLALLLHAARPEVQLVESGGGLVQPGGSLRLSCAASGFSFSDFWMSWVRQAPGKGLEWVATISQAGSEKDYVDSVKGRFTISRDNAKKSLYLQMNSLRAEDTAVYYCASGVYSFDYRGQGTLVTVSSGTGGGGSGGGGSGGGGSEFSYVLTQPPSVSVAPGQTARITCGGNNIGGKSVHWYQQPPGQAPVVVVYDDSDRPSGIPERFSGSNSGNTATLTISRVEAGDEAVYYCQVWDSSSDHVVFGGGTKLTVLLEIQNPDPAVYQLRDSKSSDKSVCLFTDFDSQTNVSQSKDSDVYITDKCVLDMRSMDFKSNSAVAWSNKSDFACANAFNNSIIPEDTFFPSPESSCDVKLVEKSFETDTNLNFQNLSVIGFRILLLKVAGFNLLMTLRLWSSRAKRSGSGVKQTLNFDLLKLAGDVESNPGPTSMDWIWRILFLVGAATGAHSFEQLQLQESGPGLVKPSETLSLTCTVSGGSISSSSYFWGWIRQPPGKGLEWIGSIYYSGITYYNPSLKSRVTISVDTSKNQFSLKLSSVTAADTAVYYCARHDGAVAGLFDYWGQGTLVTVSSATREDLKNVFPPEVAVFEPSEAEISHTQKATLVCLATGFYPDHVELSWWVNGKEVHSGVCTDPQPLKEQPALNDSRYCLSSRLRVSATFWQNPRNHFRCQVQFYGLSENDEWTQDRAKPVTQIVSAEAWGRADCGFTSESYQQGVLSATILYEILLGKATLYAVLVSALVLMAMVKRKDSRG

SEQ ID NO: 19054 - protein, 954 aa, Artificial Sequence
  Synthetic Polypeptide
MALPVTALLLPLALLLHAARPEVQLVESGGGLVQPGGSLRLSCAASGFSFSDFWMSWVRQAPGKGLEWVATISQAGSEKDYVDSVKGRFTISRDNAKKSLYLQMNSLRAEDTAVYYCASGVYSFDYRGQGTLVTVSSGTGGGGSGGGGSGGGGSEFSYVLTQPPSVSVAPGQTARITCGGNNIGGKSVHWYQQPPGQAPVVVVYDDSDRPSGIPERFSGSNSGNTATLTISRVEAGDEAVYYCQVWDSSSDHVVFGGGTKLTVLLEDLKNVFPPEVAVFEPSEAEISHTQKATLVCLATGFYPDHVELSWWVNGKEVHSGVSTDPQPLKEQPALNDSRYCLSSRLRVSATFWQNPRNHFRCQVQFYGLSENDEWTQDRAKPVTQIVSAEAWGRADCGSQSFGLLDPKLCYLLDGILFIYGVILTALFLRVKFSRSADAPAYQQGQNQLYNELNLGRREEYDVLDKRRGRDPEMGGKPQRRKNPQEGLYNELQKDKMAEAYSEIGMKGERRRGKGHDGLYQGLSTATKDTYDALHMQALPPRRAKRSGSGATNFSLLKQAGDVEENPGPTSMDWIWRILFLVGAATGAHSFEQLQLQESGPGLVKPSETLSLTCTVSGGSISSSSYFWGWIRQPPGKGLEWIGSIYYSGITYYNPSLKSRVTISVDTSKNQFSLKLSSVTAADTAVYYCARHDGAVAGLFDYWGQGTLVTVSSATRIQNPDPAVYQLRDSKSSDKSVCLFTDFDSQTNVSQSKDSDVYITDKTVLDMRSMDFKSNSAVAWSNKSDFACANAFNNSIIPEDTFFPSPESSCGTQSFGLLDPKLCYLLDGILFIYGVILTALFLRVKFSRSADAPAYQQGQNQLYNELNLGRREEYDVLDKRRGRDPEMGGKPQRRKNPQEGLYNELQKDKMAEAYSEIGMKGERRRGKGHDGLYQGLSTATKDTYDALHMQALPPR

SEQ ID NO: 19055 - protein, 784 aa, Artificial Sequence
  Synthetic Polypeptide
MALPVTALLLPLALLLHAARPEVQLVESGGGLVQPGGSLRLSCAASGFSFSDFWMSWVRQAPGKGLEWVATISQAGSEKDYVDSVKGRFTISRDNAKKSLYLQMNSLRAEDTAVYYCASGVYSFDYRGQGTLVTVSSGTGGGGSGGGGSGGGGSEFSYVLTQPPSVSVAPGQTARITCGGNNIGGKSVHWYQQPPGQAPVVVVYDDSDRPSGIPERFSGSNSGNTATLTISRVEAGDEAVYYCQVWDSSSDHVVFGGGTKLTVLLEGQPKANPTVTLFPPSSEELQANKATLVCLISDFYPGAVTVAWKADGSPVKAGVETTKPSKQSNNKYAASSYLSLTPEQWKSHRSYSCQVTHEGSTVEKTVAPTECSPIKTDVITMDPKDNCSKDANDTLLLQLTNTSAYYMYLLLLLKSVVYFAIITCCLLRRTAFCCNGEKSRAKRSGSGATNFSLLKQAGDVEENPGPTSMDWIWRILFLVGAATGAHSFEQLQLQESGPGLVKPSETLSLTCTVSGGSISSSSYFWGWIRQPPGKGLEWIGSIYYSGITYYNPSLKSRVTISVDTSKNQFSLKLSSVTAADTAVYYCARHDGAVAGLFDYWGQGTLVTVSSATRASTKGPSVFPLAPSSKSTSGGTAALGCLVKDYFPEPVTVSWNSGALTSGVHTFPAVLQSSGLYSLSSVVTVPSSSLGTQTYICNVNHKPSNTKVDKRVEPKSCEVKTDSTDHVKPKETENTKQPSKSCHKPKAIVHTEKVNMMSLTVLGLRMLFAKTVAVNFLLTAKLFFL

SEQ ID NO: 19056 - protein, 765 aa, Artificial Sequence
  Synthetic Polypeptide
MALPVTALLLPLALLLHAARPEVQLVESGGGLVQPGGSLRLSCAASGFSFSDFWMSWVRQAPGKGLEWVATISQAGSEKDYVDSVKGRFTISRDNAKKSLYLQMNSLRAEDTAVYYCASGVYSFDYRGQGTLVTVSSGTGGGGSGGGGSGGGGSEFSYVLTQPPSVSVAPGQTARITCGGNNIGGKSVHWYQQPPGQAPVVVVYDDSDRPSGIPERFSGSNSGNTATLTISRVEAGDEAVYYCQVWDSSSDHVVFGGGTKLTVLLEGQPKANPTVTLFPPSSEELQANKATLVCLISDFYPGAVTVAWKADGSPVKAGVETTKPSKQSNNKYAASSYLSLTPEQWKSHRSYSCQVTHEGSTVEKTVAPTECSGRADCGFTSESYQQGVLSATILYEILLGKATLYAVLVSALVLMAMVKRKDSRGRAKRSGSGVKQTLNFDLLKLAGDVESNPGPTSMDWIWRILFLVGAATGAHSFEQLQLQESGPGLVKPSETLSLTCTVSGGSISSSSYFWGWIRQPPGKGLEWIGSIYYSGITYYNPSLKSRVTISVDTSKNQFSLKLSSVTAADTAVYYCARHDGAVAGLFDYWGQGTLVTVSSATRASTKGPSVFPLAPSSKSTSGGTAALGCLVKDYFPEPVTVSWNSGALTSGVHTFPAVLQSSGLYSLSSVVTVPSSSLGTQTYICNVNHKPSNTKVDKRVEPKSCIPEDTFFPSPESSCDVKLVEKSFETDTNLNFQNLSVIGFRILLLKVAGFNLLMTLRLWSS

SEQ ID NO: 19057 - protein, 899 aa, Artificial Sequence
  Synthetic Polypeptide
MALPVTALLLPLALLLHAARPEVQLVESGGGLVQPGGSLRLSCAASGFSFSDFWMSWVRQAPGKGLEWVATISQAGSEKDYVDSVKGRFTISRDNAKKSLYLQMNSLRAEDTAVYYCASGVYSFDYRGQGTLVTVSSGTGGGGSGGGGSGGGGSEFSYVLTQPPSVSVAPGQTARITCGGNNIGGKSVHWYQQPPGQAPVVVVYDDSDRPSGIPERFSGSNSGNTATLTISRVEAGDEAVYYCQVWDSSSDHVVFGGGTKLTVLLEIQNPDPAVYQLRDSKSSDKSVCLFTDFDSQTNVSQSKDSDVYITDKCVLDMRSMDFKSNSAVAWSNKSDFACANAFNNSIIPEDTFFPSPESSCDVKLVEKSFETDTNLNFQNLSVIGFRILLLKVAGFNLLMTLRLWSSRAKRSGSGVKQTLNFDLLKLAGDVESNPGPTSMDWIWRILFLVGAATGAHSGPQLQLQESGPGLVKPSETLSLTCTVSGDSISSGDYYWGWIRQPPGKGLEWIGHIYYSGVTYYNPSLKSRVTISVDTSRNQFSLKLSSVTAADTAVYYCTREDSSNWRSRGQGTLVTVSSGSGGGGSGGGGSGGGGSFEQLQLQESGPGLVKPSETLSLTCTVSGGSISSSSYFWGWIRQPPGKGLEWIGSIYYSGITYYNPSLKSRVTISVDTSKNQFSLKLSSVTAADTAVYYCARHDGAVAGLFDYWGQGTLVTVSSATREDLKNVFPPEVAVFEPSEAEISHTQKATLVCLATGFYPDHVELSWWVNGKEVHSGVCTDPQPLKEQPALNDSRYCLSSRLRVSATFWQNPRNHFRCQVQFYGLSENDEWTQDRAKPVTQIVSAEAWGRADCGFTSESYQQGVLSATILYEILLGKATLYAVLVSALVLMAMVKRKDSRG

SEQ ID NO: 19058 - protein, 1091 aa, Artificial Sequence
  Synthetic Polypeptide
MALPVTALLLPLALLLHAARPEVQLVESGGGLVQPGGSLRLSCAASGFSFSDFWMSWVRQAPGKGLEWVATISQAGSEKDYVDSVKGRFTISRDNAKKSLYLQMNSLRAEDTAVYYCASGVYSFDYRGQGTLVTVSSGTGGGGSGGGGSGGGGSEFSYVLTQPPSVSVAPGQTARITCGGNNIGGKSVHWYQQPPGQAPVVVVYDDSDRPSGIPERFSGSNSGNTATLTISRVEAGDEAVYYCQVWDSSSDHVVFGGGTKLTVLLEDLKNVFPPEVAVFEPSEAEISHTQKATLVCLATGFYPDHVELSWWVNGKEVHSGVSTDPQPLKEQPALNDSRYCLSSRLRVSATFWQNPRNHFRCQVQFYGLSENDEWTQDRAKPVTQIVSAEAWGRADCGSQSFGLLDPKLCYLLDGILFIYGVILTALFLRVKFSRSADAPAYQQGQNQLYNELNLGRREEYDVLDKRRGRDPEMGGKPQRRKNPQEGLYNELQKDKMAEAYSEIGMKGERRRGKGHDGLYQGLSTATKDTYDALHMQALPPRRAKRSGSGATNFSLLKQAGDVEENPGPTSMDWIWRILFLVGAATGAHSGPQLQLQESGPGLVKPSETLSLTCTVSGDSISSGDYYWGWIRQPPGKGLEWIGHIYYSGVTYYNPSLKSRVTISVDTSRNQFSLKLSSVTAADTAVYYCTREDSSNWRSRGQGTLVTVSSGSGGGGSGGGGSGGGGSFEQLQLQESGPGLVKPSETLSLTCTVSGGSISSSSYFWGWIRQPPGKGLEWIGSIYYSGITYYNPSLKSRVTISVDTSKNQFSLKLSSVTAADTAVYYCARHDGAVAGLFDYWGQGTLVTVSSATRIQNPDPAVYQLRDSKSSDKSVCLFTDFDSQTNVSQSKDSDVYITDKTVLDMRSMDFKSNSAVAWSNKSDFACANAFNNSIIPEDTFFPSPESSCGTQSFGLLDPKLCYLLDGILFIYGVILTALFLRVKFSRSADAPAYQQGQNQLYNELNLGRREEYDVLDKRRGRDPEMGGKPQRRKNPQEGLYNELQKDKMAEAYSEIGMKGERRRGKGHDGLYQGLSTATKDTYDALHMQALPPR

SEQ ID NO: 19059 - protein, 921 aa, Artificial Sequence
  Synthetic Polypeptide
MALPVTALLLPLALLLHAARPEVQLVESGGGLVQPGGSLRLSCAASGFSFSDFWMSWVRQAPGKGLEWVATISQAGSEKDYVDSVKGRFTISRDNAKKSLYLQMNSLRAEDTAVYYCASGVYSFDYRGQGTLVTVSSGTGGGGSGGGGSGGGGSEFSYVLTQPPSVSVAPGQTARITCGGNNIGGKSVHWYQQPPGQAPVVVVYDDSDRPSGIPERFSGSNSGNTATLTISRVEAGDEAVYYCQVWDSSSDHVVFGGGTKLTVLLEGQPKANPTVTLFPPSSEELQANKATLVCLISDFYPGAVTVAWKADGSPVKAGVETTKPSKQSNNKYAASSYLSLTPEQWKSHRSYSCQVTHEGSTVEKTVAPTECSPIKTDVITMDPKDNCSKDANDTLLLQLTNTSAYYMYLLLLLKSVVYFAIITCCLLRRTAFCCNGEKSRAKRSGSGATNFSLLKQAGDVEENPGPTSMDWIWRILFLVGAATGAHSGPQLQLQESGPGLVKPSETLSLTCTVSGDSISSGDYYWGWIRQPPGKGLEWIGHIYYSGVTYYNPSLKSRVTISVDTSRNQFSLKLSSVTAADTAVYYCTREDSSNWRSRGQGTLVTVSSGSGGGGSGGGGSGGGGSFEQLQLQESGPGLVKPSETLSLTCTVSGGSISSSSYFWGWIRQPPGKGLEWIGSIYYSGITYYNPSLKSRVTISVDTSKNQFSLKLSSVTAADTAVYYCARHDGAVAGLFDYWGQGTLVTVSSATRASTKGPSVFPLAPSSKSTSGGTAALGCLVKDYFPEPVTVSWNSGALTSGVHTFPAVLQSSGLYSLSSVVTVPSSSLGTQTYICNVNHKPSNTKVDKRVEPKSCEVKTDSTDHVKPKETENTKQPSKSCHKPKAIVHTEKVNMMSLTVLGLRMLFAKTVAVNFLLTAKLFFL

SEQ ID NO: 19060 - protein, 902 aa, Artificial Sequence
  Synthetic Polypeptide
MALPVTALLLPLALLLHAARPEVQLVESGGGLVQPGGSLRLSCAASGFSFSDFWMSWVRQAPGKGLEWVATISQAGSEKDYVDSVKGRFTISRDNAKKSLYLQMNSLRAEDTAVYYCASGVYSFDYRGQGTLVTVSSGTGGGGSGGGGSGGGGSEFSYVLTQPPSVSVAPGQTARITCGGNNIGGKSVHWYQQPPGQAPVVVVYDDSDRPSGIPERFSGSNSGNTATLTISRVEAGDEAVYYCQVWDSSSDHVVFGGGTKLTVLLEGQPKANPTVTLFPPSSEELQANKATLVCLISDFYPGAVTVAWKADGSPVKAGVETTKPSKQSNNKYAASSYLSLTPEQWKSHRSYSCQVTHEGSTVEKTVAPTECSGRADCGFTSESYQQGVLSATILYEILLGKATLYAVLVSALVLMAMVKRKDSRGRAKRSGSGVKQTLNFDLLKLAGDVESNPGPTSMDWIWRILFLVGAATGAHSGPQLQLQESGPGLVKPSETLSLTCTVSGDSISSGDYYWGWIRQPPGKGLEWIGHIYYSGVTYYNPSLKSRVTISVDTSRNQFSLKLSSVTAADTAVYYCTREDSSNWRSRGQGTLVTVSSGSGGGGSGGGGSGGGGSFEQLQLQESGPGLVKPSETLSLTCTVSGGSISSSSYFWGWIRQPPGKGLEWIGSIYYSGITYYNPSLKSRVTISVDTSKNQFSLKLSSVTAADTAVYYCARHDGAVAGLFDYWGQGTLVTVSSATRASTKGPSVFPLAPSSKSTSGGTAALGCLVKDYFPEPVTVSWNSGALTSGVHTFPAVLQSSGLYSLSSVVTVPSSSLGTQTYICNVNHKPSNTKVDKRVEPKSCIPEDTFFPSPESSCDVKLVEKSFETDTNLNFQNLSVIGFRILLLKVAGFNLLMTLRLWSS

SEQ ID NO: 19061 - protein, 759 aa, Artificial Sequence
  Synthetic Polypeptide
MALPVTALLLPLALLLHAARPEVQVLESGGGLVQPGGSLRLSCAASGFTFSNFAMSWVRQAPGKGLEWVSTISGSAGTTDYADSVKGRFTISRDNSKKTLYLQMNSLRVEDTAVYYCADGRGPFFDYRGQGTLVTVSSGTGGGGSGGGGSGGGGSEFSYVLTQPPSVSVAPGQTARITCGGNNIGGKSVHWYQQPPGQAPVVVVYDDSDRPSGIPERFSGSNSGNTATLTISRVEAGDEAVYYCQVWDSSSDHVVFGGGTKLTVLLEDLKNVFPPEVAVFEPSEAEISHTQKATLVCLATGFYPDHVELSWWVNGKEVHSGVCTDPQPLKEQPALNDSRYCLSSRLRVSATFWQNPRNHFRCQVQFYGLSENDEWTQDRAKPVTQIVSAEAWGRADCGFTSESYQQGVLSATILYEILLGKATLYAVLVSALVLMAMVKRKDSRGRAKRSGSGATNFSLLKQAGDVEENPGPTSMDWIWRILFLVGAATGAHSFEQLQLQESGPGLVKPSETLSLTCTVSGGSISSSSYFWGWIRQPPGKGLEWIGSIYYSGITYYNPSLKSRVTISVDTSKNQFSLKLSSVTAADTAVYYCARHDGAVAGLFDYWGQGTLVTVSSATRIQNPDPAVYQLRDSKSSDKSVCLFTDFDSQTNVSQSKDSDVYITDKCVLDMRSMDFKSNSAVAWSNKSDFACANAFNNSIIPEDTFFPSPESSCDVKLVEKSFETDTNLNFQNLSVIGFRILLLKVAGFNLLMTLRLWSS

SEQ ID NO: 19062 - protein, 760 aa, Artificial Sequence
  Synthetic Polypeptide
MALPVTALLLPLALLLHAARPSYVLTQPPSVSVAPGQTARITCGGNNIGGKSVHWYQQPPGQAPVVVVYDDSDRPSGIPERFSGSNSGNTATLTISRVEAGDEAVYYCQVWDSSSDHVVFGGGTKLTVLLEDLKNVFPPEVAVFEPSEAEISHTQKATLVCLATGFYPDHVELSWWVNGKEVHSGVCTDPQPLKEQPALNDSRYCLSSRLRVSATFWQNPRNHFRCQVQFYGLSENDEWTQDRAKPVTQIVSAEAWGRADCGFTSESYQQGVLSATILYEILLGKATLYAVLVSALVLMAMVKRKDSRGRAKRSGSGATNFSLLKQAGDVEENPGPTSMDWIWRILFLVGAATGAHSGPEVQLVESGGGLVQAGGSLRLSCAASGRTFSMGWFRQAPGKEREFVAAITYSGGSPYYADSVKGRFTISRDNAKNTVYLQMNSLKPEDTAVYYCAANPTYGSDWNAENWGQGTQVTVSSGSGGGGSGGGGSGGGGSFEQLQLQESGPGLVKPSETLSLTCTVSGGSISSSSYFWGWIRQPPGKGLEWIGSIYYSGITYYNPSLKSRVTISVDTSKNQFSLKLSSVTAADTAVYYCARHDGAVAGLFDYWGQGTLVTVSSATRIQNPDPAVYQLRDSKSSDKSVCLFTDFDSQTNVSQSKDSDVYITDKCVLDMRSMDFKSNSAVAWSNKSDFACANAFNNSIIPEDTFFPSPESSCDVKLVEKSFETDTNLNFQNLSVIGFRILLLKVAGFNLLMTLRLWSS

SEQ ID NO: 19063 - protein, 887 aa, Artificial Sequence
  Synthetic Polypeptide
MALPVTALLLPLALLLHAARPSYVLTQPPSVSVAPGQTARITCGGNNIGGKSVHWYQQPPGQAPVVVVYDDSDRPSGIPERFSGSNSGNTATLTISRVEAGDEAVYYCQVWDSSSDHVVFGGGTKLTVLLEDLKNVFPPEVAVFEPSEAEISHTQKATLVCLATGFYPDHVELSWWVNGKEVHSGVCTDPQPLKEQPALNDSRYCLSSRLRVSATFWQNPRNHFRCQVQFYGLSENDEWTQDRAKPVTQIVSAEAWGRADCGFTSESYQQGVLSATILYEILLGKATLYAVLVSALVLMAMVKRKDSRGRAKRSGSGATNFSLLKQAGDVEENPGPTSMDWIWRILFLVGAATGAHSQLQLQESGPGLVKPSETLSLTCTVSGGSISSGDYYWGWIRQPPGKGLEWIGSISYSGSTYYNPSLKSRVTISVDTSRNQFSLKLSSVTAADTAVYYCTREDSSNWRSRGQGTLVTVSSSGGGGSGGGGSEVQLVESGGGLVQAGGSLRLSCAASGRTFSMGWFRQAPGKEREFVAAITYSGGSPYYADSVKGRFTISRDNAKNTVYLQMNSLKPEDTAVYYCAANPTYGSDWNAENWGQGTQVTVSSGSGGGGSGGGGSGGGGSFEQLQLQESGPGLVKPSETLSLTCTVSGGSISSSSYFWGWIRQPPGKGLEWIGSIYYSGITYYNPSLKSRVTISVDTSKNQFSLKLSSVTAADTAVYYCARHDGAVAGLFDYWGQGTLVTVSSATRIQNPDPAVYQLRDSKSSDKSVCLFTDFDSQTNVSQSKDSDVYITDKCVLDMRSMDFKSNSAVAWSNKSDFACANAFNNSIIPEDTFFPSPESSCDVKLVEKSFETDTNLNFQNLSVIGFRILLLKVAGFNLLMTLRLWSS

SEQ ID NO: 19064 - protein, 896 aa, Artificial Sequence
  Synthetic Polypeptide
MALPVTALLLPLALLLHAARPEVQVLESGGGLVQPGGSLRLSCAASGFTFSNFAMSWVRQAPGKGLEWVSTISGSAGTTDYADSVKGRFTISRDNSKKTLYLQMNSLRVEDTAVYYCADGRGPFFDYRGQGTLVTVSSGTGGGGSGGGGSGGGGSEFSYVLTQPPSVSVAPGQTARITCGGNNIGGKSVHWYQQPPGQAPVVVVYDDSDRPSGIPERFSGSNSGNTATLTISRVEAGDEAVYYCQVWDSSSDHVVFGGGTKLTVLLEDLKNVFPPEVAVFEPSEAEISHTQKATLVCLATGFYPDHVELSWWVNGKEVHSGVCTDPQPLKEQPALNDSRYCLSSRLRVSATFWQNPRNHFRCQVQFYGLSENDEWTQDRAKPVTQIVSAEAWGRADCGFTSESYQQGVLSATILYEILLGKATLYAVLVSALVLMAMVKRKDSRGRAKRSGSGATNFSLLKQAGDVEENPGPTSMDWIWRILFLVGAATGAHSGPEVQLVESGGGLVQAGGSLRLSCAASGRTFSMGWFRQAPGKEREFVAAITYSGGSPYYASSVRGRFTISRDNAKNTVYLQMNSLKPEDTAVYYCAANPTYGSDWNAENWGQGTQVTVSSGSGGGGSGGGGSGGGGSFEQLQLQESGPGLVKPSETLSLTCTVSGGSISSSSYFWGWIRQPPGKGLEWIGSIYYSGITYYNPSLKSRVTISVDTSKNQFSLKLSSVTAADTAVYYCARHDGAVAGLFDYWGQGTLVTVSSATRIQNPDPAVYQLRDSKSSDKSVCLFTDFDSQTNVSQSKDSDVYITDKCVLDMRSMDFKSNSAVAWSNKSDFACANAFNNSIIPEDTFFPSPESSCDVKLVEKSFETDTNLNFQNLSVIGFRILLLKVAGFNLLMTLRLWSS

SEQ ID NO: 19065 - protein, 724 aa, Artificial Sequence
  Synthetic Polypeptide
MALPVTALLLPLALLLHAARPEIVLTQSPATLSLSPGERATLSCRASQSVSSYLAWYQQKPGQAPRLLIYDASNRATGIPARFSGSGSGTDFTLTISSLEPEDFAVYYCQQRSNWPLTFGQGTKVEIKGGGGSGGGGSGGGGSQVQLVQSGAEVKKPGSSVKVSCKASGGTFSTYAIHWVRQAPGQGLEWMGRIIPIEGRAYYAQKFQGRVTITADESTSTAYMELSSLRSEDTAVYYCARGRYSYRYWFDYWGQGTLVTVSSTREQKLISEEDLAKPTTTPAPRPPTPAPTIASQPLSLRPEACRPAAGGAVHTRGLDFACDIYIWAPLAGTCGVLLLSLVITLYCKRGRKKLLYIFKQPFMRPVQTTQEEDGCSCRFPEEEEGGCELRVKFSRSADAPAYQQGQNQLYNELNLGRREEYDVLDKRRGRDPEMGGKPRRKNPQEGLYNELQKDKMAEAYSEIGMKGERRRGKGHDGLYQGLSTATKDTYDALHMQALPPRSSGSGEGRGSLLTCGDVEENPGPHMTEYKPTVRLATRDDVPRAVRTLAAAFADYPATRHTVDPDRHIERVTELQELFLTRVGLDIGKVWVADDGAAVAVWTTPESVEAGAVFAEIGPRMAELSGSRLAAQQQMEGLLAPHRPKEPAWFLATVGVSPDHQGKGLGSAVVLPGVEAAERAGVPAFLETSAPRNLPFYERLGFTVTADVEVPEGPRTWCMTRKPGA

SEQ ID NO: 19066 - protein, 718 aa, Artificial Sequence
  Synthetic Polypeptide
MALPVTALLLPLALLLHAARPEIVLTQSPATLSLSPGERATLSCRASQSVSSYLAWYQQKPGQAPRLLIYDASNRATGIPARFSGSGSGTDFTLTISSLEPEDFAVYYCQQRSNWPLTFGQGTKVEIKGGGGSGGGGSGGGGSQVQLVQSGAEVKKPGSSVKVSCKASGGTFSTYAIHWVRQAPGQGLEWMGRIIPIEGRAYYAQKFQGRVTITADESTSTAYMELSSLRSEDTAVYYCARGRYSYRYWFDYWGQGTLVTVSSTREQKLISEEDLKIEVMYPPPYLDNEKSNGTIIHVKGKHLCPSPLFPGPSKPFWVLVVVGGVLACYSLLVTVAFIIFWVRSKRSRLLHSDYMNMTPRRPGPTRKHYQPYAPPRDFAAYRSRVKFSRSADAPAYQQGQNQLYNELNLGRREEYDVLDKRRGRDPEMGGKPRRKNPQEGLYNELQKDKMAEAYSEIGMKGERRRGKGHDGLYQGLSTATKDTYDALHMQALPPRSSGSGEGRGSLLTCGDVEENPGPHMTEYKPTVRLATRDDVPRAVRTLAAAFADYPATRHTVDPDRHIERVTELQELFLTRVGLDIGKVWVADDGAAVAVWTTPESVEAGAVFAEIGPRMAELSGSRLAAQQQMEGLLAPHRPKEPAWFLATVGVSPDHQGKGLGSAVVLPGVEAAERAGVPAFLETSAPRNLPFYERLGFTVTADVEVPEGPRTWCMTRKPGA

SEQ ID NO: 19067 - protein, 495 aa, Artificial Sequence
  Synthetic Polypeptide
MALPVTALLLPLALLLHAARPEIVLTQSPATLSLSPGERATLSCRASQSVSSYLAWYQQKPGQAPRLLIYDASNRATGIPARFSGSGSGTDFTLTISSLEPEDFAVYYCQQRSNWPLTFGQGTKVEIKGGGGSGGGGSGGGGSQVQLVQSGAEVKKPGSSVKVSCKASGGTFSTYAIHWVRQAPGQGLEWMGRIIPIEGRAYYAQKFQGRVTITADESTSTAYMELSSLRSEDTAVYYCARGRYSYRYWFDYWGQGTLVTVSSTREQKLISEEDLKIEVMYPPPYLDNEKSNGTIIHVKGKHLCPSPLFPGPSKPFWVLVVVGGVLACYSLLVTVAFIIFWVRSKRSRLLHSDYMNMTPRRPGPTRKHYQPYAPPRDFAAYRSRVKFSRSADAPAYQQGQNQLYNELNLGRREEYDVLDKRRGRDPEMGGKPRRKNPQEGLYNELQKDKMAEAYSEIGMKGERRRGKGHDGLYQGLSTATKDTYDALHMQALPPR

SEQ ID NO: 19068 - protein, 501 aa, Artificial Sequence
  Synthetic Polypeptide
MALPVTALLLPLALLLHAARPEIVLTQSPATLSLSPGERATLSCRASQSVSSYLAWYQQKPGQAPRLLIYDASNRATGIPARFSGSGSGTDFTLTISSLEPEDFAVYYCQQRSNWPLTFGQGTKVEIKGGGGSGGGGSGGGGSQVQLVQSGAEVKKPGSSVKVSCKASGGTFSTYAIHWVRQAPGQGLEWMGRIIPIEGRAYYAQKFQGRVTITADESTSTAYMELSSLRSEDTAVYYCARGRYSYRYWFDYWGQGTLVTVSSTREQKLISEEDLAKPTTTPAPRPPTPAPTIASQPLSLRPEACRPAAGGAVHTRGLDFACDIYIWAPLAGTCGVLLLSLVITLYCKRGRKKLLYIFKQPFMRPVQTTQEEDGCSCRFPEEEEGGCELRVKFSRSADAPAYQQGQNQLYNELNLGRREEYDVLDKRRGRDPEMGGKPRRKNPQEGLYNELQKDKMAEAYSEIGMKGERRRGKGHDGLYQGLSTATKDTYDALHMQALPPR

SEQ ID NO: 19069 - protein, 501 aa, Artificial Sequence
  Synthetic Polypeptide
MALPVTALLLPLALLLHAARPQVQLVQSGAEVKKPGSSVKVSCKASGGTFSTYAIHWVRQAPGQGLEWMGRIIPIEGRAYYAQKFQGRVTITADESTSTAYMELSSLRSEDTAVYYCARGRYSYRYWFDYWGQGTLVTVSSGGGGSGGGGSGGGGSEIVLTQSPATLSLSPGERATLSCRASQSVSSYLAWYQQKPGQAPRLLIYDASNRATGIPARFSGSGSGTDFTLTISSLEPEDFAVYYCQQRSNWPLTFGQGTKVEIKTREQKLISEEDLAKPTTTPAPRPPTPAPTIASQPLSLRPEACRPAAGGAVHTRGLDFACDIYIWAPLAGTCGVLLLSLVITLYCKRGRKKLLYIFKQPFMRPVQTTQEEDGCSCRFPEEEEGGCELRVKFSRSADAPAYQQGQNQLYNELNLGRREEYDVLDKRRGRDPEMGGKPRRKNPQEGLYNELQKDKMAEAYSEIGMKGERRRGKGHDGLYQGLSTATKDTYDALHMQALPPR

SEQ ID NO: 19070 - protein, 914 aa, Artificial Sequence
  Synthetic Polypeptide
MALPVTALLLPLALLLHAARPEIVLTQSPATLSLSPGERATLSCRASQSVSSYLAWYQQKPGQAPRLLIYDASNRATGIPARFSGSGSGTDFTLTISSLEPEDFAVYYCQQRSNWPLTFGQGTKVEIKGGGGSGGGGSGGGGSQVQLVQSGAEVKKPGSSVKVSCKASGGTFSTYAIHWVRQAPGQGLEWMGRIIPIEGRAYYAQKFQGRVTITADESTSTAYMELSSLRSEDTAVYYCARGRYSYRYWFDYWGQGTLVTVSSTREQKLISEEDLAKPTTTPAPRPPTPAPTIASQPLSLRPEACRPAAGGAVHTRGLDFACDIYIWAPLAGTCGVLLLSLVITLYCGRARVKFSRSADAPAYQQGQNQLYNELNLGRREEYDVLDKRRGRDPEMGGKPRRKNPQEGLYNELQKDKMAEAYSEIGMKGERRRGKGHDGLYQGLSTATKDTYDALHMQALPPRSRGSGATNFSLLKQAGDVEENPGPGIHMATYEVLCEVARKLGTDDREVVLFLLNVFIPQPTLAQLIGALRALKEEGRLTFPLLAECLFRAGRRDLLRDLLHLDPRFLERHLAGTMSYFSPYQLTVLHVDGELCARDIRSLIFLSKDTIGSRSTPQTFLHWVYCMENLDLLGPTDVDALMSMLRSLSRVDLQRQVQTLMGLHLSGPSHSQHYRHTPLETDFYDYKDDDDKTSGSGEGRGSLLTCGDVEENPGPHMTEYKPTVRLATRDDVPRAVRTLAAAFADYPATRHTVDPDRHIERVTELQELFLTRVGLDIGKVWVADDGAAVAVWTTPESVEAGAVFAEIGPRMAELSGSRLAAQQQMEGLLAPHRPKEPAWFLATVGVSPDHQGKGLGSAVVLPGVEAAERAGVPAFLETSAPRNLPFYERLGFTVTADVEVPEGPRTWCMTRKPGA

SEQ ID NO: 19071 - protein, 854 aa, Artificial Sequence
  Synthetic Polypeptide
MALPVTALLLPLALLLHAARPEIVLTQSPATLSLSPGERATLSCRASQSVSSYLAWYQQKPGQAPRLLIYDASNRATGIPARFSGSGSGTDFTLTISSLEPEDFAVYYCQQRSNWPLTFGQGTKVEIKLEIQNPDPAVYQLRDSKSSDKSVCLFTDFDSQTNVSQSKDSDVYITDKCVLDMRSMDFKSNSAVAWSNKSDFACANAFNNSIIPEDTFFPSSDVPCDVKLVEKSFETDTNLNFQNLSVIGFRILLLKVAGFNLLMTLRLWSSRAKRSGSGVKQTLNFDLLKLAGDVESNPGPTSMDWIWRILFLVGAATGAHSFEQVQLVQSGAEVKKPGSSVKVSCKASGGTFSTYAIHWVRQAPGQGLEWMGRIIPIEGRAYYAQKFQGRVTITADESTSTAYMELSSLRSEDTAVYYCARGRYSYRYWFDYWGQGTLVTVSSTREDLKNVFPPEVAVFEPSKAEIAHTQKATLVCLATGFYPDHVELSWWVNGKEVHSGVCTDPQPLKEQPALNDSRYCLSSRLRVSATFWQNPRNHFRCQVQFYGLSENDEWTQDRAKPVTQIVSAEAWGRADCGITSASYHQGVLSATILYEILLGKATLYAVLVSALVLMAMVKRKDSRGRAKRSGSGATNFSLLKQAGDVEENPGPSRGHMTEYKPTVRLATRDDVPRAVRTLAAAFADYPATRHTVDPDRHIERVTELQELFLTRVGLDIGKVWVADDGAAVAVWTTPESVEAGAVFAEIGPRMAELSGSRLAAQQQMEGLLAPHRPKEPAWFLATVGVSPDHQGKGLGSAVVLPGVEAAERAGVPAFLETSAPRNLPFYERLGFTVTADVEVPEGPRTWCMTRKPGA

SEQ ID NO: 19072 - protein, 853 aa, Artificial Sequence
  Synthetic Polypeptide
MALPVTALLLPLALLLHAARPEIVLTQSPATLSLSPGERATLSCRASQSVSSYLAWYQQKPGQAPRLLIYDASNRATGIPARFSGSGSGTDFTLTISSLEPEDFAVYYCQQRSNWPLTFGQGTKVEIKLEDLKNVFPPEVAVFEPSKAEIAHTQKATLVCLATGFYPDHVELSWWVNGKEVHSGVCTDPQPLKEQPALNDSRYCLSSRLRVSATFWQNPRNHFRCQVQFYGLSENDEWTQDRAKPVTQIVSAEAWGRADCGITSASYHQGVLSATILYEILLGKATLYAVLVSALVLMAMVKRKDSRGRAKRSGSGATNFSLLKQAGDVEENPGPTSMDWIWRILFLVGAATGAHSFEQVQLVQSGAEVKKPGSSVKVSCKASGGTFSTYAIHWVRQAPGQGLEWMGRIIPIEGRAYYAQKFQGRVTITADESTSTAYMELSSLRSEDTAVYYCARGRYSYRYWFDYWGQGTLVTVSSTRIQNPDPAVYQLRDSKSSDKSVCLFTDFDSQTNVSQSKDSDVYITDKCVLDMRSMDFKSNSAVAWSNKSDFACANAFNNSIIPEDTFFPSSDVPCDVKLVEKSFETDTNLNFQNLSVIGFRILLLKVAGFNLLMTLRLWSSRAKRSGSGVKQTLNFDLLKLAGDVESNPGPSRGHMTEYKPTVRLATRDDVPRAVRTLAAAFADYPATRHTVDPDRHIERVTELQELFLTRVGLDIGKVWVADDGAAVAVWTTPESVEAGAVFAEIGPRMAELSGSRLAAQQQMEGLLAPHRPKEPAWFLATVGVSPDHQGKGLGSAVVLPGVEAAERAGVPAFLETSAPRNLPFYERLGFTVTADVEVPEGPRTWCMTRKPGA

SEQ ID NO: 19073 - protein, 620 aa, Artificial Sequence
  Synthetic Polypeptide
MALPVTALLLPLALLLHAARPEIVLTQSPATLSLSPGERATLSCRASQSVSSYLAWYQQKPGQAPRLLIYDASNRATGIPARFSGSGSGTDFTLTISSLEPEDFAVYYCQQRSNWPLTFGQGTKVEIKLEDLKNVFPPEVAVFEPSEAEISHTQKATLVCLATGFYPDHVELSWWVNGKEVHSGVCTDPQPLKEQPALNDSRYCLSSRLRVSATFWQNPRNHFRCQVQFYGLSENDEWTQDRAKPVTQIVSAEAWGRADCGFTSESYQQGVLSATILYEILLGKATLYAVLVSALVLMAMVKRKDSRGRAKRSGSGATNFSLLKQAGDVEENPGPTSMDWIWRILFLVGAATGAHSFEQVQLVQSGAEVKKPGSSVKVSCKASGGTFSTYAIHWVRQAPGQGLEWMGRIIPIEGRAYYAQKFQGRVTITADESTSTAYMELSSLRSEDTAVYYCARGRYSYRYWFDYWGQGTLVTVSSTRIQNPDPAVYQLRDSKSSDKSVCLFTDFDSQTNVSQSKDSDVYITDKCVLDMRSMDFKSNSAVAWSNKSDFACANAFNNSIIPEDTFFPSPESSCDVKLVEKSFETDTNLNFQNLSVIGFRILLLKVAGFNLLMTLRLWSS

SEQ ID NO: 19074 - protein, 845 aa, Artificial Sequence
  Synthetic Polypeptide
MALPVTALLLPLALLLHAARPEIVLTQSPATLSLSPGERATLSCRASQSVSSYLAWYQQKPGQAPRLLIYDASNRATGIPARFSGSGSGTDFTLTISSLEPEDFAVYYCQQRSNWPLTFGQGTKVEIKLEDLKNVFPPEVAVFEPSEAEISHTQKATLVCLATGFYPDHVELSWWVNGKEVHSGVCTDPQPLKEQPALNDSRYCLSSRLRVSATFWQNPRNHFRCQVQFYGLSENDEWTQDRAKPVTQIVSAEAWGRADCGFTSESYQQGVLSATILYEILLGKATLYAVLVSALVLMAMVKRKDSRGRAKRSGSGATNFSLLKQAGDVEENPGPTSMDWIWRILFLVGAATGAHSFEQVQLVQSGAEVKKPGSSVKVSCKASGGTFSTYAIHWVRQAPGQGLEWMGRIIPIEGRAYYAQKFQGRVTITADESTSTAYMELSSLRSEDTAVYYCARGRYSYRYWFDYWGQGTLVTVSSTRIQNPDPAVYQLRDSKSSDKSVCLFTDFDSQTNVSQSKDSDVYITDKCVLDMRSMDFKSNSAVAWSNKSDFACANAFNNSIIPEDTFFPSPESSCDVKLVEKSFETDTNLNFQNLSVIGFRILLLKVAGFNLLMTLRLWSSRAKRSGSGVKQTLNFDLLKLAGDVESNPGPSRGGIHTMATYEVLCEVARKLGTDDREVVLFLLNVFIPQPTLAQLIGALRALKEEGRLTFPLLAECLFRAGRRDLLRDLLHLDPRFLERHLAGTMSYFSPYQLTVLHVDGELCARDIRSLIFLSKDTIGSRSTPQTFLHWVYCMENLDLLGPTDVDALMSMLRSLSRVDLQRQVQTLMGLHLSGPSHSQHYRHTP

SEQ ID NO: 19075 - protein, 624 aa, Artificial Sequence
  Synthetic Polypeptide
MALPVTALLLPLALLLHAARPEIVLTQSPATLSLSPGERATLSCRASQSVSSYLAWYQQKPGQAPRLLIYDASNRATGIPARFSGSGSGTDFTLTISSLEPEDFAVYYCQQRSNWPLTFGQGTKVEIKLEIQNPDPAVYQLRDSKSSDKSVCLFTDFDSQTNVSQSKDSDVYITDKCVLDMRSMDFKSNSAVAWSNKSDFACANAFNNSIIPEDTFFPSPESSCDVKLVEKSFETDTNLNFQNLSVIGFRILLLKVAGFNLLMTLRLWSSRAKRSGSGVKQTLNFDLLKLAGDVESNPGPTSMDWIWRILFLVGAATGAHSFEQVQLVQSGAEVKKPGSSVKVSCKASGGTFSTYAIHWVRQAPGQGLEWMGRIIPIEGRAYYAQKFQGRVTITADESTSTAYMELSSLRSEDTAVYYCARGRYSYRYWFDYWGQGTLVTVSSTREDLKNVFPPEVAVFEPSEAEISHTQKATLVCLATGFYPDHVELSWWVNGKEVHSGVCTDPQPLKEQPALNDSRYCLSSRLRVSATFWQNPRNHFRCQVQFYGLSENDEWTQDRAKPVTQIVSAEAWGRADCGFTSESYQQGVLSATILYEILLGKATLYAVLVSALVLMAMVKRKDSRG

SEQ ID NO: 19076 - protein, 846 aa, Artificial Sequence
  Synthetic Polypeptide
MALPVTALLLPLALLLHAARPEIVLTQSPATLSLSPGERATLSCRASQSVSSYLAWYQQKPGQAPRLLIYDASNRATGIPARFSGSGSGTDFTLTISSLEPEDFAVYYCQQRSNWPLTFGQGTKVEIKLEIQNPDPAVYQLRDSKSSDKSVCLFTDFDSQTNVSQSKDSDVYITDKCVLDMRSMDFKSNSAVAWSNKSDFACANAFNNSIIPEDTFFPSPESSCDVKLVEKSFETDTNLNFQNLSVIGFRILLLKVAGFNLLMTLRLWSSRAKRSGSGVKQTLNFDLLKLAGDVESNPGPTSMDWIWRILFLVGAATGAHSFEQVQLVQSGAEVKKPGSSVKVSCKASGGTFSTYAIHWVRQAPGQGLEWMGRIIPIEGRAYYAQKFQGRVTITADESTSTAYMELSSLRSEDTAVYYCARGRYSYRYWFDYWGQGTLVTVSSTREDLKNVFPPEVAVFEPSEAEISHTQKATLVCLATGFYPDHVELSWWVNGKEVHSGVCTDPQPLKEQPALNDSRYCLSSRLRVSATFWQNPRNHFRCQVQFYGLSENDEWTQDRAKPVTQIVSAEAWGRADCGFTSESYQQGVLSATILYEILLGKATLYAVLVSALVLMAMVKRKDSRGRAKRSGSGATNFSLLKQAGDVEENPGPSRGGIHTMATYEVLCEVARKLGTDDREVVLFLLNVFIPQPTLAQLIGALRALKEEGRLTFPLLAECLFRAGRRDLLRDLLHLDPRFLERHLAGTMSYFSPYQLTVLHVDGELCARDIRSLIFLSKDTIGSRSTPQTFLHWVYCMENLDLLGPTDVDALMSMLRSLSRVDLQRQVQTLMGLHLSGPSHSQHYRHTP

SEQ ID NO: 19077 - protein, 898 aa, Artificial Sequence
  Synthetic Polypeptide
MALPVTALLLPLALLLHAARPLEGKPIPNPLLGLDSTGSGEDLKNVFPPEVAVFEPSKAEIAHTQKATLVCLATGFYPDHVELSWWVNGKEVHSGVCTDPQPLKEQPALNDSRYCLSSRLRVSATFWQNPRNHFRCQVQFYGLSENDEWTQDRAKPVTQIVSAEAWGRADCGITSASYHQGVLSATILYEILLGKATLYAVLVSALVLMAMVKRKDSRGRAKRSGSGATNFSLLKQAGDVEENPGPTSMALPVTALLLPLALLLHAARPEIVLTQSPATLSLSPGERATLSCRASQSVSSYLAWYQQKPGQAPRLLIYDASNRATGIPARFSGSGSGTDFTLTISSLEPEDFAVYYCQQRSNWPLTFGQGTKVEIKGGGGSGGGGSGGGGSQVQLVQSGAEVKKPGSSVKVSCKASGGTFSTYAIHWVRQAPGQGLEWMGRIIPIEGRAYYAQKFQGRVTITADESTSTAYMELSSLRSEDTAVYYCARGRYSYRYWFDYWGQGTLVTVSSTREQKLISEEDGSGIQNPDPAVYQLRDSKSSDKSVCLFTDFDSQTNVSQSKDSDVYITDKCVLDMRSMDFKSNSAVAWSNKSDFACANAFNNSIIPEDTFFPSSDVPCDVKLVEKSFETDTNLNFQNLSVIGFRILLLKVAGFNLLMTLRLWSSRAKRSGSGVKQTLNFDLLKLAGDVESNPGPSRGHMTEYKPTVRLATRDDVPRAVRTLAAAFADYPATRHTVDPDRHIERVTELQELFLTRVGLDIGKVWVADDGAAVAVWTTPESVEAGAVFAEIGPRMAELSGSRLAAQQQMEGLLAPHRPKEPAWFLATVGVSPDHQGKGLGSAVVLPGVEAAERAGVPAFLETSAPRNLPFYERLGFTVTADVEVPEGPRTWCMTRKPGA

SEQ ID NO: 19078 - protein, 899 aa, Artificial Sequence
  Synthetic Polypeptide
MALPVTALLLPLALLLHAARPLEQKLISEEDLGSGDRPDPAVYQLRDSKSSDKSVCLFTDFDSQTNVSQSKDSDVYITDKCVLDMRSMDFKSNSAVAWSNKSDFACANAFNNSIIPEDTFFPSPESSCDVKLVEKSFETDTNLNFQNLSVIGFRILLLKVAGFNLLMTLRLWSSSSRAKRSGSGVKQTLNFDLLKLAGDVESNPGPTSMALPVTALLLPLALLLHAARPEIVLTQSPATLSLSPGERATLSCRASQSVSSYLAWYQQKPGQAPRLLIYDASNRATGIPARFSGSGSGTDFTLTISSLEPEDFAVYYCQQRSNWPLTFGQGTKVEIKGGGGSGGGGSGGGGSQVQLVQSGAEVKKPGSSVKVSCKASGGTFSTYAIHWVRQAPGQGLEWMGRIIPIEGRAYYAQKFQGRVTITADESTSTAYMELSSLRSEDTAVYYCARGRYSYRYWFDYWGQGTLVTVSSTRGKPIPNPLLGLDSTGSGEDLKNVFPPEVAVFEPSEAEISHTQKATLVCLATGFYPDHVELSWWVNGKEVHSGVCTDPQPLKEQPALNDSRYCLSSRLRVSATFWQNPRNHFRCQVQFYGLSENDEWTQDRAKPVTQIVSAEAWGRADCGFTSESYQQGVLSATILYEILLGKATLYAVLVSALVLMAMVKRKDSRGRAKRSGSGATNFSLLKQAGDVEENPGPSRGHMTEYKPTVRLATRDDVPRAVRTLAAAFADYPATRHTVDPDRHIERVTELQELFLTRVGLDIGKVWVADDGAAVAVWTTPESVEAGAVFAEIGPRMAELSGSRLAAQQQMEGLLAPHRPKEPAWFLATVGVSPDHQGKGLGSAVVLPGVEAAERAGVPAFLETSAPRNLPFYERLGFTVTADVEVPEGPRTWCMTRKPGA

SEQ ID NO: 19079 - protein, 853 aa, Artificial Sequence
  Synthetic Polypeptide
MALPVTALLLPLALLLHAARPEIVLTQSPATLSLSPGERATLSCRASQSVSSYLAWYQQKPGQAPRLLIYDASNRATGIPARFSGSGSGTDFTLTISSLEPEDFAVYYCQQRSNWPLTFGQGTKVEIKLEDLKNVFPPEVAVFEPSEAEISHTQKATLVCLATGFYPDHVELSWWVNGKEVHSGVSTDPQPLKEQPALNDSRYCLSSRLRVSATFWQNPRNHFRCQVQFYGLSENDEWTQDRAKPVTQIVSAEAWGRADCGFTSESYQQGVLSATILYEILLGKATLYAVLVSALVLMAMVKRKDSRGRAKRSGSGATNFSLLKQAGDVEENPGPTSMDWIWRILFLVGAATGAHSFEQVQLVQSGAEVKKPGSSVKVSCKASGGTFSTYAIHWVRQAPGQGLEWMGRIIPIEGRAYYAQKFQGRVTITADESTSTAYMELSSLRSEDTAVYYCARGRYSYRYWFDYWGQGTLVTVSSTRIQNPDPAVYQLRDSKSSDKSVCLFTDFDSQTNVSQSKDSDVYITDKTVLDMRSMDFKSNSAVAWSNKSDFACANAFNNSIIPEDTFFPSPESSCDVKLVEKSFETDTNLNFQNLSVIGFRILLLKVAGFNLLMTLRLWSSRAKRSGSGVKQTLNFDLLKLAGDVESNPGPSRGHMTEYKPTVRLATRDDVPRAVRTLAAAFADYPATRHTVDPDRHIERVTELQELFLTRVGLDIGKVWVADDGAAVAVWTTPESVEAGAVFAEIGPRMAELSGSRLAAQQQMEGLLAPHRPKEPAWFLATVGVSPDHQGKGLGSAVVLPGVEAAERAGVPAFLETSAPRNLPFYERLGFTVTADVEVPEGPRTWCMTRKPGA

SEQ ID NO: 19080 - protein, 935 aa, Artificial Sequence
  Synthetic Polypeptide
MALPVTALLLPLALLLHAARPEIVLTQSPATLSLSPGERATLSCRASQSVSSYLAWYQQKPGQAPRLLIYDASNRATGIPARFSGSGSGTDFTLTISSLEPEDFAVYYCQQRSNWPLTFGQGTKVEIKLEDLKNVFPPEVAVFEPSEAEISHTQKATLVCLATGFYPDHVELSWWVNGKEVHSGVSTDPQPLKEQPALNDSRYCLSSRLRVSATFWQNPRNHFRCQVQFYGLSENDEWTQDRAKPVTQIVSAEAWGRADCGFTSESYQQGVLSATILYEILLGKATLYAVLVSALVLMAMVKRKDSRGRAKRSGSGATNFSLLKQAGDVEENPGPTSMDWIWRILFLVGAATGAHSFEQVQLVQSGAEVKKPGSSVKVSCKASGGTFSTYAIHWVRQAPGQGLEWMGRIIPIEGRAYYAQKFQGRVTITADESTSTAYMELSSLRSEDTAVYYCARGRYSYRYWFDYWGQGTLVTVSSTREQKLISEEDGSGTPFPSLAPPIMLLVDGKQQMVVVCLVLDVAPPGLDSPIWFSAGNGSALDAFTYGPSPATDGTWTNLAHLSLPSEELASWEPLVCHTGPGAEGHSRSTQPMHLSGEASTARTCPQEPLRGTPGGALWLGVLRLLLFKLLLFDLLLTCSCLCDPAGPLPSPATTTRLRALGSHRLHPATETGGREATSSPRPQPRDRRWGDTPPGRKPGSPVRAKRSGSGVKQTLNFDLLKLAGDVESNPGPSRGHMTEYKPTVRLATRDDVPRAVRTLAAAFADYPATRHTVDPDRHIERVTELQELFLTRVGLDIGKVWVADDGAAVAVWTTPESVEAGAVFAEIGPRMAELSGSRLAAQQQMEGLLAPHRPKEPAWFLATVGVSPDHQGKGLGSAVVLPGVEAAERAGVPAFLETSAPRNLPFYERLGFTVTADVEVPEGPRTWCMTRKPGA

SEQ ID NO: 19081 - protein, 953 aa, Artificial Sequence
  Synthetic Polypeptide
MALPVTALLLPLALLLHAARPLEDLKNVFPPEVAVFEPSEAEISHTQKATLVCLATGFYPDHVELSWWVNGKEVHSGVSTDPQPLKEQPALNDSRYCLSSRLRVSATFWQNPRNHFRCQVQFYGLSENDEWTQDRAKPVTQIVSAEAWGRADCGFTSESYQQGVLSATILYEILLGKATLYAVLVSALVLMAMVKRKDSRGRAKRSGSGATNFSLLKQAGDVEENPGPTSMALPVTALLLPLALLLHAARPEIVLTQSPATLSLSPGERATLSCRASQSVSSYLAWYQQKPGQAPRLLIYDASNRATGIPARFSGSGSGTDFTLTISSLEPEDFAVYYCQQRSNWPLTFGQGTKVEIKGGGGSGGGGSGGGGSQVQLVQSGAEVKKPGSSVKVSCKASGGTFSTYAIHWVRQAPGQGLEWMGRIIPIEGRAYYAQKFQGRVTITADESTSTAYMELSSLRSEDTAVYYCARGRYSYRYWFDYWGQGTLVTVSSTREQKLISEEDLGSGTPFPSLAPPIMLLVDGKQQMVVVCLVLDVAPPGLDSPIWFSAGNGSALDAFTYGPSPATDGTWTNLAHLSLPSEELASWEPLVCHTGPGAEGHSRSTQPMHLSGEASTARTCPQEPLRGTPGGALWLGVLRLLLFKLLLFDLLLTCSCLCDPAGPLPSPATTTRLRALGSHRLHPATETGGREATSSPRPQPRDRRWGDTPPGRKPGSPVRAKRSGSGVKQTLNFDLLKLAGDVESNPGPSRSRGHMTEYKPTVRLATRDDVPRAVRTLAAAFADYPATRHTVDPDRHIERVTELQELFLTRVGLDIGKVWVADDGAAVAVWTTPESVEAGAVFAEIGPRMAELSGSRLAAQQQMEGLLAPHRPKEPAWFLATVGVSPDHQGKGLGSAVVLPGVEAAERAGVPAFLETSAPRNLPFYERLGFTVTADVEVPEGPRTWCMTRKPGA

SEQ ID NO: 19082 - protein, 890 aa, Artificial Sequence
  Synthetic Polypeptide
MALPVTALLLPLALLLHAARPEIVLTQSPATLSLSPGERATLSCRASQSVSSYLAWYQQKPGQAPRLLIYDASNRATGIPARFSGSGSGTDFTLTISSLEPEDFAVYYCQQRSNWPLTFGQGTKVEIKLEGKPIPNPLLGLDSTGSGDKQLDADVSPKPTIFLPSIAETKLQKAGTYLCLLEKFFPDVIKIHWQEKKSNTILGSQEGNTMKTNDTYMKFSWLTVPEKSLDKEHRCIVRHENNKNGVDQEIIFPPIKTDVITMDPKDNCSKDANDTLLLQLTNTSAYYMYLLLLLKSVVYFAIITCCLLRRTAFCCNGEKSRAKRSGSGATNFSLLKQAGDVEENPGPTSMDWIWRILFLVGAATGAHSFEQVQLVQSGAEVKKPGSSVKVSCKASGGTFSTYAIHWVRQAPGQGLEWMGRIIPIEGRAYYAQKFQGRVTITADESTSTAYMELSSLRSEDTAVYYCARGRYSYRYWFDYWGQGTLVTVSSTREQKLISEEDGSGSQPHTKPSVFVMKNGTNVACLVKEFYPKDIRINLVSSKKITEFDPAIVISPSGKYNAVKLGKYEDSNSVTCSVQHDNKTVHSTDFEVKTDSTDHVKPKETENTKQPSKSCHKPKAIVHTEKVNMMSLTVLGLRMLFAKTVAVNFLLTAKLFFLRAKRSGSGVKQTLNFDLLKLAGDVESNPGPSRGHMTEYKPTVRLATRDDVPRAVRTLAAAFADYPATRHTVDPDRHIERVTELQELFLTRVGLDIGKVWVADDGAAVAVWTTPESVEAGAVFAEIGPRMAELSGSRLAAQQQMEGLLAPHRPKEPAWFLATVGVSPDHQGKGLGSAVVLPGVEAAERAGVPAFLETSAPRNLPFYERLGFTVTADVEVPEGPRTWCMTRKPGA

SEQ ID NO: 19083 - protein, 628 aa, Artificial Sequence
  Synthetic Polypeptide
MALPVTALLLPLALLLHAARPEIVLTQSPATLSLSPGERATLSCRASQSVSSYLAWYQQKPGQAPRLLIYDASNRATGIPARFSGSGSGTDFTLTISSLEPEDFAVYYCQQRSNWPLTFGQGTKVEIKLESQPHTKPSVFVMKNGTNVACLVKEFYPKDIRINLVSSKKITEFDPAIVISPSGKYNAVKLGKYEDSNSVTCSVQHDNKTVHSTDFEVKTDSTDHVKPKETENTKQPSKSCHKPKAIVHTEKVNMMSLTVLGLRMLFAKTVAVNFLLTAKLFFLRAKRSGSGATNFSLLKQAGDVEENPGPTSMDWIWRILFLVGAATGAHSFEQVQLVQSGAEVKKPGSSVKVSCKASGGTFSTYAIHWVRQAPGQGLEWMGRIIPIEGRAYYAQKFQGRVTITADESTSTAYMELSSLRSEDTAVYYCARGRYSYRYWFDYWGQGTLVTVSSTRDKQLDADVSPKPTIFLPSIAETKLQKAGTYLCLLEKFFPDVIKIHWQEKKSNTILGSQEGNTMKTNDTYMKFSWLTVPEKSLDKEHRCIVRHENNKNGVDQEIIFPPIKTDVITMDPKDNCSKDANDTLLLQLTNTSAYYMYLLLLLKSVVYFAIITCCLLRRTAFCCNGEKS

SEQ ID NO: 19084 - protein, 905 aa, Artificial Sequence
  Synthetic Polypeptide
MALPVTALLLPLALLLHAARPLEGKPIPNPLLGLDSTGSGDKQLDADVSPKPTIFLPSIAETKLQKAGTYLCLLEKFFPDVIKIHWQEKKSNTILGSQEGNTMKTNDTYMKFSWLTVPEKSLDKEHRCIVRHENNKNGVDQEIIFPPIKTDVITMDPKDNCSKDANDTLLLQLTNTSAYYMYLLLLLKSVVYFAIITCCLLRRTAFCCNGEKSRAKRSGSGATNFSLLKQAGDVEENPGPTSMALPVTALLLPLALLLHAARPEIVLTQSPATLSLSPGERATLSCRASQSVSSYLAWYQQKPGQAPRLLIYDASNRATGIPARFSGSGSGTDFTLTISSLEPEDFAVYYCQQRSNWPLTFGQGTKVEIKGGGGSGGGGSGGGGSQVQLVQSGAEVKKPGSSVKVSCKASGGTFSTYAIHWVRQAPGQGLEWMGRIIPIEGRAYYAQKFQGRVTITADESTSTAYMELSSLRSEDTAVYYCARGRYSYRYWFDYWGQGTLVTVSSTREQKLISEEDGSGSQPHTKPSVFVMKNGTNVACLVKEFYPKDIRINLVSSKKITEFDPAIVISPSGKYNAVKLGKYEDSNSVTCSVQHDNKTVHSTDFEVKTDSTDHVKPKETENTKQPSKSCHKPKAIVHTEKVNMMSLTVLGLRMLFAKTVAVNFLLTAKLFFLRAKRSGSGVKQTLNFDLLKLAGDVESNPGPSRGHMTEYKPTVRLATRDDVPRAVRTLAAAFADYPATRHTVDPDRHIERVTELQELFLTRVGLDIGKVWVADDGAAVAVWTTPESVEAGAVFAEIGPRMAELSGSRLAAQQQMEGLLAPHRPKEPAWFLATVGVSPDHQGKGLGSAVVLPGVEAAERAGVPAFLETSAPRNLPFYERLGFTVTADVEVPEGPRTWCMTRKPGA

SEQ ID NO: 19085 - protein, 1030 aa, Artificial Sequence
  Synthetic Polypeptide
MALPVTALLLPLALLLHAARPEIVLTQSPATLSLSPGERATLSCRASQSVSSYLAWYQQKPGQAPRLLIYDASNRATGIPARFSGSGSGTDFTLTISSLEPEDFAVYYCQQRSNWPLTFGQGTKVEIKGQPKANPTVTLFPPSSEELQANKATLVCLISDFYPGAVTVAWKADGSPVKAGVETTKPSKQSNNKYAASSYLSLTPEQWKSHRSYSCQVTHEGSTVEKTVAPTECSGSQSFGLLDPKLCYLLDGILFIYGVILTALFLRVKFSRSADAPAYQQGQNQLYNELNLGRREEYDVLDKRRGRDPEMGGKPQRRKNPQEGLYNELQKDKMAEAYSEIGMKGERRRGKGHDGLYQGLSTATKDTYDALHMQALPPRRAKRSGSGATNFSLLKQAGDVEENPGPTSMDWIWRILFLVGAATGAHSFEQVQLVQSGAEVKKPGSSVKVSCKASGGTFSTYAIHWVRQAPGQGLEWMGRIIPIEGRAYYAQKFQGRVTITADESTSTAYMELSSLRSEDTAVYYCARGRYSYRYWFDYWGQGTLVTVSSASTKGPSVFPLAPSSKSTSGGTAALGCLVKDYFPEPVTVSWNSGALTSGVHTFPAVLQSSGLYSLSSVVTVPSSSLGTQTYICNVNHKPSNTKVDKRVEPKSCGTQSFGLLDPKLCYLLDGILFIYGVILTALFLRVKFSRSADAPAYQQGQNQLYNELNLGRREEYDVLDKRRGRDPEMGGKPQRRKNPQEGLYNELQKDKMAEAYSEIGMKGERRRGKGHDGLYQGLSTATKDTYDALHMQALPPRRAKRSGSGVKQTLNFDLLKLAGDVESNPGPSRGHMTEYKPTVRLATRDDVPRAVRTLAAAFADYPATRHTVDPDRHIERVTELQELFLTRVGLDIGKVWVADDGAAVAVWTTPESVEAGAVFAEIGPRMAELSGSRLAAQQQMEGLLAPHRPKEPAWFLATVGVSPDHQGKGLGSAVVLPGVEAAERAGVPAFLETSAPRNLPFYERLGFTVTADVEVPEGPRTWCMTRKPGA

SEQ ID NO: 19086 - protein, 816 aa, Artificial Sequence
  Synthetic Polypeptide
MALPVTALLLPLALLLHAARPEIVLTQSPATLSLSPGERATLSCRASQSVSSYLAWYQQKPGQAPRLLIYDASNRATGIPARFSGSGSGTDFTLTISSLEPEDFAVYYCQQRSNWPLTFGQGTKVEIKLEDLKNVFPPEVAVFEPSEAEISHTQKATLVCLATGFYPDHVELSWWVNGKEVHSGVSTDPQPLKEQPALNDSRYCLSSRLRVSATFWQNPRNHFRCQVQFYGLSENDEWTQDRAKPVTQIVSAEAWGRADCGSQSFGLLDPKLCYLLDGILFIYGVILTALFLRVKFSRSADAPAYQQGQNQLYNELNLGRREEYDVLDKRRGRDPEMGGKPQRRKNPQEGLYNELQKDKMAEAYSEIGMKGERRRGKGHDGLYQGLSTATKDTYDALHMQALPPRRAKRSGSGATNFSLLKQAGDVEENPGPTSMDWIWRILFLVGAATGAHSFEQVQLVQSGAEVKKPGSSVKVSCKASGGTFSTYAIHWVRQAPGQGLEWMGRIIPIEGRAYYAQKFQGRVTITADESTSTAYMELSSLRSEDTAVYYCARGRYSYRYWFDYWGQGTLVTVSSTRIQNPDPAVYQLRDSKSSDKSVCLFTDFDSQTNVSQSKDSDVYITDKTVLDMRSMDFKSNSAVAWSNKSDFACANAFNNSIIPEDTFFPSPESSCGTQSFGLLDPKLCYLLDGILFIYGVILTALFLRVKFSRSADAPAYQQGQNQLYNELNLGRREEYDVLDKRRGRDPEMGGKPQRRKNPQEGLYNELQKDKMAEAYSEIGMKGERRRGKGHDGLYQGLSTATKDTYDALHMQALPPR

SEQ ID NO: 19087 - protein, 816 aa, Artificial Sequence
  Synthetic Polypeptide
MALPVTALLLPLALLLHAARPEIVLTQSPATLSLSPGERATLSCRASQSVSSYLAWYQQKPGQAPRLLIYDASNRATGIPARFSGSGSGTDFTLTISSLEPEDFAVYYCQQRSNWPLTFGQGTKVEIKLEDLKNVFPPEVAVFEPSKAEIAHTQKATLVCLATGFYPDHVELSWWVNGKEVHSGVCTDPQPLKEQPALNDSRYCLSSRLRVSATFWQNPRNHFRCQVQFYGLSENDEWTQDRAKPVTQIVSAEAWGRADCGSQSFGLLDPKLCYLLDGILFIYGVILTALFLRVKFSRSADAPAYQQGQNQLYNELNLGRREEYDVLDKRRGRDPEMGGKPQRRKNPQEGLYNELQKDKMAEAYSEIGMKGERRRGKGHDGLYQGLSTATKDTYDALHMQALPPRRAKRSGSGATNFSLLKQAGDVEENPGPTSMDWIWRILFLVGAATGAHSFEQVQLVQSGAEVKKPGSSVKVSCKASGGTFSTYAIHWVRQAPGQGLEWMGRIIPIEGRAYYAQKFQGRVTITADESTSTAYMELSSLRSEDTAVYYCARGRYSYRYWFDYWGQGTLVTVSSTRIQNPDPAVYQLRDSKSSDKSVCLFTDFDSQTNVSQSKDSDVYITDKCVLDMRSMDFKSNSAVAWSNKSDFACANAFNNSIIPEDTFFPSSDVPCGTQSFGLLDPKLCYLLDGILFIYGVILTALFLRVKFSRSADAPAYQQGQNQLYNELNLGRREEYDVLDKRRGRDPEMGGKPQRRKNPQEGLYNELQKDKMAEAYSEIGMKGERRRGKGHDGLYQGLSTATKDTYDALHMQALPPR

SEQ ID NO: 19088 - protein, 887 aa, Artificial Sequence
  Synthetic Polypeptide
MALPVTALLLPLALLLHAARPEIVLTQSPATLSLSPGERATLSCRASQSVSSYLAWYQQKPGQAPRLLIYDASNRATGIPARFSGSGSGTDFTLTISSLEPEDFAVYYCQQRSNWPLTFGQGTKVEIKLEGKPIPNPLLGLDSTGSGEDLKNVFPPEVAVFEPSEAEISHTQKATLVCLATGFYPDHVELSWWVNGKEVHSGVSTDPQPLKEQPALNDSRYCLSSRLRVSATFWQNPRNHFRCQVQFYGLSENDEWTQDRAKPVTQIVSAEAWGRADCGSQSFGLLDPKLCYLLDGILFIYGVILTALFLRVKFSRSADAPAYQQGQNQLYNELNLGRREEYDVLDKRRGRDPEMGGKPQRRKNPQEGLYNELQKDKMAEAYSEIGMKGERRRGKGHDGLYQGLSTATKDTYDALHMQALPPRRAKRSGSGATNFSLLKQAGDVEENPGPTSMDWIWRILFLVGAATGAHSFEQVQLVQSGAEVKKPGSSVKVSCKASGGTFSTYAIHWVRQAPGQGLEWMGRIIPIEGRAYYAQKFQGRVTITADESTSTAYMELSSLRSEDTAVYYCARGRYSYRYWFDYWGQGTLVTVSSTREQKLISEEDGSGIQNPDPAVYQLRDSKSSDKSVCLFTDFDSQTNVSQSKDSDVYITDKTVLDMRSMDFKSNSAVAWSNKSDFACANAFNNSIIPEDTFFPSPESSCGTQSFGLLDPKLCYLLDGILFIYGVILTALFLRSKRSRLLHSDYMNMTPRRPGPTRKHYQPYAPPRDFAAYRSRVKFSRSADAPAYQQGQNQLYNELNLGRREEYDVLDKRRGRDPEMGGKPQRRKNPQEGLYNELQKDKMAEAYSEIGMKGERRRGKGHDGLYQGLSTATKDTYDALHMQALPPR

SEQ ID NO: 19089 - protein, 928 aa, Artificial Sequence
  Synthetic Polypeptide
MALPVTALLLPLALLLHAARPEIVLTQSPATLSLSPGERATLSCRASQSVSSYLAWYQQKPGQAPRLLIYDASNRATGIPARFSGSGSGTDFTLTISSLEPEDFAVYYCQQRSNWPLTFGQGTKVEIKLEGKPIPNPLLGLDSTGSGEDLKNVFPPEVAVFEPSEAEISHTQKATLVCLATGFYPDHVELSWWVNGKEVHSGVSTDPQPLKEQPALNDSRYCLSSRLRVSATFWQNPRNHFRCQVQFYGLSENDEWTQDRAKPVTQIVSAEAWGRADCGSQSFGLLDPKLCYLLDGILFIYGVILTALFLRSKRSRLLHSDYMNMTPRRPGPTRKHYQPYAPPRDFAAYRSRVKFSRSADAPAYQQGQNQLYNELNLGRREEYDVLDKRRGRDPEMGGKPQRRKNPQEGLYNELQKDKMAEAYSEIGMKGERRRGKGHDGLYQGLSTATKDTYDALHMQALPPRRAKRSGSGATNFSLLKQAGDVEENPGPTSMDWIWRILFLVGAATGAHSFEQVQLVQSGAEVKKPGSSVKVSCKASGGTFSTYAIHWVRQAPGQGLEWMGRIIPIEGRAYYAQKFQGRVTITADESTSTAYMELSSLRSEDTAVYYCARGRYSYRYWFDYWGQGTLVTVSSTREQKLISEEDGSGIQNPDPAVYQLRDSKSSDKSVCLFTDFDSQTNVSQSKDSDVYITDKTVLDMRSMDFKSNSAVAWSNKSDFACANAFNNSIIPEDTFFPSPESSCGTQSFGLLDPKLCYLLDGILFIYGVILTALFLRSKRSRLLHSDYMNMTPRRPGPTRKHYQPYAPPRDFAAYRSRVKFSRSADAPAYQQGQNQLYNELNLGRREEYDVLDKRRGRDPEMGGKPQRRKNPQEGLYNELQKDKMAEAYSEIGMKGERRRGKGHDGLYQGLSTATKDTYDALHMQALPPR

SEQ ID NO: 19090 - protein, 889 aa, Artificial Sequence
  Synthetic Polypeptide
MALPVTALLLPLALLLHAARPEIVLTQSPATLSLSPGERATLSCRASQSVSSYLAWYQQKPGQAPRLLIYDASNRATGIPARFSGSGSGTDFTLTISSLEPEDFAVYYCQQRSNWPLTFGQGTKVEIKLEGKPIPNPLLGLDSTGSGEDLKNVFPPEVAVFEPSEAEISHTQKATLVCLATGFYPDHVELSWWVNGKEVHSGVSTDPQPLKEQPALNDSRYCLSSRLRVSATFWQNPRNHFRCQVQFYGLSENDEWTQDRAKPVTQIVSAEAWGRADCGSQSFGLLDPKLCYLLDGILFIYGVILTALFLRVKFSRSADAPAYQQGQNQLYNELNLGRREEYDVLDKRRGRDPEMGGKPQRRKNPQEGLYNELQKDKMAEAYSEIGMKGERRRGKGHDGLYQGLSTATKDTYDALHMQALPPRRAKRSGSGATNFSLLKQAGDVEENPGPTSMDWIWRILFLVGAATGAHSFEQVQLVQSGAEVKKPGSSVKVSCKASGGTFSTYAIHWVRQAPGQGLEWMGRIIPIEGRAYYAQKFQGRVTITADESTSTAYMELSSLRSEDTAVYYCARGRYSYRYWFDYWGQGTLVTVSSTREQKLISEEDLGSGIQNPDPAVYQLRDSKSSDKSVCLFTDFDSQTNVSQSKDSDVYITDKTVLDMRSMDFKSNSAVAWSNKSDFACANAFNNSIIPEDTFFPSPESSCGTQSFGLLDPKLCYLLDGILFIYGVILTALFLKRGRKKLLYIFKQPFMRPVQTTQEEDGCSCRFPEEEEGGCELRVKFSRSADAPAYQQGQNQLYNELNLGRREEYDVLDKRRGRDPEMGGKPQRRKNPQEGLYNELQKDKMAEAYSEIGMKGERRRGKGHDGLYQGLSTATKDTYDALHMQALPPR

SEQ ID NO: 19091 - protein, 931 aa, Artificial Sequence
  Synthetic Polypeptide
MALPVTALLLPLALLLHAARPEIVLTQSPATLSLSPGERATLSCRASQSVSSYLAWYQQKPGQAPRLLIYDASNRATGIPARFSGSGSGTDFTLTISSLEPEDFAVYYCQQRSNWPLTFGQGTKVEIKLEGKPIPNPLLGLDSTGSGEDLKNVFPPEVAVFEPSEAEISHTQKATLVCLATGFYPDHVELSWWVNGKEVHSGVSTDPQPLKEQPALNDSRYCLSSRLRVSATFWQNPRNHFRCQVQFYGLSENDEWTQDRAKPVTQIVSAEAWGRADCGSQSFGLLDPKLCYLLDGILFIYGVILTALFLKRGRKKLLYIFKQPFMRPVQTTQEEDGCSCRFPEEEEGGCELRVKFSRSADAPAYQQGQNQLYNELNLGRREEYDVLDKRRGRDPEMGGKPQRRKNPQEGLYNELQKDKMAEAYSEIGMKGERRRGKGHDGLYQGLSTATKDTYDALHMQALPPRRAKRSGSGATNFSLLKQAGDVEENPGPTSMDWIWRILFLVGAATGAHSFEQVQLVQSGAEVKKPGSSVKVSCKASGGTFSTYAIHWVRQAPGQGLEWMGRIIPIEGRAYYAQKFQGRVTITADESTSTAYMELSSLRSEDTAVYYCARGRYSYRYWFDYWGQGTLVTVSSTREQKLISEEDLGSGIQNPDPAVYQLRDSKSSDKSVCLFTDFDSQTNVSQSKDSDVYITDKTVLDMRSMDFKSNSAVAWSNKSDFACANAFNNSIIPEDTFFPSPESSCGTQSFGLLDPKLCYLLDGILFIYGVILTALFLKRGRKKLLYIFKQPFMRPVQTTQEEDGCSCRFPEEEEGGCELRVKFSRSADAPAYQQGQNQLYNELNLGRREEYDVLDKRRGRDPEMGGKPQRRKNPQEGLYNELQKDKMAEAYSEIGMKGERRRGKGHDGLYQGLSTATKDTYDALHMQALPPR

SEQ ID NO: 19092 - protein, 821 aa, Artificial Sequence
  Synthetic Polypeptide
MALPVTALLLPLALLLHAARPEIVLTQSPATLSLSPGERATLSCRASQSVSSYLAWYQQKPGQAPRLLIYDASNRATGIPARFSGSGSGTDFTLTISSLEPEDFAVYYCQQRSNWPLTFGQGTKVEIKLEQSFGLLDPKLCYLLDGILFIYGVILTALFLRVKFSRSADAPAYQQGQNQLYNELNLGRREEYDVLDKRRGRDPEMGGKPQRRKNPQEGLYNELQKDKMAEAYSEIGMKGERRRGKGHDGLYQGLSTATKDTYDALHMQALPPRRAKRSGSGATNFSLLKQAGDVEENPGPTSMDWIWRILFLVGAATGAHSFEQVQLVQSGAEVKKPGSSVKVSCKASGGTFSTYAIHWVRQAPGQGLEWMGRIIPIEGRAYYAQKFQGRVTITADESTSTAYMELSSLRSEDTAVYYCARGRYSYRYWFDYWGQGTLVTVSSTRQSFGLLDPKLCYLLDGILFIYGVILTALFLRVKFSRSADAPAYQQGQNQLYNELNLGRREEYDVLDKRRGRDPEMGGKPQRRKNPQEGLYNELQKDKMAEAYSEIGMKGERRRGKGHDGLYQGLSTATKDTYDALHMQALPPRRAKRSGSGVKQTLNFDLLKLAGDVESNPGPSRGHMTEYKPTVRLATRDDVPRAVRTLAAAFADYPATRHTVDPDRHIERVTELQELFLTRVGLDIGKVWVADDGAAVAVWTTPESVEAGAVFAEIGPRMAELSGSRLAAQQQMEGLLAPHRPKEPAWFLATVGVSPDHQGKGLGSAVVLPGVEAAERAGVPAFLETSAPRNLPFYERLGFTVTADVEVPEGPRTWCMTRKPGA

SEQ ID NO: 19093 - protein, 646 aa, Artificial Sequence
  Synthetic Polypeptide
MALPVTALLLPLALLLHAARPEIVLTQSPATLSLSPGERATLSCRASQSVSSYLAWYQQKPGQAPRLLIYDASNRATGIPARFSGSGSGTDFTLTISSLEPEDFAVYYCQQRSNWPLTFGQGTKVEIKLEGQPKANPTVTLFPPSSEELQANKATLVCLISDFYPGAVTVAWKADGSPVKAGVETTKPSKQSNNKYAASSYLSLTPEQWKSHRSYSCQVTHEGSTVEKTVAPTECSPIKTDVITMDPKDNCSKDANDTLLLQLTNTSAYYMYLLLLLKSVVYFAIITCCLLRRTAFCCNGEKSRAKRSGSGATNFSLLKQAGDVEENPGPTSMDWIWRILFLVGAATGAHSFEQVQLVQSGAEVKKPGSSVKVSCKASGGTFSTYAIHWVRQAPGQGLEWMGRIIPIEGRAYYAQKFQGRVTITADESTSTAYMELSSLRSEDTAVYYCARGRYSYRYWFDYWGQGTLVTVSSTRASTKGPSVFPLAPSSKSTSGGTAALGCLVKDYFPEPVTVSWNSGALTSGVHTFPAVLQSSGLYSLSSVVTVPSSSLGTQTYICNVNHKPSNTKVDKRVEPKSCEVKTDSTDHVKPKETENTKQPSKSCHKPKAIVHTEKVNMMSLTVLGLRMLFAKTVAVNFLLTAKLFFL

SEQ ID NO: 19094 - protein, 624 aa, Artificial Sequence
  Synthetic Polypeptide
MALPVTALLLPLALLLHAARPEIVLTQSPATLSLSPGERATLSCRASQSVSSYLAWYQQKPGQAPRLLIYDASNRATGIPARFSGSGSGTDFTLTISSLEPEDFAVYYCQQRSNWPLTFGQGTKVEIKLEGQPKANPTVTLFPPSSEELQANKATLVCLISDFYPGAVTVAWKADGSPVKAGVETTKPSKQSNNKYAASSYLSLTPEQWKSHRSYSCQVTHEGSTVEKTVAPTECSGRADCGITSASYHQGVLSATILYEILLGKATLYAVLVSALVLMAMVKRKDSRGRAKRSGSGATNFSLLKQAGDVEENPGPTSMDWIWRILFLVGAATGAHSFEQVQLVQSGAEVKKPGSSVKVSCKASGGTFSTYAIHWVRQAPGQGLEWMGRIIPIEGRAYYAQKFQGRVTITADESTSTAYMELSSLRSEDTAVYYCARGRYSYRYWFDYWGQGTLVTVSSTRASTKGPSVFPLAPSSKSTSGGTAALGCLVKDYFPEPVTVSWNSGALTSGVHTFPAVLQSSGLYSLSSVVTVPSSSLGTQTYICNVNHKPSNTKVDKRVEPKSCIPEDTFFPSSDVPCDVKLVEKSFETDTNLNFQNLSVIGFRILLLKVAGFNLLMTLRLWSS

SEQ ID NO: 19095 - protein, 624 aa, Artificial Sequence
  Synthetic Polypeptide
MALPVTALLLPLALLLHAARPEIVLTQSPATLSLSPGERATLSCRASQSVSSYLAWYQQKPGQAPRLLIYDASNRATGIPARFSGSGSGTDFTLTISSLEPEDFAVYYCQQRSNWPLTFGQGTKVEIKLEGQPKANPTVTLFPPSSEELQANKATLVCLISDFYPGAVTVAWKADGSPVKAGVETTKPSKQSNNKYAASSYLSLTPEQWKSHRSYSCQVTHEGSTVEKTVAPTECSGRADCGFTSESYQQGVLSATILYEILLGKATLYAVLVSALVLMAMVKRKDSRGRAKRSGSGATNFSLLKQAGDVEENPGPTSMDWIWRILFLVGAATGAHSFEQVQLVQSGAEVKKPGSSVKVSCKASGGTFSTYAIHWVRQAPGQGLEWMGRIIPIEGRAYYAQKFQGRVTITADESTSTAYMELSSLRSEDTAVYYCARGRYSYRYWFDYWGQGTLVTVSSTRASTKGPSVFPLAPSSKSTSGGTAALGCLVKDYFPEPVTVSWNSGALTSGVHTFPAVLQSSGLYSLSSVVTVPSSSLGTQTYICNVNHKPSNTKVDKRVEPKSCIPEDTFFPSPESSCDVKLVEKSFETDTNLNFQNLSVIGFRILLLKVAGFNLLMTLRLWSS

SEQ ID NO: 19096 - protein, 450 aa, Artificial Sequence
  Synthetic Polypeptide
MALPVTALLLPLALLLHAARPEIVLTQSPATLSLSPGERATLSCRASQSVSSYLAWYQQKPGQAPRLLIYDASNRATGIPARFSGSGSGTDFTLTISSLEPEDFAVYYCQQRSNWPLTFGQGTKVEIKGGGGSGGGGSGGGGSQVQLVQSGAEVKKPGSSVKVSCKASGGTFSTYAIHWVRQAPGQGLEWMGRIIPIEGRAYYAQKFQGRVTITADESTSTAYMELSSLRSEDTAVYYCARGRYSYRYWFDYWGQGTLVTVSSTRDGNEEMGGITQTPYKVSISGTTVILTCPQYPGSEILWQHNDKNIGGDEDDKNIGSDEDHLSLKEFSELEQSGYYVCYPRGSKPEDANFYLYLRARVCENCMEMDVMSVATIVIVDICITGGLLLLVYYWSKNRKAKAKPVTRGAGAGGRQRGQNKERPPPVPNPDYEPIRKGQRDLYSGLNQRRI

SEQ ID NO: 19097 - protein, 415 aa, Artificial Sequence
  Synthetic Polypeptide
MALPVTALLLPLALLLHAARPEIVLTQSPATLSLSPGERATLSCRASQSVSSYLAWYQQKPGQAPRLLIYDASNRATGIPARFSGSGSGTDFTLTISSLEPEDFAVYYCQQRSNWPLTFGQGTKVEIKGGGGSGGGGSGGGGSQVQLVQSGAEVKKPGSSVKVSCKASGGTFSTYAIHWVRQAPGQGLEWMGRIIPIEGRAYYAQKFQGRVTITADESTSTAYMELSSLRSEDTAVYYCARGRYSYRYWFDYWGQGTLVTVSSTRFKIPIEELEDRVFVNCNTSITWVEGTVGTLLSDITRLDLGKRILDPRGIYRCNGTDIYKDKESTVQVHYRMCQSCVELDPATVAGIIVTDVIATLLLALGVFCFAGHETGRLSGAADTQALLRNDQVYQPLRDRDDAQYSHLGGNWARNK

SEQ ID NO: 19098 - protein, 425 aa, Artificial Sequence
  Synthetic Polypeptide
MALPVTALLLPLALLLHAARPEIVLTQSPATLSLSPGERATLSCRASQSVSSYLAWYQQKPGQAPRLLIYDASNRATGIPARFSGSGSGTDFTLTISSLEPEDFAVYYCQQRSNWPLTFGQGTKVEIKGGGGSGGGGSGGGGSQVQLVQSGAEVKKPGSSVKVSCKASGGTFSTYAIHWVRQAPGQGLEWMGRIIPIEGRAYYAQKFQGRVTITADESTSTAYMELSSLRSEDTAVYYCARGRYSYRYWFDYWGQGTLVTVSSTRQSIKGNHLVKVYDYQEDGSVLLTCDAEAKNITWFKDGKMIGFLTEDKKKWNLGSNAKDPRGMYQCKGSQNKSKPLQVYYRMCQNCIELNAATISGFLFAEIVSIFVLAVGVYFIAGQDGVRQSRASDKQTLLPNDQLYQPLKDREDDQYSHLQGNQLRRN

SEQ ID NO: 19099 - protein, 408 aa, Artificial Sequence
  Synthetic Polypeptide
MALPVTALLLPLALLLHAARPEIVLTQSPATLSLSPGERATLSCRASQSVSSYLAWYQQKPGQAPRLLIYDASNRATGIPARFSGSGSGTDFTLTISSLEPEDFAVYYCQQRSNWPLTFGQGTKVEIKGGGGSGGGGSGGGGSQVQLVQSGAEVKKPGSSVKVSCKASGGTFSTYAIHWVRQAPGQGLEWMGRIIPIEGRAYYAQKFQGRVTITADESTSTAYMELSSLRSEDTAVYYCARGRYSYRYWFDYWGQGTLVTVSSTRQSFGLLDPKLCYLLDGILFIYGVILTALFLRVKFSRSADAPAYQQGQNQLYNELNLGRREEYDVLDKRRGRDPEMGGKPQRRKNPQEGLYNELQKDKMAEAYSEIGMKGERRRGKGHDGLYQGLSTATKDTYDALHMQALPPR

SEQ ID NO: 19100 - protein, 450 aa, Artificial Sequence
  Synthetic Polypeptide
MALPVTALLLPLALLLHAARPQVQLVQSGAEVKKPGSSVKVSCKASGGTFSTYAIHWVRQAPGQGLEWMGRIIPIEGRAYYAQKFQGRVTITADESTSTAYMELSSLRSEDTAVYYCARGRYSYRYWFDYWGQGTLVTVSSGGGGSGGGGSGGGGSEIVLTQSPATLSLSPGERATLSCRASQSVSSYLAWYQQKPGQAPRLLIYDASNRATGIPARFSGSGSGTDFTLTISSLEPEDFAVYYCQQRSNWPLTFGQGTKVEIKTRDGNEEMGGITQTPYKVSISGTTVILTCPQYPGSEILWQHNDKNIGGDEDDKNIGSDEDHLSLKEFSELEQSGYYVCYPRGSKPEDANFYLYLRARVCENCMEMDVMSVATIVIVDICITGGLLLLVYYWSKNRKAKAKPVTRGAGAGGRQRGQNKERPPPVPNPDYEPIRKGQRDLYSGLNQRRI

SEQ ID NO: 19101 - protein, 415 aa, Artificial Sequence
  Synthetic Polypeptide
MALPVTALLLPLALLLHAARPQVQLVQSGAEVKKPGSSVKVSCKASGGTFSTYAIHWVRQAPGQGLEWMGRIIPIEGRAYYAQKFQGRVTITADESTSTAYMELSSLRSEDTAVYYCARGRYSYRYWFDYWGQGTLVTVSSGGGGSGGGGSGGGGSEIVLTQSPATLSLSPGERATLSCRASQSVSSYLAWYQQKPGQAPRLLIYDASNRATGIPARFSGSGSGTDFTLTISSLEPEDFAVYYCQQRSNWPLTFGQGTKVEIKTRFKIPIEELEDRVFVNCNTSITWVEGTVGTLLSDITRLDLGKRILDPRGIYRCNGTDIYKDKESTVQVHYRMCQSCVELDPATVAGIIVTDVIATLLLALGVFCFAGHETGRLSGAADTQALLRNDQVYQPLRDRDDAQYSHLGGNWARNK

SEQ ID NO: 19102 - protein, 425 aa, Artificial Sequence
  Synthetic Polypeptide
MALPVTALLLPLALLLHAARPQVQLVQSGAEVKKPGSSVKVSCKASGGTFSTYAIHWVRQAPGQGLEWMGRIIPIEGRAYYAQKFQGRVTITADESTSTAYMELSSLRSEDTAVYYCARGRYSYRYWFDYWGQGTLVTVSSGGGGSGGGGSGGGGSEIVLTQSPATLSLSPGERATLSCRASQSVSSYLAWYQQKPGQAPRLLIYDASNRATGIPARFSGSGSGTDFTLTISSLEPEDFAVYYCQQRSNWPLTFGQGTKVEIKTRQSIKGNHLVKVYDYQEDGSVLLTCDAEAKNITWFKDGKMIGFLTEDKKKWNLGSNAKDPRGMYQCKGSQNKSKPLQVYYRMCQNCIELNAATISGFLFAEIVSIFVLAVGVYFIAGQDGVRQSRASDKQTLLPNDQLYQPLKDREDDQYSHLQGNQLRRN

SEQ ID NO: 19103 - protein, 408 aa, Artificial Sequence
  Synthetic Polypeptide
MALPVTALLLPLALLLHAARPQVQLVQSGAEVKKPGSSVKVSCKASGGTFSTYAIHWVRQAPGQGLEWMGRIIPIEGRAYYAQKFQGRVTITADESTSTAYMELSSLRSEDTAVYYCARGRYSYRYWFDYWGQGTLVTVSSGGGGSGGGGSGGGGSEIVLTQSPATLSLSPGERATLSCRASQSVSSYLAWYQQKPGQAPRLLIYDASNRATGIPARFSGSGSGTDFTLTISSLEPEDFAVYYCQQRSNWPLTFGQGTKVEIKTRQSFGLLDPKLCYLLDGILFIYGVILTALFLRVKFSRSADAPAYQQGQNQLYNELNLGRREEYDVLDKRRGRDPEMGGKPQRRKNPQEGLYNELQKDKMAEAYSEIGMKGERRRGKGHDGLYQGLSTATKDTYDALHMQALPPR

SEQ ID NO: 19104 - protein, 641 aa, Artificial Sequence
  Synthetic Polypeptide
MALPVTALLLPLALLLHAARPEIVLTQSPATLSLSPGERATLSCRASQSVSSYLAWYQQKPGQAPRLLIYDASNRATGIPARFSGSGSGTDFTLTISSLEPEDFAVYYCQQRSNWPLTFGQGTKVEIKGGGGSGGGGSGGGGSQVQLVQSGAEVKKPGSSVKVSCKASGGTFSTYAIHWVRQAPGQGLEWMGRIIPIEGRAYYAQKFQGRVTITADESTSTAYMELSSLRSEDTAVYYCARGRYSYRYWFDYWGQGTLVTVSSTRGSGIQNPDPAVYQLRDSKSSDKSVCLFTDFDSQTNVSQSKDSDVYITDKTVLDMRSMDFKSNSAVAWSNKSDFACANAFNNSIIPEDTFFPSPESSCDVKLVEKSFETDTNLNFQNLSVIGFRILLLKVAGFNLLMTLRLWSSRAKRSGSGVKQTLNFDLLKLAGDVESNPGPSRGHMTEYKPTVRLATRDDVPRAVRTLAAAFADYPATRHTVDPDRHIERVTELQELFLTRVGLDIGKVWVADDGAAVAVWTTPESVEAGAVFAEIGPRMAELSGSRLAAQQQMEGLLAPHRPKEPAWFLATVGVSPDHQGKGLGSAVVLPGVEAAERAGVPAFLETSAPRNLPFYERLGFTVTADVEVPEGPRTWCMTRKPGA

SEQ ID NO: 19105 - protein, 673 aa, Artificial Sequence
  Synthetic Polypeptide
MALPVTALLLPLALLLHAARPEIVLTQSPATLSLSPGERATLSCRASQSVSSYLAWYQQKPGQAPRLLIYDASNRATGIPARFSGSGSGTDFTLTISSLEPEDFAVYYCQQRSNWPLTFGQGTKVEIKGGGGSGGGGSGGGGSQVQLVQSGAEVKKPGSSVKVSCKASGGTFSTYAIHWVRQAPGQGLEWMGRIIPIEGRAYYAQKFQGRVTITADESTSTAYMELSSLRSEDTAVYYCARGRYSYRYWFDYWGQGTLVTVSSLEDLKNVFPPEVAVFEPSEAEISHTQKATLVCLATGFYPDHVELSWWVNGKEVHSGVSTDPQPLKEQPALNDSRYCLSSRLRVSATFWQNPRNHFRCQVQFYGLSENDEWTQDRAKPVTQIVSAEAWGRADCGFTSESYQQGVLSATILYEILLGKATLYAVLVSALVLMAMVKRKDSRGRAKRSGSGATNFSLLKQAGDVEENPGPTRGHMTEYKPTVRLATRDDVPRAVRTLAAAFADYPATRHTVDPDRHIERVTELQELFLTRVGLDIGKVWVADDGAAVAVWTTPESVEAGAVFAEIGPRMAELSGSRLAAQQQMEGLLAPHRPKEPAWFLATVGVSPDHQGKGLGSAVVLPGVEAAERAGVPAFLETSAPRNLPFYERLGFTVTADVEVPEGPRTWCMTRKPGA

SEQ ID NO: 19106 - protein, 723 aa, Artificial Sequence
  Synthetic Polypeptide
MALPVTALLLPLALLLHAARPEIVLTQSPATLSLSPGERATLSCRASQSVSSYLAWYQQKPGQAPRLLIYDASNRATGIPARFSGSGSGTDFTLTISSLEPEDFAVYYCQQRSNWPLTFGQGTKVEIKGGGGSGGGGSGGGGSQVQLVQSGAEVKKPGSSVKVSCKASGGTFSTYAIHWVRQAPGQGLEWMGRIIPIEGRAYYAQKFQGRVTITADESTSTAYMELSSLRSEDTAVYYCARGRYSYRYWFDYWGQGTLVTVSSTREQKLISEEDLGSGTPFPSLAPPIMLLVDGKQQMVVVCLVLDVAPPGLDSPIWFSAGNGSALDAFTYGPSPATDGTWTNLAHLSLPSEELASWEPLVCHTGPGAEGHSRSTQPMHLSGEASTARTCPQEPLRGTPGGALWLGVLRLLLFKLLLFDLLLTCSCLCDPAGPLPSPATTTRLRALGSHRLHPATETGGREATSSPRPQPRDRRWGDTPPGRKPGSPVRAKRSGSGVKQTLNFDLLKLAGDVESNPGPSRSRGHMTEYKPTVRLATRDDVPRAVRTLAAAFADYPATRHTVDPDRHIERVTELQELFLTRVGLDIGKVWVADDGAAVAVWTTPESVEAGAVFAEIGPRMAELSGSRLAAQQQMEGLLAPHRPKEPAWFLATVGVSPDHQGKGLGSAVVLPGVEAAERAGVPAFLETSAPRNLPFYERLGFTVTADVEVPEGPRTWCMTRKPGA

SEQ ID NO: 19107 - protein, 538 aa, Artificial Sequence
  Synthetic Polypeptide
MALPVTALLLPLALLLHAARPEIVLTQSPATLSLSPGERATLSCRASQSVSSYLAWYQQKPGQAPRLLIYDASNRATGIPARFSGSGSGTDFTLTISSLEPEDFAVYYCQQRSNWPLTFGQGTKVEIKLEDLKNVFPPEVAVFEPSEAEISHTQKATLVCLATGFYPDHVELSWWVNGKEVHSGVSTDPQPLKEQPALNDSRYCLSSRLRVSATFWQNPRNHFRCQVQFYGLSENDEWTQDRAKPVTQIVSAEAWGRADCGFTSESYQQGVLSATILYEILLGKATLYAVLVSALVLMAMVKRKDSRGRAKRSGSGATNFSLLKQAGDVEENPGPTRGHMTEYKPTVRLATRDDVPRAVRTLAAAFADYPATRHTVDPDRHIERVTELQELFLTRVGLDIGKVWVADDGAAVAVWTTPESVEAGAVFAEIGPRMAELSGSRLAAQQQMEGLLAPHRPKEPAWFLATVGVSPDHQGKGLGSAVVLPGVEAAERAGVPAFLETSAPRNLPFYERLGFTVTADVEVPEGPRTWCMTRKPGA

SEQ ID NO: 19108 - protein, 308 aa, Artificial Sequence
  Synthetic Polypeptide
MALPVTALLLPLALLLHAARPEIVLTQSPATLSLSPGERATLSCRASQSVSSYLAWYQQKPGQAPRLLIYDASNRATGIPARFSGSGSGTDFTLTISSLEPEDFAVYYCQQRSNWPLTFGQGTKVEIKLEDLKNVFPPEVAVFEPSEAEISHTQKATLVCLATGFYPDHVELSWWVNGKEVHSGVSTDPQPLKEQPALNDSRYCLSSRLRVSATFWQNPRNHFRCQVQFYGLSENDEWTQDRAKPVTQIVSAEAWGRADCGFTSESYQQGVLSATILYEILLGKATLYAVLVSALVLMAMVKRKDSRG

SEQ ID NO: 19109 - protein, 449 aa, Artificial Sequence
  Synthetic Polypeptide
MDWIWRILFLVGAATGAHSFEQVQLVQSGAEVKKPGSSVKVSCKASGGTFSTYAIHWVRQAPGQGLEWMGRIIPIEGRAYYAQKFQGRVTITADESTSTAYMELSSLRSEDTAVYYCARGRYSYRYWFDYWGQGTLVTVSSTRIQNPDPAVYQLRDSKSSDKSVCLFTDFDSQTNVSQSKDSDVYITDKTVLDMRSMDFKSNSAVAWSNKSDFACANAFNNSIIPEDTFFPSPESSCDVKLVEKSFETDTNLNFQNLSVIGFRILLLKVAGFNLLMTLRLWSSRAKRSGSGVKQTLNFDLLKLAGDVESNPGPSRGHMAKPLSQEESTLIERATATINSIPISEDYSVASAALSSDGRIFTGVNVYHFTGGPCAELVVLGTAAAAAAGNLTCIVAIGNENRGILSPCGRCRQVLLDLHPGIKAIVKDSDGQPTAVGIRELLPSGYVWEG

SEQ ID NO: 19110 - protein, 283 aa, Artificial Sequence
  Synthetic Polypeptide
MDWIWRILFLVGAATGAHSFEQVQLVQSGAEVKKPGSSVKVSCKASGGTFSTYAIHWVRQAPGQGLEWMGRIIPIEGRAYYAQKFQGRVTITADESTSTAYMELSSLRSEDTAVYYCARGRYSYRYWFDYWGQGTLVTVSSTRIQNPDPAVYQLRDSKSSDKSVCLFTDFDSQTNVSQSKDSDVYITDKTVLDMRSMDFKSNSAVAWSNKSDFACANAFNNSIIPEDTFFPSPESSCDVKLVEKSFETDTNLNFQNLSVIGFRILLLKVAGFNLLMTLRLWSS

SEQ ID NO: 19111 - protein, 556 aa, Artificial Sequence
  Synthetic Polypeptide
MALPVTALLLPLALLLHAARPEIVLTQSPATLSLSPGERATLSCRASQSVSSYLAWYQQKPGQAPRLLIYDASNRATGIPARFSGSGSGTDFTLTISSLEPEDFAVYYCQQRSNWPLTFGQGTKVEIKLEGKPIPNPLLGLDSTGSGEDLKNVFPPEVAVFEPSEAEISHTQKATLVCLATGFYPDHVELSWWVNGKEVHSGVCTDPQPLKEQPALNDSRYCLSSRLRVSATFWQNPRNHFRCQVQFYGLSENDEWTQDRAKPVTQIVSAEAWGRADCGFTSESYQQGVLSATILYEILLGKATLYAVLVSALVLMAMVKRKDSRGRAKRSGSGATNFSLLKQAGDVEENPGPTRGHMTEYKPTVRLATRDDVPRAVRTLAAAFADYPATRHTVDPDRHIERVTELQELFLTRVGLDIGKVWVADDGAAVAVWTTPESVEAGAVFAEIGPRMAELSGSRLAAQQQMEGLLAPHRPKEPAWFLATVGVSPDHQGKGLGSAVVLPGVEAAERAGVPAFLETSAPRNLPFYERLGFTVTADVEVPEGPRTWCMTRKPGA

SEQ ID NO: 19112 - protein, 326 aa, Artificial Sequence
  Synthetic Polypeptide
MALPVTALLLPLALLLHAARPEIVLTQSPATLSLSPGERATLSCRASQSVSSYLAWYQQKPGQAPRLLIYDASNRATGIPARFSGSGSGTDFTLTISSLEPEDFAVYYCQQRSNWPLTFGQGTKVEIKLEGKPIPNPLLGLDSTGSGEDLKNVFPPEVAVFEPSEAEISHTQKATLVCLATGFYPDHVELSWWVNGKEVHSGVCTDPQPLKEQPALNDSRYCLSSRLRVSATFWQNPRNHFRCQVQFYGLSENDEWTQDRAKPVTQIVSAEAWGRADCGFTSESYQQGVLSATILYEILLGKATLYAVLVSALVLMAMVKRKDSRG

SEQ ID NO: 19113 - protein, 461 aa, Artificial Sequence
  Synthetic Polypeptide
MDWIWRILFLVGAATGAHSFEQVQLVQSGAEVKKPGSSVKVSCKASGGTFSTYAIHWVRQAPGQGLEWMGRIIPIEGRAYYAQKFQGRVTITADESTSTAYMELSSLRSEDTAVYYCARGRYSYRYWFDYWGQGTLVTVSSTREQKLISEEDGSGIQNPDPAVYQLRDSKSSDKSVCLFTDFDSQTNVSQSKDSDVYITDKCVLDMRSMDFKSNSAVAWSNKSDFACANAFNNSIIPEDTFFPSPESSCDVKLVEKSFETDTNLNFQNLSVIGFRILLLKVAGFNLLMTLRLWSSRAKRSGSGVKQTLNFDLLKLAGDVESNPGPSRGHMAKPLSQEESTLIERATATINSIPISEDYSVASAALSSDGRIFTGVNVYHFTGGPCAELVVLGTAAAAAAGNLTCIVAIGNENRGILSPCGRCRQVLLDLHPGIKAIVKDSDGQPTAVGIRELLPSGYVWEG

SEQ ID NO: 19114 - protein, 295 aa, Artificial Sequence
  Synthetic Polypeptide
MDWIWRILFLVGAATGAHSFEQVQLVQSGAEVKKPGSSVKVSCKASGGTFSTYAIHWVRQAPGQGLEWMGRIIPIEGRAYYAQKFQGRVTITADESTSTAYMELSSLRSEDTAVYYCARGRYSYRYWFDYWGQGTLVTVSSTREQKLISEEDGSGIQNPDPAVYQLRDSKSSDKSVCLFTDFDSQTNVSQSKDSDVYITDKCVLDMRSMDFKSNSAVAWSNKSDFACANAFNNSIIPEDTFFPSPESSCDVKLVEKSFETDTNLNFQNLSVIGFRILLLKVAGFNLLMTLRLWSS

SEQ ID NO: 19115 - protein, 641 aa, Artificial Sequence
  Synthetic Polypeptide
MALPVTALLLPLALLLHAARPEIVLTQSPATLSLSPGERATLSCRASQSVSSYLAWYQQKPGQAPRLLIYDASNRATGIPARFSGSGSGTDFTLTISSLEPEDFAVYYCQQRSNWPLTFGQGTKVEIKGGGGSGGGGSGGGGSQVQLVQSGAEVKKPGSSVKVSCKASGGTFSTYAIHWVRQAPGQGLEWMGRIIPIEGRAYYAQKFQGRVTITADESTSTAYMELSSLRSEDTAVYYCARGRYSYRYWFDYWGQGTLVTVSSTRGSGIQNPDPAVYQLRDSKSSDKSVCLFTDFDSQTNVSQSKDSDVYITDKTVLDMRSMDFKSNSAVAWSNKSDFACANAFNNSIIPEDTFFPSSDVPCDVKLVEKSFETDTNLNFQNLSVIGFRILLLKVAGFNLLMTLRLWSSRAKRSGSGVKQTLNFDLLKLAGDVESNPGPSRGHMTEYKPTVRLATRDDVPRAVRTLAAAFADYPATRHTVDPDRHIERVTELQELFLTRVGLDIGKVWVADDGAAVAVWTTPESVEAGAVFAEIGPRMAELSGSRLAAQQQMEGLLAPHRPKEPAWFLATVGVSPDHQGKGLGSAVVLPGVEAAERAGVPAFLETSAPRNLPFYERLGFTVTADVEVPEGPRTWCMTRKPGA

SEQ ID NO: 19116 - protein, 673 aa, Artificial Sequence
  Synthetic Polypeptide
MALPVTALLLPLALLLHAARPEIVLTQSPATLSLSPGERATLSCRASQSVSSYLAWYQQKPGQAPRLLIYDASNRATGIPARFSGSGSGTDFTLTISSLEPEDFAVYYCQQRSNWPLTFGQGTKVEIKGGGGSGGGGSGGGGSQVQLVQSGAEVKKPGSSVKVSCKASGGTFSTYAIHWVRQAPGQGLEWMGRIIPIEGRAYYAQKFQGRVTITADESTSTAYMELSSLRSEDTAVYYCARGRYSYRYWFDYWGQGTLVTVSSLEDLKNVFPPEVAVFEPSKAEIAHTQKATLVCLATGFYPDHVELSWWVNGKEVHSGVSTDPQPLKEQPALNDSRYCLSSRLRVSATFWQNPRNHFRCQVQFYGLSENDEWTQDRAKPVTQIVSAEAWGRADCGITSASYHQGVLSATILYEILLGKATLYAVLVSALVLMAMVKRKDSRGRAKRSGSGATNFSLLKQAGDVEENPGPTRGHMTEYKPTVRLATRDDVPRAVRTLAAAFADYPATRHTVDPDRHIERVTELQELFLTRVGLDIGKVWVADDGAAVAVWTTPESVEAGAVFAEIGPRMAELSGSRLAAQQQMEGLLAPHRPKEPAWFLATVGVSPDHQGKGLGSAVVLPGVEAAERAGVPAFLETSAPRNLPFYERLGFTVTADVEVPEGPRTWCMTRKPGA

SEQ ID NO: 19117 - protein, 696 aa, Artificial Sequence
  Synthetic Polypeptide
MALPVTALLLPLALLLHAARPEIVLTQSPATLSLSPGERATLSCRASQSVSSYLAWYQQKPGQAPRLLIYDASNRATGIPARFSGSGSGTDFTLTISSLEPEDFAVYYCQQRSNWPLTFGQGTKVEIKGGGGSGGGGSGGGGSQVQLVQSGAEVKKPGSSVKVSCKASGGTFSTYAIHWVRQAPGQGLEWMGRIIPIEGRAYYAQKFQGRVTITADESTSTAYMELSSLRSEDTAVYYCARGRYSYRYWFDYWGQGTLVTVSSTRGSGGGGSGGGGSGDGNEEMGGITQTPYKVSISGTTVILTCPQYPGSEILWQHNDKNIGGDEDDKNIGSDEDHLSLKEFSELEQSGYYVCYPRGSKPEDANFYLYLRARVCENCMEMDVMSVATIVIVDICITGGLLLLVYYWSKNRKAKAKPVTRGAGAGGRQRGQNKERPPPVPNPDYEPIRKGQRDLYSGLNQRRIRAKRSGSGVKQTLNFDLLKLAGDVESNPGPSRGHMTEYKPTVRLATRDDVPRAVRTLAAAFADYPATRHTVDPDRHIERVTELQELFLTRVGLDIGKVWVADDGAAVAVWTTPESVEAGAVFAEIGPRMAELSGSRLAAQQQMEGLLAPHRPKEPAWFLATVGVSPDHQGKGLGSAVVLPGVEAAERAGVPAFLETSAPRNLPFYERLGFTVTADVEVPEGPRTWCMTRKPGA

SEQ ID NO: 19118 - protein, 661 aa, Artificial Sequence
  Synthetic Polypeptide
MALPVTALLLPLALLLHAARPEIVLTQSPATLSLSPGERATLSCRASQSVSSYLAWYQQKPGQAPRLLIYDASNRATGIPARFSGSGSGTDFTLTISSLEPEDFAVYYCQQRSNWPLTFGQGTKVEIKGGGGSGGGGSGGGGSQVQLVQSGAEVKKPGSSVKVSCKASGGTFSTYAIHWVRQAPGQGLEWMGRIIPIEGRAYYAQKFQGRVTITADESTSTAYMELSSLRSEDTAVYYCARGRYSYRYWFDYWGQGTLVTVSSTRGSGGGGSGGGGSGFKIPIEELEDRVFVNCNTSITWVEGTVGTLLSDITRLDLGKRILDPRGIYRCNGTDIYKDKESTVQVHYRMCQSCVELDPATVAGIIVTDVIATLLLALGVFCFAGHETGRLSGAADTQALLRNDQVYQPLRDRDDAQYSHLGGNWARNKRAKRSGSGVKQTLNFDLLKLAGDVESNPGPSRGHMTEYKPTVRLATRDDVPRAVRTLAAAFADYPATRHTVDPDRHIERVTELQELFLTRVGLDIGKVWVADDGAAVAVWTTPESVEAGAVFAEIGPRMAELSGSRLAAQQQMEGLLAPHRPKEPAWFLATVGVSPDHQGKGLGSAVVLPGVEAAERAGVPAFLETSAPRNLPFYERLGFTVTADVEVPEGPRTWCMTRKPGA

SEQ ID NO: 19119 - protein, 671 aa, Artificial Sequence
  Synthetic Polypeptide
MALPVTALLLPLALLLHAARPEIVLTQSPATLSLSPGERATLSCRASQSVSSYLAWYQQKPGQAPRLLIYDASNRATGIPARFSGSGSGTDFTLTISSLEPEDFAVYYCQQRSNWPLTFGQGTKVEIKGGGGSGGGGSGGGGSQVQLVQSGAEVKKPGSSVKVSCKASGGTFSTYAIHWVRQAPGQGLEWMGRIIPIEGRAYYAQKFQGRVTITADESTSTAYMELSSLRSEDTAVYYCARGRYSYRYWFDYWGQGTLVTVSSTRGSGGGGSGGGGSGQSIKGNHLVKVYDYQEDGSVLLTCDAEAKNITWFKDGKMIGFLTEDKKKWNLGSNAKDPRGMYQCKGSQNKSKPLQVYYRMCQNCIELNAATISGFLFAEIVSIFVLAVGVYFIAGQDGVRQSRASDKQTLLPNDQLYQPLKDREDDQYSHLQGNQLRRNRAKRSGSGVKQTLNFDLLKLAGDVESNPGPSRGHMTEYKPTVRLATRDDVPRAVRTLAAAFADYPATRHTVDPDRHIERVTELQELFLTRVGLDIGKVWVADDGAAVAVWTTPESVEAGAVFAEIGPRMAELSGSRLAAQQQMEGLLAPHRPKEPAWFLATVGVSPDHQGKGLGSAVVLPGVEAAERAGVPAFLETSAPRNLPFYERLGFTVTADVEVPEGPRTWCMTRKPGA

SEQ ID NO: 19120 - protein, 654 aa, Artificial Sequence
  Synthetic Polypeptide
MALPVTALLLPLALLLHAARPEIVLTQSPATLSLSPGERATLSCRASQSVSSYLAWYQQKPGQAPRLLIYDASNRATGIPARFSGSGSGTDFTLTISSLEPEDFAVYYCQQRSNWPLTFGQGTKVEIKGGGGSGGGGSGGGGSQVQLVQSGAEVKKPGSSVKVSCKASGGTFSTYAIHWVRQAPGQGLEWMGRIIPIEGRAYYAQKFQGRVTITADESTSTAYMELSSLRSEDTAVYYCARGRYSYRYWFDYWGQGTLVTVSSTRGSGGGGSGGGGSGQSFGLLDPKLCYLLDGILFIYGVILTALFLRVKFSRSADAPAYQQGQNQLYNELNLGRREEYDVLDKRRGRDPEMGGKPQRRKNPQEGLYNELQKDKMAEAYSEIGMKGERRRGKGHDGLYQGLSTATKDTYDALHMQALPPRRAKRSGSGVKQTLNFDLLKLAGDVESNPGPSRGHMTEYKPTVRLATRDDVPRAVRTLAAAFADYPATRHTVDPDRHIERVTELQELFLTRVGLDIGKVWVADDGAAVAVWTTPESVEAGAVFAEIGPRMAELSGSRLAAQQQMEGLLAPHRPKEPAWFLATVGVSPDHQGKGLGSAVVLPGVEAAERAGVPAFLETSAPRNLPFYERLGFTVTADVEVPEGPRTWCMTRKPGA

SEQ ID NO: 19121 - protein, 755 aa, Artificial Sequence
  Synthetic Polypeptide
MALPVTALLLPLALLLHAARPEVQLVESGGGLVQPGGSLRLSCAASGFSFSDFWMSWVRQAPGKGLEWVATISQAGSEKDYVDSVKGRFTISRDNAKKSLYLQMNSLRAEDTAVYYCASGVYSFDYRGQGTLVTVSSGTGGGGSGGGGSGGGGSEFEIVLTQSPATLSLSPGERATLSCRASQSVSSYLAWYQQKPGQAPRLLIYDASNRATGIPARFSGSGSGTDFTLTISSLEPEDFAVYYCQQRSNWPLTFGQGTKVEIKLEDLKNVFPPEVAVFEPSEAEISHTQKATLVCLATGFYPDHVELSWWVNGKEVHSGVCTDPQPLKEQPALNDSRYCLSSRLRVSATFWQNPRNHFRCQVQFYGLSENDEWTQDRAKPVTQIVSAEAWGRADCGFTSESYQQGVLSATILYEILLGKATLYAVLVSALVLMAMVKRKDSRGRAKRSGSGATNFSLLKQAGDVEENPGPTSMDWIWRILFLVGAATGAHSFEQVQLVQSGAEVKKPGSSVKVSCKASGGTFSTYAIHWVRQAPGQGLEWMGRIIPIEGRAYYAQKFQGRVTITADESTSTAYMELSSLRSEDTAVYYCARGRYSYRYWFDYWGQGTLVTVSSTRIQNPDPAVYQLRDSKSSDKSVCLFTDFDSQTNVSQSKDSDVYITDKCVLDMRSMDFKSNSAVAWSNKSDFACANAFNNSIIPEDTFFPSPESSCDVKLVEKSFETDTNLNFQNLSVIGFRILLLKVAGFNLLMTLRLWSS

SEQ ID NO: 19122 - protein, 759 aa, Artificial Sequence
  Synthetic Polypeptide
MALPVTALLLPLALLLHAARPEVQLVESGGGLVQPGGSLRLSCAASGFSFSDFWMSWVRQAPGKGLEWVATISQAGSEKDYVDSVKGRFTISRDNAKKSLYLQMNSLRAEDTAVYYCASGVYSFDYRGQGTLVTVSSGTGGGGSGGGGSGGGGSEFEIVLTQSPATLSLSPGERATLSCRASQSVSSYLAWYQQKPGQAPRLLIYDASNRATGIPARFSGSGSGTDFTLTISSLEPEDFAVYYCQQRSNWPLTFGQGTKVEIKLEIQNPDPAVYQLRDSKSSDKSVCLFTDFDSQTNVSQSKDSDVYITDKCVLDMRSMDFKSNSAVAWSNKSDFACANAFNNSIIPEDTFFPSPESSCDVKLVEKSFETDTNLNFQNLSVIGFRILLLKVAGFNLLMTLRLWSSRAKRSGSGVKQTLNFDLLKLAGDVESNPGPTSMDWIWRILFLVGAATGAHSFEQVQLVQSGAEVKKPGSSVKVSCKASGGTFSTYAIHWVRQAPGQGLEWMGRIIPIEGRAYYAQKFQGRVTITADESTSTAYMELSSLRSEDTAVYYCARGRYSYRYWFDYWGQGTLVTVSSTREDLKNVFPPEVAVFEPSEAEISHTQKATLVCLATGFYPDHVELSWWVNGKEVHSGVCTDPQPLKEQPALNDSRYCLSSRLRVSATFWQNPRNHFRCQVQFYGLSENDEWTQDRAKPVTQIVSAEAWGRADCGFTSESYQQGVLSATILYEILLGKATLYAVLVSALVLMAMVKRKDSRG

SEQ ID NO: 19123 - protein, 951 aa, Artificial Sequence
  Synthetic Polypeptide
MALPVTALLLPLALLLHAARPEVQLVESGGGLVQPGGSLRLSCAASGFSFSDFWMSWVRQAPGKGLEWVATISQAGSEKDYVDSVKGRFTISRDNAKKSLYLQMNSLRAEDTAVYYCASGVYSFDYRGQGTLVTVSSGTGGGGSGGGGSGGGGSEFEIVLTQSPATLSLSPGERATLSCRASQSVSSYLAWYQQKPGQAPRLLIYDASNRATGIPARFSGSGSGTDFTLTISSLEPEDFAVYYCQQRSNWPLTFGQGTKVEIKLEDLKNVFPPEVAVFEPSEAEISHTQKATLVCLATGFYPDHVELSWWVNGKEVHSGVSTDPQPLKEQPALNDSRYCLSSRLRVSATFWQNPRNHFRCQVQFYGLSENDEWTQDRAKPVTQIVSAEAWGRADCGSQSFGLLDPKLCYLLDGILFIYGVILTALFLRVKFSRSADAPAYQQGQNQLYNELNLGRREEYDVLDKRRGRDPEMGGKPQRRKNPQEGLYNELQKDKMAEAYSEIGMKGERRRGKGHDGLYQGLSTATKDTYDALHMQALPPRRAKRSGSGATNFSLLKQAGDVEENPGPTSMDWIWRILFLVGAATGAHSFEQVQLVQSGAEVKKPGSSVKVSCKASGGTFSTYAIHWVRQAPGQGLEWMGRIIPIEGRAYYAQKFQGRVTITADESTSTAYMELSSLRSEDTAVYYCARGRYSYRYWFDYWGQGTLVTVSSTRIQNPDPAVYQLRDSKSSDKSVCLFTDFDSQTNVSQSKDSDVYITDKTVLDMRSMDFKSNSAVAWSNKSDFACANAFNNSIIPEDTFFPSPESSCGTQSFGLLDPKLCYLLDGILFIYGVILTALFLRVKFSRSADAPAYQQGQNQLYNELNLGRREEYDVLDKRRGRDPEMGGKPQRRKNPQEGLYNELQKDKMAEAYSEIGMKGERRRGKGHDGLYQGLSTATKDTYDALHMQALPPR

SEQ ID NO: 19124 - protein, 781 aa, Artificial Sequence
  Synthetic Polypeptide
MALPVTALLLPLALLLHAARPEVQLVESGGGLVQPGGSLRLSCAASGFSFSDFWMSWVRQAPGKGLEWVATISQAGSEKDYVDSVKGRFTISRDNAKKSLYLQMNSLRAEDTAVYYCASGVYSFDYRGQGTLVTVSSGTGGGGSGGGGSGGGGSEFEIVLTQSPATLSLSPGERATLSCRASQSVSSYLAWYQQKPGQAPRLLIYDASNRATGIPARFSGSGSGTDFTLTISSLEPEDFAVYYCQQRSNWPLTFGQGTKVEIKLEGQPKANPTVTLFPPSSEELQANKATLVCLISDFYPGAVTVAWKADGSPVKAGVETTKPSKQSNNKYAASSYLSLTPEQWKSHRSYSCQVTHEGSTVEKTVAPTECSPIKTDVITMDPKDNCSKDANDTLLLQLTNTSAYYMYLLLLLKSVVYFAIITCCLLRRTAFCCNGEKSRAKRSGSGATNFSLLKQAGDVEENPGPTSMDWIWRILFLVGAATGAHSFEQVQLVQSGAEVKKPGSSVKVSCKASGGTFSTYAIHWVRQAPGQGLEWMGRIIPIEGRAYYAQKFQGRVTITADESTSTAYMELSSLRSEDTAVYYCARGRYSYRYWFDYWGQGTLVTVSSTRASTKGPSVFPLAPSSKSTSGGTAALGCLVKDYFPEPVTVSWNSGALTSGVHTFPAVLQSSGLYSLSSVVTVPSSSLGTQTYICNVNHKPSNTKVDKRVEPKSCEVKTDSTDHVKPKETENTKQPSKSCHKPKAIVHTEKVNMMSLTVLGLRMLFAKTVAVNFLLTAKLFFL

SEQ ID NO: 19125 - protein, 762 aa, Artificial Sequence
  Synthetic Polypeptide
MALPVTALLLPLALLLHAARPEVQLVESGGGLVQPGGSLRLSCAASGFSFSDFWMSWVRQAPGKGLEWVATISQAGSEKDYVDSVKGRFTISRDNAKKSLYLQMNSLRAEDTAVYYCASGVYSFDYRGQGTLVTVSSGTGGGGSGGGGSGGGGSEFEIVLTQSPATLSLSPGERATLSCRASQSVSSYLAWYQQKPGQAPRLLIYDASNRATGIPARFSGSGSGTDFTLTISSLEPEDFAVYYCQQRSNWPLTFGQGTKVEIKLEGQPKANPTVTLFPPSSEELQANKATLVCLISDFYPGAVTVAWKADGSPVKAGVETTKPSKQSNNKYAASSYLSLTPEQWKSHRSYSCQVTHEGSTVEKTVAPTECSGRADCGFTSESYQQGVLSATILYEILLGKATLYAVLVSALVLMAMVKRKDSRGRAKRSGSGVKQTLNFDLLKLAGDVESNPGPTSMDWIWRILFLVGAATGAHSFEQVQLVQSGAEVKKPGSSVKVSCKASGGTFSTYAIHWVRQAPGQGLEWMGRIIPIEGRAYYAQKFQGRVTITADESTSTAYMELSSLRSEDTAVYYCARGRYSYRYWFDYWGQGTLVTVSSTRASTKGPSVFPLAPSSKSTSGGTAALGCLVKDYFPEPVTVSWNSGALTSGVHTFPAVLQSSGLYSLSSVVTVPSSSLGTQTYICNVNHKPSNTKVDKRVEPKSCIPEDTFFPSPESSCDVKLVEKSFETDTNLNFQNLSVIGFRILLLKVAGFNLLMTLRLWSS

SEQ ID NO: 19126 - protein, 896 aa, Artificial Sequence
  Synthetic Polypeptide
MALPVTALLLPLALLLHAARPEVQLVESGGGLVQPGGSLRLSCAASGFSFSDFWMSWVRQAPGKGLEWVATISQAGSEKDYVDSVKGRFTISRDNAKKSLYLQMNSLRAEDTAVYYCASGVYSFDYRGQGTLVTVSSGTGGGGSGGGGSGGGGSEFEIVLTQSPATLSLSPGERATLSCRASQSVSSYLAWYQQKPGQAPRLLIYDASNRATGIPARFSGSGSGTDFTLTISSLEPEDFAVYYCQQRSNWPLTFGQGTKVEIKLEIQNPDPAVYQLRDSKSSDKSVCLFTDFDSQTNVSQSKDSDVYITDKCVLDMRSMDFKSNSAVAWSNKSDFACANAFNNSIIPEDTFFPSPESSCDVKLVEKSFETDTNLNFQNLSVIGFRILLLKVAGFNLLMTLRLWSSRAKRSGSGVKQTLNFDLLKLAGDVESNPGPTSMDWIWRILFLVGAATGAHSGPQLQLQESGPGLVKPSETLSLTCTVSGDSISSGDYYWGWIRQPPGKGLEWIGHIYYSGVTYYNPSLKSRVTISVDTSRNQFSLKLSSVTAADTAVYYCTREDSSNWRSRGQGTLVTVSSGSGGGGSGGGGSGGGGSFEQVQLVQSGAEVKKPGSSVKVSCKASGGTFSTYAIHWVRQAPGQGLEWMGRIIPIEGRAYYAQKFQGRVTITADESTSTAYMELSSLRSEDTAVYYCARGRYSYRYWFDYWGQGTLVTVSSTREDLKNVFPPEVAVFEPSEAEISHTQKATLVCLATGFYPDHVELSWWVNGKEVHSGVCTDPQPLKEQPALNDSRYCLSSRLRVSATFWQNPRNHFRCQVQFYGLSENDEWTQDRAKPVTQIVSAEAWGRADCGFTSESYQQGVLSATILYEILLGKATLYAVLVSALVLMAMVKRKDSRG

SEQ ID NO: 19127 - protein, 1088 aa, Artificial Sequence
  Synthetic Polypeptide
MALPVTALLLPLALLLHAARPEVQLVESGGGLVQPGGSLRLSCAASGFSFSDFWMSWVRQAPGKGLEWVATISQAGSEKDYVDSVKGRFTISRDNAKKSLYLQMNSLRAEDTAVYYCASGVYSFDYRGQGTLVTVSSGTGGGGSGGGGSGGGGSEFEIVLTQSPATLSLSPGERATLSCRASQSVSSYLAWYQQKPGQAPRLLIYDASNRATGIPARFSGSGSGTDFTLTISSLEPEDFAVYYCQQRSNWPLTFGQGTKVEIKLEDLKNVFPPEVAVFEPSEAEISHTQKATLVCLATGFYPDHVELSWWVNGKEVHSGVSTDPQPLKEQPALNDSRYCLSSRLRVSATFWQNPRNHFRCQVQFYGLSENDEWTQDRAKPVTQIVSAEAWGRADCGSQSFGLLDPKLCYLLDGILFIYGVILTALFLRVKFSRSADAPAYQQGQNQLYNELNLGRREEYDVLDKRRGRDPEMGGKPQRRKNPQEGLYNELQKDKMAEAYSEIGMKGERRRGKGHDGLYQGLSTATKDTYDALHMQALPPRRAKRSGSGATNFSLLKQAGDVEENPGPTSMDWIWRILFLVGAATGAHSGPQLQLQESGPGLVKPSETLSLTCTVSGDSISSGDYYWGWIRQPPGKGLEWIGHIYYSGVTYYNPSLKSRVTISVDTSRNQFSLKLSSVTAADTAVYYCTREDSSNWRSRGQGTLVTVSSGSGGGGSGGGGSGGGGSFEQVQLVQSGAEVKKPGSSVKVSCKASGGTFSTYAIHWVRQAPGQGLEWMGRIIPIEGRAYYAQKFQGRVTITADESTSTAYMELSSLRSEDTAVYYCARGRYSYRYWFDYWGQGTLVTVSSTRIQNPDPAVYQLRDSKSSDKSVCLFTDFDSQTNVSQSKDSDVYITDKTVLDMRSMDFKSNSAVAWSNKSDFACANAFNNSIIPEDTFFPSPESSCGTQSFGLLDPKLCYLLDGILFIYGVILTALFLRVKFSRSADAPAYQQGQNQLYNELNLGRREEYDVLDKRRGRDPEMGGKPQRRKNPQEGLYNELQKDKMAEAYSEIGMKGERRRGKGHDGLYQGLSTATKDTYDALHMQALPPR

SEQ ID NO: 19128 - protein, 918 aa, Artificial Sequence
  Synthetic Polypeptide
MALPVTALLLPLALLLHAARPEVQLVESGGGLVQPGGSLRLSCAASGFSFSDFWMSWVRQAPGKGLEWVATISQAGSEKDYVDSVKGRFTISRDNAKKSLYLQMNSLRAEDTAVYYCASGVYSFDYRGQGTLVTVSSGTGGGGSGGGGSGGGGSEFEIVLTQSPATLSLSPGERATLSCRASQSVSSYLAWYQQKPGQAPRLLIYDASNRATGIPARFSGSGSGTDFTLTISSLEPEDFAVYYCQQRSNWPLTFGQGTKVEIKLEGQPKANPTVTLFPPSSEELQANKATLVCLISDFYPGAVTVAWKADGSPVKAGVETTKPSKQSNNKYAASSYLSLTPEQWKSHRSYSCQVTHEGSTVEKTVAPTECSPIKTDVITMDPKDNCSKDANDTLLLQLTNTSAYYMYLLLLLKSVVYFAIITCCLLRRTAFCCNGEKSRAKRSGSGATNFSLLKQAGDVEENPGPTSMDWIWRILFLVGAATGAHSGPQLQLQESGPGLVKPSETLSLTCTVSGDSISSGDYYWGWIRQPPGKGLEWIGHIYYSGVTYYNPSLKSRVTISVDTSRNQFSLKLSSVTAADTAVYYCTREDSSNWRSRGQGTLVTVSSGSGGGGSGGGGSGGGGSFEQVQLVQSGAEVKKPGSSVKVSCKASGGTFSTYAIHWVRQAPGQGLEWMGRIIPIEGRAYYAQKFQGRVTITADESTSTAYMELSSLRSEDTAVYYCARGRYSYRYWFDYWGQGTLVTVSSTRASTKGPSVFPLAPSSKSTSGGTAALGCLVKDYFPEPVTVSWNSGALTSGVHTFPAVLQSSGLYSLSSVVTVPSSSLGTQTYICNVNHKPSNTKVDKRVEPKSCEVKTDSTDHVKPKETENTKQPSKSCHKPKAIVHTEKVNMMSLTVLGLRMLFAKTVAVNFLLTAKLFFL

SEQ ID NO: 19129 - protein, 899 aa, Artificial Sequence
  Synthetic Polypeptide
MALPVTALLLPLALLLHAARPEVQLVESGGGLVQPGGSLRLSCAASGFSFSDFWMSWVRQAPGKGLEWVATISQAGSEKDYVDSVKGRFTISRDNAKKSLYLQMNSLRAEDTAVYYCASGVYSFDYRGQGTLVTVSSGTGGGGSGGGGSGGGGSEFEIVLTQSPATLSLSPGERATLSCRASQSVSSYLAWYQQKPGQAPRLLIYDASNRATGIPARFSGSGSGTDFTLTISSLEPEDFAVYYCQQRSNWPLTFGQGTKVEIKLEGQPKANPTVTLFPPSSEELQANKATLVCLISDFYPGAVTVAWKADGSPVKAGVETTKPSKQSNNKYAASSYLSLTPEQWKSHRSYSCQVTHEGSTVEKTVAPTECSGRADCGFTSESYQQGVLSATILYEILLGKATLYAVLVSALVLMAMVKRKDSRGRAKRSGSGVKQTLNFDLLKLAGDVESNPGPTSMDWIWRILFLVGAATGAHSGPQLQLQESGPGLVKPSETLSLTCTVSGDSISSGDYYWGWIRQPPGKGLEWIGHIYYSGVTYYNPSLKSRVTISVDTSRNQFSLKLSSVTAADTAVYYCTREDSSNWRSRGQGTLVTVSSGSGGGGSGGGGSGGGGSFEQVQLVQSGAEVKKPGSSVKVSCKASGGTFSTYAIHWVRQAPGQGLEWMGRIIPIEGRAYYAQKFQGRVTITADESTSTAYMELSSLRSEDTAVYYCARGRYSYRYWFDYWGQGTLVTVSSTRASTKGPSVFPLAPSSKSTSGGTAALGCLVKDYFPEPVTVSWNSGALTSGVHTFPAVLQSSGLYSLSSVVTVPSSSLGTQTYICNVNHKPSNTKVDKRVEPKSCIPEDTFFPSPESSCDVKLVEKSFETDTNLNFQNLSVIGFRILLLKVAGFNLLMTLRLWSS

SEQ ID NO: 19130 - protein, 756 aa, Artificial Sequence
  Synthetic Polypeptide
MALPVTALLLPLALLLHAARPEVQVLESGGGLVQPGGSLRLSCAASGFTFSNFAMSWVRQAPGKGLEWVSTISGSAGTTDYADSVKGRFTISRDNSKKTLYLQMNSLRVEDTAVYYCADGRGPFFDYRGQGTLVTVSSGTGGGGSGGGGSGGGGSEFEIVLTQSPATLSLSPGERATLSCRASQSVSSYLAWYQQKPGQAPRLLIYDASNRATGIPARFSGSGSGTDFTLTISSLEPEDFAVYYCQQRSNWPLTFGQGTKVEIKLEDLKNVFPPEVAVFEPSEAEISHTQKATLVCLATGFYPDHVELSWWVNGKEVHSGVCTDPQPLKEQPALNDSRYCLSSRLRVSATFWQNPRNHFRCQVQFYGLSENDEWTQDRAKPVTQIVSAEAWGRADCGFTSESYQQGVLSATILYEILLGKATLYAVLVSALVLMAMVKRKDSRGRAKRSGSGATNFSLLKQAGDVEENPGPTSMDWIWRILFLVGAATGAHSFEQVQLVQSGAEVKKPGSSVKVSCKASGGTFSTYAIHWVRQAPGQGLEWMGRIIPIEGRAYYAQKFQGRVTITADESTSTAYMELSSLRSEDTAVYYCARGRYSYRYWFDYWGQGTLVTVSSTRIQNPDPAVYQLRDSKSSDKSVCLFTDFDSQTNVSQSKDSDVYITDKCVLDMRSMDFKSNSAVAWSNKSDFACANAFNNSIIPEDTFFPSPESSCDVKLVEKSFETDTNLNFQNLSVIGFRILLLKVAGFNLLMTLRLWSS

SEQ ID NO: 19131 - protein, 757 aa, Artificial Sequence
  Synthetic Polypeptide
MALPVTALLLPLALLLHAARPEIVLTQSPATLSLSPGERATLSCRASQSVSSYLAWYQQKPGQAPRLLIYDASNRATGIPARFSGSGSGTDFTLTISSLEPEDFAVYYCQQRSNWPLTFGQGTKVEIKLEDLKNVFPPEVAVFEPSEAEISHTQKATLVCLATGFYPDHVELSWWVNGKEVHSGVCTDPQPLKEQPALNDSRYCLSSRLRVSATFWQNPRNHFRCQVQFYGLSENDEWTQDRAKPVTQIVSAEAWGRADCGFTSESYQQGVLSATILYEILLGKATLYAVLVSALVLMAMVKRKDSRGRAKRSGSGATNFSLLKQAGDVEENPGPTSMDWIWRILFLVGAATGAHSGPEVQLVESGGGLVQAGGSLRLSCAASGRTFSMGWFRQAPGKEREFVAAITYSGGSPYYADSVKGRFTISRDNAKNTVYLQMNSLKPEDTAVYYCAANPTYGSDWNAENWGQGTQVTVSSGSGGGGSGGGGSGGGGSFEQVQLVQSGAEVKKPGSSVKVSCKASGGTFSTYAIHWVRQAPGQGLEWMGRIIPIEGRAYYAQKFQGRVTITADESTSTAYMELSSLRSEDTAVYYCARGRYSYRYWFDYWGQGTLVTVSSTRIQNPDPAVYQLRDSKSSDKSVCLFTDFDSQTNVSQSKDSDVYITDKCVLDMRSMDFKSNSAVAWSNKSDFACANAFNNSIIPEDTFFPSPESSCDVKLVEKSFETDTNLNFQNLSVIGFRILLLKVAGFNLLMTLRLWSS

SEQ ID NO: 19132 - protein, 884 aa, Artificial Sequence
  Synthetic Polypeptide
MALPVTALLLPLALLLHAARPEIVLTQSPATLSLSPGERATLSCRASQSVSSYLAWYQQKPGQAPRLLIYDASNRATGIPARFSGSGSGTDFTLTISSLEPEDFAVYYCQQRSNWPLTFGQGTKVEIKLEDLKNVFPPEVAVFEPSEAEISHTQKATLVCLATGFYPDHVELSWWVNGKEVHSGVCTDPQPLKEQPALNDSRYCLSSRLRVSATFWQNPRNHFRCQVQFYGLSENDEWTQDRAKPVTQIVSAEAWGRADCGFTSESYQQGVLSATILYEILLGKATLYAVLVSALVLMAMVKRKDSRGRAKRSGSGATNFSLLKQAGDVEENPGPTSMDWIWRILFLVGAATGAHSQLQLQESGPGLVKPSETLSLTCTVSGGSISSGDYYWGWIRQPPGKGLEWIGSISYSGSTYYNPSLKSRVTISVDTSRNQFSLKLSSVTAADTAVYYCTREDSSNWRSRGQGTLVTVSSSGGGGSGGGGSEVQLVESGGGLVQAGGSLRLSCAASGRTFSMGWFRQAPGKEREFVAAITYSGGSPYYADSVKGRFTISRDNAKNTVYLQMNSLKPEDTAVYYCAANPTYGSDWNAENWGQGTQVTVSSGSGGGGSGGGGSGGGGSFEQVQLVQSGAEVKKPGSSVKVSCKASGGTFSTYAIHWVRQAPGQGLEWMGRIIPIEGRAYYAQKFQGRVTITADESTSTAYMELSSLRSEDTAVYYCARGRYSYRYWFDYWGQGTLVTVSSTRIQNPDPAVYQLRDSKSSDKSVCLFTDFDSQTNVSQSKDSDVYITDKCVLDMRSMDFKSNSAVAWSNKSDFACANAFNNSIIPEDTFFPSPESSCDVKLVEKSFETDTNLNFQNLSVIGFRILLLKVAGFNLLMTLRLWSS

SEQ ID NO: 19133 - protein, 893 aa, Artificial Sequence
  Synthetic Polypeptide
MALPVTALLLPLALLLHAARPEVQVLESGGGLVQPGGSLRLSCAASGFTFSNFAMSWVRQAPGKGLEWVSTISGSAGTTDYADSVKGRFTISRDNSKKTLYLQMNSLRVEDTAVYYCADGRGPFFDYRGQGTLVTVSSGTGGGGSGGGGSGGGGSEFEIVLTQSPATLSLSPGERATLSCRASQSVSSYLAWYQQKPGQAPRLLIYDASNRATGIPARFSGSGSGTDFTLTISSLEPEDFAVYYCQQRSNWPLTFGQGTKVEIKLEDLKNVFPPEVAVFEPSEAEISHTQKATLVCLATGFYPDHVELSWWVNGKEVHSGVCTDPQPLKEQPALNDSRYCLSSRLRVSATFWQNPRNHFRCQVQFYGLSENDEWTQDRAKPVTQIVSAEAWGRADCGFTSESYQQGVLSATILYEILLGKATLYAVLVSALVLMAMVKRKDSRGRAKRSGSGATNFSLLKQAGDVEENPGPTSMDWIWRILFLVGAATGAHSGPEVQLVESGGGLVQAGGSLRLSCAASGRTFSMGWFRQAPGKEREFVAAITYSGGSPYYASSVRGRFTISRDNAKNTVYLQMNSLKPEDTAVYYCAANPTYGSDWNAENWGQGTQVTVSSGSGGGGSGGGGSGGGGSFEQVQLVQSGAEVKKPGSSVKVSCKASGGTFSTYAIHWVRQAPGQGLEWMGRIIPIEGRAYYAQKFQGRVTITADESTSTAYMELSSLRSEDTAVYYCARGRYSYRYWFDYWGQGTLVTVSSTRIQNPDPAVYQLRDSKSSDKSVCLFTDFDSQTNVSQSKDSDVYITDKCVLDMRSMDFKSNSAVAWSNKSDFACANAFNNSIIPEDTFFPSPESSCDVKLVEKSFETDTNLNFQNLSVIGFRILLLKVAGFNLLMTLRLWSS

SEQ ID NO: 19134 - protein, 732 aa, Artificial Sequence
  Synthetic Polypeptide
MALPVTALLLPLALLLHAARPDIVMTQSPDSLAVSLGERATINCKSSQSVLYSSNNKNYLAWYQQKPGQPPKLLIYWASTRESGVPDRFSGSGSGTDFTLTISSLQAEDVAVYYCQQYYSTPLTFGQGTKVEIKGGGGSGGGGSGGGGSEVQLVQSGAEVKKPGESLKISCKGSGYSFTSYWIGWVRQMPGKGLEWMGIIYPGDSDTRYSPSFQGQVTISADKSISTAYLQWSSLKASDTAMYYCARDVGRWAPGGFLDYWGQGTLVTVSSTREQKLISEEDLAKPTTTPAPRPPTPAPTIASQPLSLRPEACRPAAGGAVHTRGLDFACDIYIWAPLAGTCGVLLLSLVITLYCKRGRKKLLYIFKQPFMRPVQTTQEEDGCSCRFPEEEEGGCELRVKFSRSADAPAYQQGQNQLYNELNLGRREEYDVLDKRRGRDPEMGGKPRRKNPQEGLYNELQKDKMAEAYSEIGMKGERRRGKGHDGLYQGLSTATKDTYDALHMQALPPRSSGSGEGRGSLLTCGDVEENPGPHMTEYKPTVRLATRDDVPRAVRTLAAAFADYPATRHTVDPDRHIERVTELQELFLTRVGLDIGKVWVADDGAAVAVWTTPESVEAGAVFAEIGPRMAELSGSRLAAQQQMEGLLAPHRPKEPAWFLATVGVSPDHQGKGLGSAVVLPGVEAAERAGVPAFLETSAPRNLPFYERLGFTVTADVEVPEGPRTWCMTRKPGA

SEQ ID NO: 19135 - protein, 726 aa, Artificial Sequence
  Synthetic Polypeptide
MALPVTALLLPLALLLHAARPDIVMTQSPDSLAVSLGERATINCKSSQSVLYSSNNKNYLAWYQQKPGQPPKLLIYWASTRESGVPDRFSGSGSGTDFTLTISSLQAEDVAVYYCQQYYSTPLTFGQGTKVEIKGGGGSGGGGSGGGGSEVQLVQSGAEVKKPGESLKISCKGSGYSFTSYWIGWVRQMPGKGLEWMGIIYPGDSDTRYSPSFQGQVTISADKSISTAYLQWSSLKASDTAMYYCARDVGRWAPGGFLDYWGQGTLVTVSSTREQKLISEEDLKIEVMYPPPYLDNEKSNGTIIHVKGKHLCPSPLFPGPSKPFWVLVVVGGVLACYSLLVTVAFIIFWVRSKRSRLLHSDYMNMTPRRPGPTRKHYQPYAPPRDFAAYRSRVKFSRSADAPAYQQGQNQLYNELNLGRREEYDVLDKRRGRDPEMGGKPRRKNPQEGLYNELQKDKMAEAYSEIGMKGERRRGKGHDGLYQGLSTATKDTYDALHMQALPPRSSGSGEGRGSLLTCGDVEENPGPHMTEYKPTVRLATRDDVPRAVRTLAAAFADYPATRHTVDPDRHIERVTELQELFLTRVGLDIGKVWVADDGAAVAVWTTPESVEAGAVFAEIGPRMAELSGSRLAAQQQMEGLLAPHRPKEPAWFLATVGVSPDHQGKGLGSAVVLPGVEAAERAGVPAFLETSAPRNLPFYERLGFTVTADVEVPEGPRTWCMTRKPGA

SEQ ID NO: 19136 - protein, 503 aa, Artificial Sequence
  Synthetic Polypeptide
MALPVTALLLPLALLLHAARPDIVMTQSPDSLAVSLGERATINCKSSQSVLYSSNNKNYLAWYQQKPGQPPKLLIYWASTRESGVPDRFSGSGSGTDFTLTISSLQAEDVAVYYCQQYYSTPLTFGQGTKVEIKGGGGSGGGGSGGGGSEVQLVQSGAEVKKPGESLKISCKGSGYSFTSYWIGWVRQMPGKGLEWMGIIYPGDSDTRYSPSFQGQVTISADKSISTAYLQWSSLKASDTAMYYCARDVGRWAPGGFLDYWGQGTLVTVSSTREQKLISEEDLKIEVMYPPPYLDNEKSNGTIIHVKGKHLCPSPLFPGPSKPFWVLVVVGGVLACYSLLVTVAFIIFWVRSKRSRLLHSDYMNMTPRRPGPTRKHYQPYAPPRDFAAYRSRVKFSRSADAPAYQQGQNQLYNELNLGRREEYDVLDKRRGRDPEMGGKPRRKNPQEGLYNELQKDKMAEAYSEIGMKGERRRGKGHDGLYQGLSTATKDTYDALHMQALPPR

SEQ ID NO: 19137 - protein, 509 aa, Artificial Sequence
  Synthetic Polypeptide
MALPVTALLLPLALLLHAARPDIVMTQSPDSLAVSLGERATINCKSSQSVLYSSNNKNYLAWYQQKPGQPPKLLIYWASTRESGVPDRFSGSGSGTDFTLTISSLQAEDVAVYYCQQYYSTPLTFGQGTKVEIKGGGGSGGGGSGGGGSEVQLVQSGAEVKKPGESLKISCKGSGYSFTSYWIGWVRQMPGKGLEWMGIIYPGDSDTRYSPSFQGQVTISADKSISTAYLQWSSLKASDTAMYYCARDVGRWAPGGFLDYWGQGTLVTVSSTREQKLISEEDLAKPTTTPAPRPPTPAPTIASQPLSLRPEACRPAAGGAVHTRGLDFACDIYIWAPLAGTCGVLLLSLVITLYCKRGRKKLLYIFKQPFMRPVQTTQEEDGCSCRFPEEEEGGCELRVKFSRSADAPAYQQGQNQLYNELNLGRREEYDVLDKRRGRDPEMGGKPRRKNPQEGLYNELQKDKMAEAYSEIGMKGERRRGKGHDGLYQGLSTATKDTYDALHMQALPPR

SEQ ID NO: 19138 - protein, 509 aa, Artificial Sequence
  Synthetic Polypeptide
MALPVTALLLPLALLLHAARPEVQLVQSGAEVKKPGESLKISCKGSGYSFTSYWIGWVRQMPGKGLEWMGIIYPGDSDTRYSPSFQGQVTISADKSISTAYLQWSSLKASDTAMYYCARDVGRWAPGGFLDYWGQGTLVTVSSGGGGSGGGGSGGGGSDIVMTQSPDSLAVSLGERATINCKSSQSVLYSSNNKNYLAWYQQKPGQPPKLLIYWASTRESGVPDRFSGSGSGTDFTLTISSLQAEDVAVYYCQQYYSTPLTFGQGTKVEIKTREQKLISEEDLAKPTTTPAPRPPTPAPTIASQPLSLRPEACRPAAGGAVHTRGLDFACDIYIWAPLAGTCGVLLLSLVITLYCKRGRKKLLYIFKQPFMRPVQTTQEEDGCSCRFPEEEEGGCELRVKFSRSADAPAYQQGQNQLYNELNLGRREEYDVLDKRRGRDPEMGGKPRRKNPQEGLYNELQKDKMAEAYSEIGMKGERRRGKGHDGLYQGLSTATKDTYDALHMQALPPR

SEQ ID NO: 19139 - protein, 922 aa, Artificial Sequence
  Synthetic Polypeptide
MALPVTALLLPLALLLHAARPDIVMTQSPDSLAVSLGERATINCKSSQSVLYSSNNKNYLAWYQQKPGQPPKLLIYWASTRESGVPDRFSGSGSGTDFTLTISSLQAEDVAVYYCQQYYSTPLTFGQGTKVEIKGGGGSGGGGSGGGGSEVQLVQSGAEVKKPGESLKISCKGSGYSFTSYWIGWVRQMPGKGLEWMGIIYPGDSDTRYSPSFQGQVTISADKSISTAYLQWSSLKASDTAMYYCARDVGRWAPGGFLDYWGQGTLVTVSSTREQKLISEEDLAKPTTTPAPRPPTPAPTIASQPLSLRPEACRPAAGGAVHTRGLDFACDIYIWAPLAGTCGVLLLSLVITLYCGRARVKFSRSADAPAYQQGQNQLYNELNLGRREEYDVLDKRRGRDPEMGGKPRRKNPQEGLYNELQKDKMAEAYSEIGMKGERRRGKGHDGLYQGLSTATKDTYDALHMQALPPRSRGSGATNFSLLKQAGDVEENPGPGIHMATYEVLCEVARKLGTDDREVVLFLLNVFIPQPTLAQLIGALRALKEEGRLTFPLLAECLFRAGRRDLLRDLLHLDPRFLERHLAGTMSYFSPYQLTVLHVDGELCARDIRSLIFLSKDTIGSRSTPQTFLHWVYCMENLDLLGPTDVDALMSMLRSLSRVDLQRQVQTLMGLHLSGPSHSQHYRHTPLETDFYDYKDDDDKTSGSGEGRGSLLTCGDVEENPGPHMTEYKPTVRLATRDDVPRAVRTLAAAFADYPATRHTVDPDRHIERVTELQELFLTRVGLDIGKVWVADDGAAVAVWTTPESVEAGAVFAEIGPRMAELSGSRLAAQQQMEGLLAPHRPKEPAWFLATVGVSPDHQGKGLGSAVVLPGVEAAERAGVPAFLETSAPRNLPFYERLGFTVTADVEVPEGPRTWCMTRKPGA

SEQ ID NO: 19140 - protein, 862 aa, Artificial Sequence
  Synthetic Polypeptide
MALPVTALLLPLALLLHAARPDIVMTQSPDSLAVSLGERATINCKSSQSVLYSSNNKNYLAWYQQKPGQPPKLLIYWASTRESGVPDRFSGSGSGTDFTLTISSLQAEDVAVYYCQQYYSTPLTFGQGTKVEIKLEIQNPDPAVYQLRDSKSSDKSVCLFTDFDSQTNVSQSKDSDVYITDKCVLDMRSMDFKSNSAVAWSNKSDFACANAFNNSIIPEDTFFPSSDVPCDVKLVEKSFETDTNLNFQNLSVIGFRILLLKVAGFNLLMTLRLWSSRAKRSGSGVKQTLNFDLLKLAGDVESNPGPTSMDWIWRILFLVGAATGAHSFEEVQLVQSGAEVKKPGESLKISCKGSGYSFTSYWIGWVRQMPGKGLEWMGIIYPGDSDTRYSPSFQGQVTISADKSISTAYLQWSSLKASDTAMYYCARDVGRWAPGGFLDYWGQGTLVTVSSTREDLKNVFPPEVAVFEPSKAEIAHTQKATLVCLATGFYPDHVELSWWVNGKEVHSGVCTDPQPLKEQPALNDSRYCLSSRLRVSATFWQNPRNHFRCQVQFYGLSENDEWTQDRAKPVTQIVSAEAWGRADCGITSASYHQGVLSATILYEILLGKATLYAVLVSALVLMAMVKRKDSRGRAKRSGSGATNFSLLKQAGDVEENPGPSRGHMTEYKPTVRLATRDDVPRAVRTLAAAFADYPATRHTVDPDRHIERVTELQELFLTRVGLDIGKVWVADDGAAVAVWTTPESVEAGAVFAEIGPRMAELSGSRLAAQQQMEGLLAPHRPKEPAWFLATVGVSPDHQGKGLGSAVVLPGVEAAERAGVPAFLETSAPRNLPFYERLGFTVTADVEVPEGPRTWCMTRKPGA

SEQ ID NO: 19141 - protein, 861 aa, Artificial Sequence
  Synthetic Polypeptide
MALPVTALLLPLALLLHAARPDIVMTQSPDSLAVSLGERATINCKSSQSVLYSSNNKNYLAWYQQKPGQPPKLLIYWASTRESGVPDRFSGSGSGTDFTLTISSLQAEDVAVYYCQQYYSTPLTFGQGTKVEIKLEDLKNVFPPEVAVFEPSKAEIAHTQKATLVCLATGFYPDHVELSWWVNGKEVHSGVCTDPQPLKEQPALNDSRYCLSSRLRVSATFWQNPRNHFRCQVQFYGLSENDEWTQDRAKPVTQIVSAEAWGRADCGITSASYHQGVLSATILYEILLGKATLYAVLVSALVLMAMVKRKDSRGRAKRSGSGATNFSLLKQAGDVEENPGPTSMDWIWRILFLVGAATGAHSFEEVQLVQSGAEVKKPGESLKISCKGSGYSFTSYWIGWVRQMPGKGLEWMGIIYPGDSDTRYSPSFQGQVTISADKSISTAYLQWSSLKASDTAMYYCARDVGRWAPGGFLDYWGQGTLVTVSSTRIQNPDPAVYQLRDSKSSDKSVCLFTDFDSQTNVSQSKDSDVYITDKCVLDMRSMDFKSNSAVAWSNKSDFACANAFNNSIIPEDTFFPSSDVPCDVKLVEKSFETDTNLNFQNLSVIGFRILLLKVAGFNLLMTLRLWSSRAKRSGSGVKQTLNFDLLKLAGDVESNPGPSRGHMTEYKPTVRLATRDDVPRAVRTLAAAFADYPATRHTVDPDRHIERVTELQELFLTRVGLDIGKVWVADDGAAVAVWTTPESVEAGAVFAEIGPRMAELSGSRLAAQQQMEGLLAPHRPKEPAWFLATVGVSPDHQGKGLGSAVVLPGVEAAERAGVPAFLETSAPRNLPFYERLGFTVTADVEVPEGPRTWCMTRKPGA

SEQ ID NO: 19142 - protein, 628 aa, Artificial Sequence
  Synthetic Polypeptide
MALPVTALLLPLALLLHAARPDIVMTQSPDSLAVSLGERATINCKSSQSVLYSSNNKNYLAWYQQKPGQPPKLLIYWASTRESGVPDRFSGSGSGTDFTLTISSLQAEDVAVYYCQQYYSTPLTFGQGTKVEIKLEDLKNVFPPEVAVFEPSEAEISHTQKATLVCLATGFYPDHVELSWWVNGKEVHSGVCTDPQPLKEQPALNDSRYCLSSRLRVSATFWQNPRNHFRCQVQFYGLSENDEWTQDRAKPVTQIVSAEAWGRADCGFTSESYQQGVLSATILYEILLGKATLYAVLVSALVLMAMVKRKDSRGRAKRSGSGATNFSLLKQAGDVEENPGPTSMDWIWRILFLVGAATGAHSFEEVQLVQSGAEVKKPGESLKISCKGSGYSFTSYWIGWVRQMPGKGLEWMGIIYPGDSDTRYSPSFQGQVTISADKSISTAYLQWSSLKASDTAMYYCARDVGRWAPGGFLDYWGQGTLVTVSSTRIQNPDPAVYQLRDSKSSDKSVCLFTDFDSQTNVSQSKDSDVYITDKCVLDMRSMDFKSNSAVAWSNKSDFACANAFNNSIIPEDTFFPSPESSCDVKLVEKSFETDTNLNFQNLSVIGFRILLLKVAGFNLLMTLRLWSS

SEQ ID NO: 19143 - protein, 853 aa, Artificial Sequence
  Synthetic Polypeptide
MALPVTALLLPLALLLHAARPDIVMTQSPDSLAVSLGERATINCKSSQSVLYSSNNKNYLAWYQQKPGQPPKLLIYWASTRESGVPDRFSGSGSGTDFTLTISSLQAEDVAVYYCQQYYSTPLTFGQGTKVEIKLEDLKNVFPPEVAVFEPSEAEISHTQKATLVCLATGFYPDHVELSWWVNGKEVHSGVCTDPQPLKEQPALNDSRYCLSSRLRVSATFWQNPRNHFRCQVQFYGLSENDEWTQDRAKPVTQIVSAEAWGRADCGFTSESYQQGVLSATILYEILLGKATLYAVLVSALVLMAMVKRKDSRGRAKRSGSGATNFSLLKQAGDVEENPGPTSMDWIWRILFLVGAATGAHSFEEVQLVQSGAEVKKPGESLKISCKGSGYSFTSYWIGWVRQMPGKGLEWMGIIYPGDSDTRYSPSFQGQVTISADKSISTAYLQWSSLKASDTAMYYCARDVGRWAPGGFLDYWGQGTLVTVSSTRIQNPDPAVYQLRDSKSSDKSVCLFTDFDSQTNVSQSKDSDVYITDKCVLDMRSMDFKSNSAVAWSNKSDFACANAFNNSIIPEDTFFPSPESSCDVKLVEKSFETDTNLNFQNLSVIGFRILLLKVAGFNLLMTLRLWSSRAKRSGSGVKQTLNFDLLKLAGDVESNPGPSRGGIHTMATYEVLCEVARKLGTDDREVVLFLLNVFIPQPTLAQLIGALRALKEEGRLTFPLLAECLFRAGRRDLLRDLLHLDPRFLERHLAGTMSYFSPYQLTVLHVDGELCARDIRSLIFLSKDTIGSRSTPQTFLHWVYCMENLDLLGPTDVDALMSMLRSLSRVDLQRQVQTLMGLHLSGPSHSQHYRHTP

SEQ ID NO: 19144 - protein, 632 aa, Artificial Sequence
  Synthetic Polypeptide
MALPVTALLLPLALLLHAARPDIVMTQSPDSLAVSLGERATINCKSSQSVLYSSNNKNYLAWYQQKPGQPPKLLIYWASTRESGVPDRFSGSGSGTDFTLTISSLQAEDVAVYYCQQYYSTPLTFGQGTKVEIKLEIQNPDPAVYQLRDSKSSDKSVCLFTDFDSQTNVSQSKDSDVYITDKCVLDMRSMDFKSNSAVAWSNKSDFACANAFNNSIIPEDTFFPSPESSCDVKLVEKSFETDTNLNFQNLSVIGFRILLLKVAGFNLLMTLRLWSSRAKRSGSGVKQTLNFDLLKLAGDVESNPGPTSMDWIWRILFLVGAATGAHSFEEVQLVQSGAEVKKPGESLKISCKGSGYSFTSYWIGWVRQMPGKGLEWMGIIYPGDSDTRYSPSFQGQVTISADKSISTAYLQWSSLKASDTAMYYCARDVGRWAPGGFLDYWGQGTLVTVSSTREDLKNVFPPEVAVFEPSEAEISHTQKATLVCLATGFYPDHVELSWWVNGKEVHSGVCTDPQPLKEQPALNDSRYCLSSRLRVSATFWQNPRNHFRCQVQFYGLSENDEWTQDRAKPVTQIVSAEAWGRADCGFTSESYQQGVLSATILYEILLGKATLYAVLVSALVLMAMVKRKDSRG

SEQ ID NO: 19145 - protein, 854 aa, Artificial Sequence
  Synthetic Polypeptide
MALPVTALLLPLALLLHAARPDIVMTQSPDSLAVSLGERATINCKSSQSVLYSSNNKNYLAWYQQKPGQPPKLLIYWASTRESGVPDRFSGSGSGTDFTLTISSLQAEDVAVYYCQQYYSTPLTFGQGTKVEIKLEIQNPDPAVYQLRDSKSSDKSVCLFTDFDSQTNVSQSKDSDVYITDKCVLDMRSMDFKSNSAVAWSNKSDFACANAFNNSIIPEDTFFPSPESSCDVKLVEKSFETDTNLNFQNLSVIGFRILLLKVAGFNLLMTLRLWSSRAKRSGSGVKQTLNFDLLKLAGDVESNPGPTSMDWIWRILFLVGAATGAHSFEEVQLVQSGAEVKKPGESLKISCKGSGYSFTSYWIGWVRQMPGKGLEWMGIIYPGDSDTRYSPSFQGQVTISADKSISTAYLQWSSLKASDTAMYYCARDVGRWAPGGFLDYWGQGTLVTVSSTREDLKNVFPPEVAVFEPSEAEISHTQKATLVCLATGFYPDHVELSWWVNGKEVHSGVCTDPQPLKEQPALNDSRYCLSSRLRVSATFWQNPRNHFRCQVQFYGLSENDEWTQDRAKPVTQIVSAEAWGRADCGFTSESYQQGVLSATILYEILLGKATLYAVLVSALVLMAMVKRKDSRGRAKRSGSGATNFSLLKQAGDVEENPGPSRGGIHTMATYEVLCEVARKLGTDDREVVLFLLNVFIPQPTLAQLIGALRALKEEGRLTFPLLAECLFRAGRRDLLRDLLHLDPRFLERHLAGTMSYFSPYQLTVLHVDGELCARDIRSLIFLSKDTIGSRSTPQTFLHWVYCMENLDLLGPTDVDALMSMLRSLSRVDLQRQVQTLMGLHLSGPSHSQHYRHTP

SEQ ID NO: 19146 - protein, 906 aa, Artificial Sequence
  Synthetic Polypeptide
MALPVTALLLPLALLLHAARPLEGKPIPNPLLGLDSTGSGEDLKNVFPPEVAVFEPSKAEIAHTQKATLVCLATGFYPDHVELSWWVNGKEVHSGVCTDPQPLKEQPALNDSRYCLSSRLRVSATFWQNPRNHFRCQVQFYGLSENDEWTQDRAKPVTQIVSAEAWGRADCGITSASYHQGVLSATILYEILLGKATLYAVLVSALVLMAMVKRKDSRGRAKRSGSGATNFSLLKQAGDVEENPGPTSMALPVTALLLPLALLLHAARPDIVMTQSPDSLAVSLGERATINCKSSQSVLYSSNNKNYLAWYQQKPGQPPKLLIYWASTRESGVPDRFSGSGSGTDFTLTISSLQAEDVAVYYCQQYYSTPLTFGQGTKVEIKGGGGSGGGGSGGGGSEVQLVQSGAEVKKPGESLKISCKGSGYSFTSYWIGWVRQMPGKGLEWMGIIYPGDSDTRYSPSFQGQVTISADKSISTAYLQWSSLKASDTAMYYCARDVGRWAPGGFLDYWGQGTLVTVSSTREQKLISEEDGSGIQNPDPAVYQLRDSKSSDKSVCLFTDFDSQTNVSQSKDSDVYITDKCVLDMRSMDFKSNSAVAWSNKSDFACANAFNNSIIPEDTFFPSSDVPCDVKLVEKSFETDTNLNFQNLSVIGFRILLLKVAGFNLLMTLRLWSSRAKRSGSGVKQTLNFDLLKLAGDVESNPGPSRGHMTEYKPTVRLATRDDVPRAVRTLAAAFADYPATRHTVDPDRHIERVTELQELFLTRVGLDIGKVWVADDGAAVAVWTTPESVEAGAVFAEIGPRMAELSGSRLAAQQQMEGLLAPHRPKEPAWFLATVGVSPDHQGKGLGSAVVLPGVEAAERAGVPAFLETSAPRNLPFYERLGFTVTADVEVPEGPRTWCMTRKPGA

SEQ ID NO: 19147 - protein, 907 aa, Artificial Sequence
  Synthetic Polypeptide
MALPVTALLLPLALLLHAARPLEQKLISEEDLGSGDRPDPAVYQLRDSKSSDKSVCLFTDFDSQTNVSQSKDSDVYITDKCVLDMRSMDFKSNSAVAWSNKSDFACANAFNNSIIPEDTFFPSPESSCDVKLVEKSFETDTNLNFQNLSVIGFRILLLKVAGFNLLMTLRLWSSSSRAKRSGSGVKQTLNFDLLKLAGDVESNPGPTSMALPVTALLLPLALLLHAARPDIVMTQSPDSLAVSLGERATINCKSSQSVLYSSNNKNYLAWYQQKPGQPPKLLIYWASTRESGVPDRFSGSGSGTDFTLTISSLQAEDVAVYYCQQYYSTPLTFGQGTKVEIKGGGGSGGGGSGGGGSEVQLVQSGAEVKKPGESLKISCKGSGYSFTSYWIGWVRQMPGKGLEWMGIIYPGDSDTRYSPSFQGQVTISADKSISTAYLQWSSLKASDTAMYYCARDVGRWAPGGFLDYWGQGTLVTVSSTRGKPIPNPLLGLDSTGSGEDLKNVFPPEVAVFEPSEAEISHTQKATLVCLATGFYPDHVELSWWVNGKEVHSGVCTDPQPLKEQPALNDSRYCLSSRLRVSATFWQNPRNHFRCQVQFYGLSENDEWTQDRAKPVTQIVSAEAWGRADCGFTSESYQQGVLSATILYEILLGKATLYAVLVSALVLMAMVKRKDSRGRAKRSGSGATNFSLLKQAGDVEENPGPSRGHMTEYKPTVRLATRDDVPRAVRTLAAAFADYPATRHTVDPDRHIERVTELQELFLTRVGLDIGKVWVADDGAAVAVWTTPESVEAGAVFAEIGPRMAELSGSRLAAQQQMEGLLAPHRPKEPAWFLATVGVSPDHQGKGLGSAVVLPGVEAAERAGVPAFLETSAPRNLPFYERLGFTVTADVEVPEGPRTWCMTRKPGA

SEQ ID NO: 19148 - protein, 861 aa, Artificial Sequence
  Synthetic Polypeptide
MALPVTALLLPLALLLHAARPDIVMTQSPDSLAVSLGERATINCKSSQSVLYSSNNKNYLAWYQQKPGQPPKLLIYWASTRESGVPDRFSGSGSGTDFTLTISSLQAEDVAVYYCQQYYSTPLTFGQGTKVEIKLEDLKNVFPPEVAVFEPSEAEISHTQKATLVCLATGFYPDHVELSWWVNGKEVHSGVSTDPQPLKEQPALNDSRYCLSSRLRVSATFWQNPRNHFRCQVQFYGLSENDEWTQDRAKPVTQIVSAEAWGRADCGFTSESYQQGVLSATILYEILLGKATLYAVLVSALVLMAMVKRKDSRGRAKRSGSGATNFSLLKQAGDVEENPGPTSMDWIWRILFLVGAATGAHSFEEVQLVQSGAEVKKPGESLKISCKGSGYSFTSYWIGWVRQMPGKGLEWMGIIYPGDSDTRYSPSFQGQVTISADKSISTAYLQWSSLKASDTAMYYCARDVGRWAPGGFLDYWGQGTLVTVSSTRIQNPDPAVYQLRDSKSSDKSVCLFTDFDSQTNVSQSKDSDVYITDKTVLDMRSMDFKSNSAVAWSNKSDFACANAFNNSIIPEDTFFPSPESSCDVKLVEKSFETDTNLNFQNLSVIGFRILLLKVAGFNLLMTLRLWSSRAKRSGSGVKQTLNFDLLKLAGDVESNPGPSRGHMTEYKPTVRLATRDDVPRAVRTLAAAFADYPATRHTVDPDRHIERVTELQELFLTRVGLDIGKVWVADDGAAVAVWTTPESVEAGAVFAEIGPRMAELSGSRLAAQQQMEGLLAPHRPKEPAWFLATVGVSPDHQGKGLGSAVVLPGVEAAERAGVPAFLETSAPRNLPFYERLGFTVTADVEVPEGPRTWCMTRKPGA

SEQ ID NO: 19149 - protein, 943 aa, Artificial Sequence
  Synthetic Polypeptide
MALPVTALLLPLALLLHAARPDIVMTQSPDSLAVSLGERATINCKSSQSVLYSSNNKNYLAWYQQKPGQPPKLLIYWASTRESGVPDRFSGSGSGTDFTLTISSLQAEDVAVYYCQQYYSTPLTFGQGTKVEIKLEDLKNVFPPEVAVFEPSEAEISHTQKATLVCLATGFYPDHVELSWWVNGKEVHSGVSTDPQPLKEQPALNDSRYCLSSRLRVSATFWQNPRNHFRCQVQFYGLSENDEWTQDRAKPVTQIVSAEAWGRADCGFTSESYQQGVLSATILYEILLGKATLYAVLVSALVLMAMVKRKDSRGRAKRSGSGATNFSLLKQAGDVEENPGPTSMDWIWRILFLVGAATGAHSFEEVQLVQSGAEVKKPGESLKISCKGSGYSFTSYWIGWVRQMPGKGLEWMGIIYPGDSDTRYSPSFQGQVTISADKSISTAYLQWSSLKASDTAMYYCARDVGRWAPGGFLDYWGQGTLVTVSSTREQKLISEEDGSGTPFPSLAPPIMLLVDGKQQMVVVCLVLDVAPPGLDSPIWFSAGNGSALDAFTYGPSPATDGTWTNLAHLSLPSEELASWEPLVCHTGPGAEGHSRSTQPMHLSGEASTARTCPQEPLRGTPGGALWLGVLRLLLFKLLLFDLLLTCSCLCDPAGPLPSPATTTRLRALGSHRLHPATETGGREATSSPRPQPRDRRWGDTPPGRKPGSPVRAKRSGSGVKQTLNFDLLKLAGDVESNPGPSRGHMTEYKPTVRLATRDDVPRAVRTLAAAFADYPATRHTVDPDRHIERVTELQELFLTRVGLDIGKVWVADDGAAVAVWTTPESVEAGAVFAEIGPRMAELSGSRLAAQQQMEGLLAPHRPKEPAWFLATVGVSPDHQGKGLGSAVVLPGVEAAERAGVPAFLETSAPRNLPFYERLGFTVTADVEVPEGPRTWCMTRKPGA

SEQ ID NO: 19150 - protein, 961 aa, Artificial Sequence
  Synthetic Polypeptide
MALPVTALLLPLALLLHAARPLEDLKNVFPPEVAVFEPSEAEISHTQKATLVCLATGFYPDHVELSWWVNGKEVHSGVSTDPQPLKEQPALNDSRYCLSSRLRVSATFWQNPRNHFRCQVQFYGLSENDEWTQDRAKPVTQIVSAEAWGRADCGFTSESYQQGVLSATILYEILLGKATLYAVLVSALVLMAMVKRKDSRGRAKRSGSGATNFSLLKQAGDVEENPGPTSMALPVTALLLPLALLLHAARPDIVMTQSPDSLAVSLGERATINCKSSQSVLYSSNNKNYLAWYQQKPGQPPKLLIYWASTRESGVPDRFSGSGSGTDFTLTISSLQAEDVAVYYCQQYYSTPLTFGQGTKVEIKGGGGSGGGGSGGGGSEVQLVQSGAEVKKPGESLKISCKGSGYSFTSYWIGWVRQMPGKGLEWMGIIYPGDSDTRYSPSFQGQVTISADKSISTAYLQWSSLKASDTAMYYCARDVGRWAPGGFLDYWGQGTLVTVSSTREQKLISEEDLGSGTPFPSLAPPIMLLVDGKQQMVVVCLVLDVAPPGLDSPIWFSAGNGSALDAFTYGPSPATDGTWTNLAHLSLPSEELASWEPLVCHTGPGAEGHSRSTQPMHLSGEASTARTCPQEPLRGTPGGALWLGVLRLLLFKLLLFDLLLTCSCLCDPAGPLPSPATTTRLRALGSHRLHPATETGGREATSSPRPQPRDRRWGDTPPGRKPGSPVRAKRSGSGVKQTLNFDLLKLAGDVESNPGPSRSRGHMTEYKPTVRLATRDDVPRAVRTLAAAFADYPATRHTVDPDRHIERVTELQELFLTRVGLDIGKVWVADDGAAVAVWTTPESVEAGAVFAEIGPRMAELSGSRLAAQQQMEGLLAPHRPKEPAWFLATVGVSPDHQGKGLGSAVVLPGVEAAERAGVPAFLETSAPRNLPFYERLGFTVTADVEVPEGPRTWCMTRKPGA

SEQ ID NO: 19151 - protein, 898 aa, Artificial Sequence
  Synthetic Polypeptide
MALPVTALLLPLALLLHAARPDIVMTQSPDSLAVSLGERATINCKSSQSVLYSSNNKNYLAWYQQKPGQPPKLLIYWASTRESGVPDRFSGSGSGTDFTLTISSLQAEDVAVYYCQQYYSTPLTFGQGTKVEIKLEGKPIPNPLLGLDSTGSGDKQLDADVSPKPTIFLPSIAETKLQKAGTYLCLLEKFFPDVIKIHWQEKKSNTILGSQEGNTMKTNDTYMKFSWLTVPEKSLDKEHRCIVRHENNKNGVDQEIIFPPIKTDVITMDPKDNCSKDANDTLLLQLTNTSAYYMYLLLLLKSVVYFAIITCCLLRRTAFCCNGEKSRAKRSGSGATNFSLLKQAGDVEENPGPTSMDWIWRILFLVGAATGAHSFEEVQLVQSGAEVKKPGESLKISCKGSGYSFTSYWIGWVRQMPGKGLEWMGIIYPGDSDTRYSPSFQGQVTISADKSISTAYLQWSSLKASDTAMYYCARDVGRWAPGGFLDYWGQGTLVTVSSTREQKLISEEDGSGSQPHTKPSVFVMKNGTNVACLVKEFYPKDIRINLVSSKKITEFDPAIVISPSGKYNAVKLGKYEDSNSVTCSVQHDNKTVHSTDFEVKTDSTDHVKPKETENTKQPSKSCHKPKAIVHTEKVNMMSLTVLGLRMLFAKTVAVNFLLTAKLFFLRAKRSGSGVKQTLNFDLLKLAGDVESNPGPSRGHMTEYKPTVRLATRDDVPRAVRTLAAAFADYPATRHTVDPDRHIERVTELQELFLTRVGLDIGKVWVADDGAAVAVWTTPESVEAGAVFAEIGPRMAELSGSRLAAQQQMEGLLAPHRPKEPAWFLATVGVSPDHQGKGLGSAVVLPGVEAAERAGVPAFLETSAPRNLPFYERLGFTVTADVEVPEGPRTWCMTRKPGA

SEQ ID NO: 19152 - protein, 636 aa, Artificial Sequence
  Synthetic Polypeptide
MALPVTALLLPLALLLHAARPDIVMTQSPDSLAVSLGERATINCKSSQSVLYSSNNKNYLAWYQQKPGQPPKLLIYWASTRESGVPDRFSGSGSGTDFTLTISSLQAEDVAVYYCQQYYSTPLTFGQGTKVEIKLESQPHTKPSVFVMKNGTNVACLVKEFYPKDIRINLVSSKKITEFDPAIVISPSGKYNAVKLGKYEDSNSVTCSVQHDNKTVHSTDFEVKTDSTDHVKPKETENTKQPSKSCHKPKAIVHTEKVNMMSLTVLGLRMLFAKTVAVNFLLTAKLFFLRAKRSGSGATNFSLLKQAGDVEENPGPTSMDWIWRILFLVGAATGAHSFEEVQLVQSGAEVKKPGESLKISCKGSGYSFTSYWIGWVRQMPGKGLEWMGIIYPGDSDTRYSPSFQGQVTISADKSISTAYLQWSSLKASDTAMYYCARDVGRWAPGGFLDYWGQGTLVTVSSTRDKQLDADVSPKPTIFLPSIAETKLQKAGTYLCLLEKFFPDVIKIHWQEKKSNTILGSQEGNTMKTNDTYMKFSWLTVPEKSLDKEHRCIVRHENNKNGVDQEIIFPPIKTDVITMDPKDNCSKDANDTLLLQLTNTSAYYMYLLLLLKSVVYFAIITCCLLRRTAFCCNGEKS

SEQ ID NO: 19153 - protein, 913 aa, Artificial Sequence
  Synthetic Polypeptide
MALPVTALLLPLALLLHAARPLEGKPIPNPLLGLDSTGSGDKQLDADVSPKPTIFLPSIAETKLQKAGTYLCLLEKFFPDVIKIHWQEKKSNTILGSQEGNTMKTNDTYMKFSWLTVPEKSLDKEHRCIVRHENNKNGVDQEIIFPPIKTDVITMDPKDNCSKDANDTLLLQLTNTSAYYMYLLLLLKSVVYFAIITCCLLRRTAFCCNGEKSRAKRSGSGATNFSLLKQAGDVEENPGPTSMALPVTALLLPLALLLHAARPDIVMTQSPDSLAVSLGERATINCKSSQSVLYSSNNKNYLAWYQQKPGQPPKLLIYWASTRESGVPDRFSGSGSGTDFTLTISSLQAEDVAVYYCQQYYSTPLTFGQGTKVEIKGGGGSGGGGSGGGGSEVQLVQSGAEVKKPGESLKISCKGSGYSFTSYWIGWVRQMPGKGLEWMGIIYPGDSDTRYSPSFQGQVTISADKSISTAYLQWSSLKASDTAMYYCARDVGRWAPGGFLDYWGQGTLVTVSSTREQKLISEEDGSGSQPHTKPSVFVMKNGTNVACLVKEFYPKDIRINLVSSKKITEFDPAIVISPSGKYNAVKLGKYEDSNSVTCSVQHDNKTVHSTDFEVKTDSTDHVKPKETENTKQPSKSCHKPKAIVHTEKVNMMSLTVLGLRMLFAKTVAVNFLLTAKLFFLRAKRSGSGVKQTLNFDLLKLAGDVESNPGPSRGHMTEYKPTVRLATRDDVPRAVRTLAAAFADYPATRHTVDPDRHIERVTELQELFLTRVGLDIGKVWVADDGAAVAVWTTPESVEAGAVFAEIGPRMAELSGSRLAAQQQMEGLLAPHRPKEPAWFLATVGVSPDHQGKGLGSAVVLPGVEAAERAGVPAFLETSAPRNLPFYERLGFTVTADVEVPEGPRTWCMTRKPGA

SEQ ID NO: 19154 - protein, 1038 aa, Artificial Sequence
  Synthetic Polypeptide
MALPVTALLLPLALLLHAARPDIVMTQSPDSLAVSLGERATINCKSSQSVLYSSNNKNYLAWYQQKPGQPPKLLIYWASTRESGVPDRFSGSGSGTDFTLTISSLQAEDVAVYYCQQYYSTPLTFGQGTKVEIKGQPKANPTVTLFPPSSEELQANKATLVCLISDFYPGAVTVAWKADGSPVKAGVETTKPSKQSNNKYAASSYLSLTPEQWKSHRSYSCQVTHEGSTVEKTVAPTECSGSQSFGLLDPKLCYLLDGILFIYGVILTALFLRVKFSRSADAPAYQQGQNQLYNELNLGRREEYDVLDKRRGRDPEMGGKPQRRKNPQEGLYNELQKDKMAEAYSEIGMKGERRRGKGHDGLYQGLSTATKDTYDALHMQALPPRRAKRSGSGATNFSLLKQAGDVEENPGPTSMDWIWRILFLVGAATGAHSFEEVQLVQSGAEVKKPGESLKISCKGSGYSFTSYWIGWVRQMPGKGLEWMGIIYPGDSDTRYSPSFQGQVTISADKSISTAYLQWSSLKASDTAMYYCARDVGRWAPGGFLDYWGQGTLVTVSSASTKGPSVFPLAPSSKSTSGGTAALGCLVKDYFPEPVTVSWNSGALTSGVHTFPAVLQSSGLYSLSSVVTVPSSSLGTQTYICNVNHKPSNTKVDKRVEPKSCGTQSFGLLDPKLCYLLDGILFIYGVILTALFLRVKFSRSADAPAYQQGQNQLYNELNLGRREEYDVLDKRRGRDPEMGGKPQRRKNPQEGLYNELQKDKMAEAYSEIGMKGERRRGKGHDGLYQGLSTATKDTYDALHMQALPPRRAKRSGSGVKQTLNFDLLKLAGDVESNPGPSRGHMTEYKPTVRLATRDDVPRAVRTLAAAFADYPATRHTVDPDRHIERVTELQELFLTRVGLDIGKVWVADDGAAVAVWTTPESVEAGAVFAEIGPRMAELSGSRLAAQQQMEGLLAPHRPKEPAWFLATVGVSPDHQGKGLGSAVVLPGVEAAERAGVPAFLETSAPRNLPFYERLGFTVTADVEVPEGPRTWCMTRKPGA

SEQ ID NO: 19155 - protein, 824 aa, Artificial Sequence
  Synthetic Polypeptide
MALPVTALLLPLALLLHAARPDIVMTQSPDSLAVSLGERATINCKSSQSVLYSSNNKNYLAWYQQKPGQPPKLLIYWASTRESGVPDRFSGSGSGTDFTLTISSLQAEDVAVYYCQQYYSTPLTFGQGTKVEIKLEDLKNVFPPEVAVFEPSEAEISHTQKATLVCLATGFYPDHVELSWWVNGKEVHSGVSTDPQPLKEQPALNDSRYCLSSRLRVSATFWQNPRNHFRCQVQFYGLSENDEWTQDRAKPVTQIVSAEAWGRADCGSQSFGLLDPKLCYLLDGILFIYGVILTALFLRVKFSRSADAPAYQQGQNQLYNELNLGRREEYDVLDKRRGRDPEMGGKPQRRKNPQEGLYNELQKDKMAEAYSEIGMKGERRRGKGHDGLYQGLSTATKDTYDALHMQALPPRRAKRSGSGATNFSLLKQAGDVEENPGPTSMDWIWRILFLVGAATGAHSFEEVQLVQSGAEVKKPGESLKISCKGSGYSFTSYWIGWVRQMPGKGLEWMGIIYPGDSDTRYSPSFQGQVTISADKSISTAYLQWSSLKASDTAMYYCARDVGRWAPGGFLDYWGQGTLVTVSSTRIQNPDPAVYQLRDSKSSDKSVCLFTDFDSQTNVSQSKDSDVYITDKTVLDMRSMDFKSNSAVAWSNKSDFACANAFNNSIIPEDTFFPSPESSCGTQSFGLLDPKLCYLLDGILFIYGVILTALFLRVKFSRSADAPAYQQGQNQLYNELNLGRREEYDVLDKRRGRDPEMGGKPQRRKNPQEGLYNELQKDKMAEAYSEIGMKGERRRGKGHDGLYQGLSTATKDTYDALHMQALPPR

SEQ ID NO: 19156 - protein, 824 aa, Artificial Sequence
  Synthetic Polypeptide
MALPVTALLLPLALLLHAARPDIVMTQSPDSLAVSLGERATINCKSSQSVLYSSNNKNYLAWYQQKPGQPPKLLIYWASTRESGVPDRFSGSGSGTDFTLTISSLQAEDVAVYYCQQYYSTPLTFGQGTKVEIKLEDLKNVFPPEVAVFEPSKAEIAHTQKATLVCLATGFYPDHVELSWWVNGKEVHSGVCTDPQPLKEQPALNDSRYCLSSRLRVSATFWQNPRNHFRCQVQFYGLSENDEWTQDRAKPVTQIVSAEAWGRADCGSQSFGLLDPKLCYLLDGILFIYGVILTALFLRVKFSRSADAPAYQQGQNQLYNELNLGRREEYDVLDKRRGRDPEMGGKPQRRKNPQEGLYNELQKDKMAEAYSEIGMKGERRRGKGHDGLYQGLSTATKDTYDALHMQALPPRRAKRSGSGATNFSLLKQAGDVEENPGPTSMDWIWRILFLVGAATGAHSFEEVQLVQSGAEVKKPGESLKISCKGSGYSFTSYWIGWVRQMPGKGLEWMGIIYPGDSDTRYSPSFQGQVTISADKSISTAYLQWSSLKASDTAMYYCARDVGRWAPGGFLDYWGQGTLVTVSSTRIQNPDPAVYQLRDSKSSDKSVCLFTDFDSQTNVSQSKDSDVYITDKCVLDMRSMDFKSNSAVAWSNKSDFACANAFNNSIIPEDTFFPSSDVPCGTQSFGLLDPKLCYLLDGILFIYGVILTALFLRVKFSRSADAPAYQQGQNQLYNELNLGRREEYDVLDKRRGRDPEMGGKPQRRKNPQEGLYNELQKDKMAEAYSEIGMKGERRRGKGHDGLYQGLSTATKDTYDALHMQALPPR

SEQ ID NO: 19157 - protein, 895 aa, Artificial Sequence
  Synthetic Polypeptide
MALPVTALLLPLALLLHAARPDIVMTQSPDSLAVSLGERATINCKSSQSVLYSSNNKNYLAWYQQKPGQPPKLLIYWASTRESGVPDRFSGSGSGTDFTLTISSLQAEDVAVYYCQQYYSTPLTFGQGTKVEIKLEGKPIPNPLLGLDSTGSGEDLKNVFPPEVAVFEPSEAEISHTQKATLVCLATGFYPDHVELSWWVNGKEVHSGVSTDPQPLKEQPALNDSRYCLSSRLRVSATFWQNPRNHFRCQVQFYGLSENDEWTQDRAKPVTQIVSAEAWGRADCGSQSFGLLDPKLCYLLDGILFIYGVILTALFLRVKFSRSADAPAYQQGQNQLYNELNLGRREEYDVLDKRRGRDPEMGGKPQRRKNPQEGLYNELQKDKMAEAYSEIGMKGERRRGKGHDGLYQGLSTATKDTYDALHMQALPPRRAKRSGSGATNFSLLKQAGDVEENPGPTSMDWIWRILFLVGAATGAHSFEEVQLVQSGAEVKKPGESLKISCKGSGYSFTSYWIGWVRQMPGKGLEWMGIIYPGDSDTRYSPSFQGQVTISADKSISTAYLQWSSLKASDTAMYYCARDVGRWAPGGFLDYWGQGTLVTVSSTREQKLISEEDGSGIQNPDPAVYQLRDSKSSDKSVCLFTDFDSQTNVSQSKDSDVYITDKTVLDMRSMDFKSNSAVAWSNKSDFACANAFNNSIIPEDTFFPSPESSCGTQSFGLLDPKLCYLLDGILFIYGVILTALFLRSKRSRLLHSDYMNMTPRRPGPTRKHYQPYAPPRDFAAYRSRVKFSRSADAPAYQQGQNQLYNELNLGRREEYDVLDKRRGRDPEMGGKPQRRKNPQEGLYNELQKDKMAEAYSEIGMKGERRRGKGHDGLYQGLSTATKDTYDALHMQALPPR

SEQ ID NO: 19158 - protein, 936 aa, Artificial Sequence
  Synthetic Polypeptide
MALPVTALLLPLALLLHAARPDIVMTQSPDSLAVSLGERATINCKSSQSVLYSSNNKNYLAWYQQKPGQPPKLLIYWASTRESGVPDRFSGSGSGTDFTLTISSLQAEDVAVYYCQQYYSTPLTFGQGTKVEIKLEGKPIPNPLLGLDSTGSGEDLKNVFPPEVAVFEPSEAEISHTQKATLVCLATGFYPDHVELSWWVNGKEVHSGVSTDPQPLKEQPALNDSRYCLSSRLRVSATFWQNPRNHFRCQVQFYGLSENDEWTQDRAKPVTQIVSAEAWGRADCGSQSFGLLDPKLCYLLDGILFIYGVILTALFLRSKRSRLLHSDYMNMTPRRPGPTRKHYQPYAPPRDFAAYRSRVKFSRSADAPAYQQGQNQLYNELNLGRREEYDVLDKRRGRDPEMGGKPQRRKNPQEGLYNELQKDKMAEAYSEIGMKGERRRGKGHDGLYQGLSTATKDTYDALHMQALPPRRAKRSGSGATNFSLLKQAGDVEENPGPTSMDWIWRILFLVGAATGAHSFEEVQLVQSGAEVKKPGESLKISCKGSGYSFTSYWIGWVRQMPGKGLEWMGIIYPGDSDTRYSPSFQGQVTISADKSISTAYLQWSSLKASDTAMYYCARDVGRWAPGGFLDYWGQGTLVTVSSTREQKLISEEDGSGIQNPDPAVYQLRDSKSSDKSVCLFTDFDSQTNVSQSKDSDVYITDKTVLDMRSMDFKSNSAVAWSNKSDFACANAFNNSIIPEDTFFPSPESSCGTQSFGLLDPKLCYLLDGILFIYGVILTALFLRSKRSRLLHSDYMNMTPRRPGPTRKHYQPYAPPRDFAAYRSRVKFSRSADAPAYQQGQNQLYNELNLGRREEYDVLDKRRGRDPEMGGKPQRRKNPQEGLYNELQKDKMAEAYSEIGMKGERRRGKGHDGLYQGLSTATKDTYDALHMQALPPR

SEQ ID NO: 19159 - protein, 897 aa, Artificial Sequence
  Synthetic Polypeptide
MALPVTALLLPLALLLHAARPDIVMTQSPDSLAVSLGERATINCKSSQSVLYSSNNKNYLAWYQQKPGQPPKLLIYWASTRESGVPDRFSGSGSGTDFTLTISSLQAEDVAVYYCQQYYSTPLTFGQGTKVEIKLEGKPIPNPLLGLDSTGSGEDLKNVFPPEVAVFEPSEAEISHTQKATLVCLATGFYPDHVELSWWVNGKEVHSGVSTDPQPLKEQPALNDSRYCLSSRLRVSATFWQNPRNHFRCQVQFYGLSENDEWTQDRAKPVTQIVSAEAWGRADCGSQSFGLLDPKLCYLLDGILFIYGVILTALFLRVKFSRSADAPAYQQGQNQLYNELNLGRREEYDVLDKRRGRDPEMGGKPQRRKNPQEGLYNELQKDKMAEAYSEIGMKGERRRGKGHDGLYQGLSTATKDTYDALHMQALPPRRAKRSGSGATNFSLLKQAGDVEENPGPTSMDWIWRILFLVGAATGAHSFEEVQLVQSGAEVKKPGESLKISCKGSGYSFTSYWIGWVRQMPGKGLEWMGIIYPGDSDTRYSPSFQGQVTISADKSISTAYLQWSSLKASDTAMYYCARDVGRWAPGGFLDYWGQGTLVTVSSTREQKLISEEDLGSGIQNPDPAVYQLRDSKSSDKSVCLFTDFDSQTNVSQSKDSDVYITDKTVLDMRSMDFKSNSAVAWSNKSDFACANAFNNSIIPEDTFFPSPESSCGTQSFGLLDPKLCYLLDGILFIYGVILTALFLKRGRKKLLYIFKQPFMRPVQTTQEEDGCSCRFPEEEEGGCELRVKFSRSADAPAYQQGQNQLYNELNLGRREEYDVLDKRRGRDPEMGGKPQRRKNPQEGLYNELQKDKMAEAYSEIGMKGERRRGKGHDGLYQGLSTATKDTYDALHMQALPPR

SEQ ID NO: 19160 - protein, 939 aa, Artificial Sequence
  Synthetic Polypeptide
MALPVTALLLPLALLLHAARPDIVMTQSPDSLAVSLGERATINCKSSQSVLYSSNNKNYLAWYQQKPGQPPKLLIYWASTRESGVPDRFSGSGSGTDFTLTISSLQAEDVAVYYCQQYYSTPLTFGQGTKVEIKLEGKPIPNPLLGLDSTGSGEDLKNVFPPEVAVFEPSEAEISHTQKATLVCLATGFYPDHVELSWWVNGKEVHSGVSTDPQPLKEQPALNDSRYCLSSRLRVSATFWQNPRNHFRCQVQFYGLSENDEWTQDRAKPVTQIVSAEAWGRADCGSQSFGLLDPKLCYLLDGILFIYGVILTALFLKRGRKKLLYIFKQPFMRPVQTTQEEDGCSCRFPEEEEGGCELRVKFSRSADAPAYQQGQNQLYNELNLGRREEYDVLDKRRGRDPEMGGKPQRRKNPQEGLYNELQKDKMAEAYSEIGMKGERRRGKGHDGLYQGLSTATKDTYDALHMQALPPRRAKRSGSGATNFSLLKQAGDVEENPGPTSMDWIWRILFLVGAATGAHSFEEVQLVQSGAEVKKPGESLKISCKGSGYSFTSYWIGWVRQMPGKGLEWMGIIYPGDSDTRYSPSFQGQVTISADKSISTAYLQWSSLKASDTAMYYCARDVGRWAPGGFLDYWGQGTLVTVSSTREQKLISEEDLGSGIQNPDPAVYQLRDSKSSDKSVCLFTDFDSQTNVSQSKDSDVYITDKTVLDMRSMDFKSNSAVAWSNKSDFACANAFNNSIIPEDTFFPSPESSCGTQSFGLLDPKLCYLLDGILFIYGVILTALFLKRGRKKLLYIFKQPFMRPVQTTQEEDGCSCRFPEEEEGGCELRVKFSRSADAPAYQQGQNQLYNELNLGRREEYDVLDKRRGRDPEMGGKPQRRKNPQEGLYNELQKDKMAEAYSEIGMKGERRRGKGHDGLYQGLSTATKDTYDALHMQALPPR

SEQ ID NO: 19161 - protein, 829 aa, Artificial Sequence
  Synthetic Polypeptide
MALPVTALLLPLALLLHAARPDIVMTQSPDSLAVSLGERATINCKSSQSVLYSSNNKNYLAWYQQKPGQPPKLLIYWASTRESGVPDRFSGSGSGTDFTLTISSLQAEDVAVYYCQQYYSTPLTFGQGTKVEIKLEQSFGLLDPKLCYLLDGILFIYGVILTALFLRVKFSRSADAPAYQQGQNQLYNELNLGRREEYDVLDKRRGRDPEMGGKPQRRKNPQEGLYNELQKDKMAEAYSEIGMKGERRRGKGHDGLYQGLSTATKDTYDALHMQALPPRRAKRSGSGATNFSLLKQAGDVEENPGPTSMDWIWRILFLVGAATGAHSFEEVQLVQSGAEVKKPGESLKISCKGSGYSFTSYWIGWVRQMPGKGLEWMGIIYPGDSDTRYSPSFQGQVTISADKSISTAYLQWSSLKASDTAMYYCARDVGRWAPGGFLDYWGQGTLVTVSSTRQSFGLLDPKLCYLLDGILFIYGVILTALFLRVKFSRSADAPAYQQGQNQLYNELNLGRREEYDVLDKRRGRDPEMGGKPQRRKNPQEGLYNELQKDKMAEAYSEIGMKGERRRGKGHDGLYQGLSTATKDTYDALHMQALPPRRAKRSGSGVKQTLNFDLLKLAGDVESNPGPSRGHMTEYKPTVRLATRDDVPRAVRTLAAAFADYPATRHTVDPDRHIERVTELQELFLTRVGLDIGKVWVADDGAAVAVWTTPESVEAGAVFAEIGPRMAELSGSRLAAQQQMEGLLAPHRPKEPAWFLATVGVSPDHQGKGLGSAVVLPGVEAAERAGVPAFLETSAPRNLPFYERLGFTVTADVEVPEGPRTWCMTRKPGA

SEQ ID NO: 19162 - protein, 654 aa, Artificial Sequence
  Synthetic Polypeptide
MALPVTALLLPLALLLHAARPDIVMTQSPDSLAVSLGERATINCKSSQSVLYSSNNKNYLAWYQQKPGQPPKLLIYWASTRESGVPDRFSGSGSGTDFTLTISSLQAEDVAVYYCQQYYSTPLTFGQGTKVEIKLEGQPKANPTVTLFPPSSEELQANKATLVCLISDFYPGAVTVAWKADGSPVKAGVETTKPSKQSNNKYAASSYLSLTPEQWKSHRSYSCQVTHEGSTVEKTVAPTECSPIKTDVITMDPKDNCSKDANDTLLLQLTNTSAYYMYLLLLLKSVVYFAIITCCLLRRTAFCCNGEKSRAKRSGSGATNFSLLKQAGDVEENPGPTSMDWIWRILFLVGAATGAHSFEEVQLVQSGAEVKKPGESLKISCKGSGYSFTSYWIGWVRQMPGKGLEWMGIIYPGDSDTRYSPSFQGQVTISADKSISTAYLQWSSLKASDTAMYYCARDVGRWAPGGFLDYWGQGTLVTVSSTRASTKGPSVFPLAPSSKSTSGGTAALGCLVKDYFPEPVTVSWNSGALTSGVHTFPAVLQSSGLYSLSSVVTVPSSSLGTQTYICNVNHKPSNTKVDKRVEPKSCEVKTDSTDHVKPKETENTKQPSKSCHKPKAIVHTEKVNMMSLTVLGLRMLFAKTVAVNFLLTAKLFFL

SEQ ID NO: 19163 - protein, 632 aa, Artificial Sequence
  Synthetic Polypeptide
MALPVTALLLPLALLLHAARPDIVMTQSPDSLAVSLGERATINCKSSQSVLYSSNNKNYLAWYQQKPGQPPKLLIYWASTRESGVPDRFSGSGSGTDFTLTISSLQAEDVAVYYCQQYYSTPLTFGQGTKVEIKLEGQPKANPTVTLFPPSSEELQANKATLVCLISDFYPGAVTVAWKADGSPVKAGVETTKPSKQSNNKYAASSYLSLTPEQWKSHRSYSCQVTHEGSTVEKTVAPTECSGRADCGITSASYHQGVLSATILYEILLGKATLYAVLVSALVLMAMVKRKDSRGRAKRSGSGATNFSLLKQAGDVEENPGPTSMDWIWRILFLVGAATGAHSFEEVQLVQSGAEVKKPGESLKISCKGSGYSFTSYWIGWVRQMPGKGLEWMGIIYPGDSDTRYSPSFQGQVTISADKSISTAYLQWSSLKASDTAMYYCARDVGRWAPGGFLDYWGQGTLVTVSSTRASTKGPSVFPLAPSSKSTSGGTAALGCLVKDYFPEPVTVSWNSGALTSGVHTFPAVLQSSGLYSLSSVVTVPSSSLGTQTYICNVNHKPSNTKVDKRVEPKSCIPEDTFFPSSDVPCDVKLVEKSFETDTNLNFQNLSVIGFRILLLKVAGFNLLMTLRLWSS

SEQ ID NO: 19164 - protein, 632 aa, Artificial Sequence
  Synthetic Polypeptide
MALPVTALLLPLALLLHAARPDIVMTQSPDSLAVSLGERATINCKSSQSVLYSSNNKNYLAWYQQKPGQPPKLLIYWASTRESGVPDRFSGSGSGTDFTLTISSLQAEDVAVYYCQQYYSTPLTFGQGTKVEIKLEGQPKANPTVTLFPPSSEELQANKATLVCLISDFYPGAVTVAWKADGSPVKAGVETTKPSKQSNNKYAASSYLSLTPEQWKSHRSYSCQVTHEGSTVEKTVAPTECSGRADCGFTSESYQQGVLSATILYEILLGKATLYAVLVSALVLMAMVKRKDSRGRAKRSGSGATNFSLLKQAGDVEENPGPTSMDWIWRILFLVGAATGAHSFEEVQLVQSGAEVKKPGESLKISCKGSGYSFTSYWIGWVRQMPGKGLEWMGIIYPGDSDTRYSPSFQGQVTISADKSISTAYLQWSSLKASDTAMYYCARDVGRWAPGGFLDYWGQGTLVTVSSTRASTKGPSVFPLAPSSKSTSGGTAALGCLVKDYFPEPVTVSWNSGALTSGVHTFPAVLQSSGLYSLSSVVTVPSSSLGTQTYICNVNHKPSNTKVDKRVEPKSCIPEDTFFPSPESSCDVKLVEKSFETDTNLNFQNLSVIGFRILLLKVAGFNLLMTLRLWSS

SEQ ID NO: 19165 - protein, 458 aa, Artificial Sequence
  Synthetic Polypeptide
MALPVTALLLPLALLLHAARPDIVMTQSPDSLAVSLGERATINCKSSQSVLYSSNNKNYLAWYQQKPGQPPKLLIYWASTRESGVPDRFSGSGSGTDFTLTISSLQAEDVAVYYCQQYYSTPLTFGQGTKVEIKGGGGSGGGGSGGGGSEVQLVQSGAEVKKPGESLKISCKGSGYSFTSYWIGWVRQMPGKGLEWMGIIYPGDSDTRYSPSFQGQVTISADKSISTAYLQWSSLKASDTAMYYCARDVGRWAPGGFLDYWGQGTLVTVSSTRDGNEEMGGITQTPYKVSISGTTVILTCPQYPGSEILWQHNDKNIGGDEDDKNIGSDEDHLSLKEFSELEQSGYYVCYPRGSKPEDANFYLYLRARVCENCMEMDVMSVATIVIVDICITGGLLLLVYYWSKNRKAKAKPVTRGAGAGGRQRGQNKERPPPVPNPDYEPIRKGQRDLYSGLNQRRI

SEQ ID NO: 19166 - protein, 423 aa, Artificial Sequence
  Synthetic Polypeptide
MALPVTALLLPLALLLHAARPDIVMTQSPDSLAVSLGERATINCKSSQSVLYSSNNKNYLAWYQQKPGQPPKLLIYWASTRESGVPDRFSGSGSGTDFTLTISSLQAEDVAVYYCQQYYSTPLTFGQGTKVEIKGGGGSGGGGSGGGGSEVQLVQSGAEVKKPGESLKISCKGSGYSFTSYWIGWVRQMPGKGLEWMGIIYPGDSDTRYSPSFQGQVTISADKSISTAYLQWSSLKASDTAMYYCARDVGRWAPGGFLDYWGQGTLVTVSSTRFKIPIEELEDRVFVNCNTSITWVEGTVGTLLSDITRLDLGKRILDPRGIYRCNGTDIYKDKESTVQVHYRMCQSCVELDPATVAGIIVTDVIATLLLALGVFCFAGHETGRLSGAADTQALLRNDQVYQPLRDRDDAQYSHLGGNWARNK

SEQ ID NO: 19167 - protein, 433 aa, Artificial Sequence
  Synthetic Polypeptide
MALPVTALLLPLALLLHAARPDIVMTQSPDSLAVSLGERATINCKSSQSVLYSSNNKNYLAWYQQKPGQPPKLLIYWASTRESGVPDRFSGSGSGTDFTLTISSLQAEDVAVYYCQQYYSTPLTFGQGTKVEIKGGGGSGGGGSGGGGSEVQLVQSGAEVKKPGESLKISCKGSGYSFTSYWIGWVRQMPGKGLEWMGIIYPGDSDTRYSPSFQGQVTISADKSISTAYLQWSSLKASDTAMYYCARDVGRWAPGGFLDYWGQGTLVTVSSTRQSIKGNHLVKVYDYQEDGSVLLTCDAEAKNITWFKDGKMIGFLTEDKKKWNLGSNAKDPRGMYQCKGSQNKSKPLQVYYRMCQNCIELNAATISGFLFAEIVSIFVLAVGVYFIAGQDGVRQSRASDKQTLLPNDQLYQPLKDREDDQYSHLQGNQLRRN

SEQ ID NO: 19168 - protein, 416 aa, Artificial Sequence
  Synthetic Polypeptide
MALPVTALLLPLALLLHAARPDIVMTQSPDSLAVSLGERATINCKSSQSVLYSSNNKNYLAWYQQKPGQPPKLLIYWASTRESGVPDRFSGSGSGTDFTLTISSLQAEDVAVYYCQQYYSTPLTFGQGTKVEIKGGGGSGGGGSGGGGSEVQLVQSGAEVKKPGESLKISCKGSGYSFTSYWIGWVRQMPGKGLEWMGIIYPGDSDTRYSPSFQGQVTISADKSISTAYLQWSSLKASDTAMYYCARDVGRWAPGGFLDYWGQGTLVTVSSTRQSFGLLDPKLCYLLDGILFIYGVILTALFLRVKFSRSADAPAYQQGQNQLYNELNLGRREEYDVLDKRRGRDPEMGGKPQRRKNPQEGLYNELQKDKMAEAYSEIGMKGERRRGKGHDGLYQGLSTATKDTYDALHMQALPPR

SEQ ID NO: 19169 - protein, 458 aa, Artificial Sequence
  Synthetic Polypeptide
MALPVTALLLPLALLLHAARPEVQLVQSGAEVKKPGESLKISCKGSGYSFTSYWIGWVRQMPGKGLEWMGIIYPGDSDTRYSPSFQGQVTISADKSISTAYLQWSSLKASDTAMYYCARDVGRWAPGGFLDYWGQGTLVTVSSGGGGSGGGGSGGGGSDIVMTQSPDSLAVSLGERATINCKSSQSVLYSSNNKNYLAWYQQKPGQPPKLLIYWASTRESGVPDRFSGSGSGTDFTLTISSLQAEDVAVYYCQQYYSTPLTFGQGTKVEIKTRDGNEEMGGITQTPYKVSISGTTVILTCPQYPGSEILWQHNDKNIGGDEDDKNIGSDEDHLSLKEFSELEQSGYYVCYPRGSKPEDANFYLYLRARVCENCMEMDVMSVATIVIVDICITGGLLLLVYYWSKNRKAKAKPVTRGAGAGGRQRGQNKERPPPVPNPDYEPIRKGQRDLYSGLNQRRI

SEQ ID NO: 19170 - protein, 423 aa, Artificial Sequence
  Synthetic Polypeptide
MALPVTALLLPLALLLHAARPEVQLVQSGAEVKKPGESLKISCKGSGYSFTSYWIGWVRQMPGKGLEWMGIIYPGDSDTRYSPSFQGQVTISADKSISTAYLQWSSLKASDTAMYYCARDVGRWAPGGFLDYWGQGTLVTVSSGGGGSGGGGSGGGGSDIVMTQSPDSLAVSLGERATINCKSSQSVLYSSNNKNYLAWYQQKPGQPPKLLIYWASTRESGVPDRFSGSGSGTDFTLTISSLQAEDVAVYYCQQYYSTPLTFGQGTKVEIKTRFKIPIEELEDRVFVNCNTSITWVEGTVGTLLSDITRLDLGKRILDPRGIYRCNGTDIYKDKESTVQVHYRMCQSCVELDPATVAGIIVTDVIATLLLALGVFCFAGHETGRLSGAADTQALLRNDQVYQPLRDRDDAQYSHLGGNWARNK

SEQ ID NO: 19171 - protein, 433 aa, Artificial Sequence
  Synthetic Polypeptide
MALPVTALLLPLALLLHAARPEVQLVQSGAEVKKPGESLKISCKGSGYSFTSYWIGWVRQMPGKGLEWMGIIYPGDSDTRYSPSFQGQVTISADKSISTAYLQWSSLKASDTAMYYCARDVGRWAPGGFLDYWGQGTLVTVSSGGGGSGGGGSGGGGSDIVMTQSPDSLAVSLGERATINCKSSQSVLYSSNNKNYLAWYQQKPGQPPKLLIYWASTRESGVPDRFSGSGSGTDFTLTISSLQAEDVAVYYCQQYYSTPLTFGQGTKVEIKTRQSIKGNHLVKVYDYQEDGSVLLTCDAEAKNITWFKDGKMIGFLTEDKKKWNLGSNAKDPRGMYQCKGSQNKSKPLQVYYRMCQNCIELNAATISGFLFAEIVSIFVLAVGVYFIAGQDGVRQSRASDKQTLLPNDQLYQPLKDREDDQYSHLQGNQLRRN

SEQ ID NO: 19172 - protein, 416 aa, Artificial Sequence
  Synthetic Polypeptide
MALPVTALLLPLALLLHAARPEVQLVQSGAEVKKPGESLKISCKGSGYSFTSYWIGWVRQMPGKGLEWMGIIYPGDSDTRYSPSFQGQVTISADKSISTAYLQWSSLKASDTAMYYCARDVGRWAPGGFLDYWGQGTLVTVSSGGGGSGGGGSGGGGSDIVMTQSPDSLAVSLGERATINCKSSQSVLYSSNNKNYLAWYQQKPGQPPKLLIYWASTRESGVPDRFSGSGSGTDFTLTISSLQAEDVAVYYCQQYYSTPLTFGQGTKVEIKTRQSFGLLDPKLCYLLDGILFIYGVILTALFLRVKFSRSADAPAYQQGQNQLYNELNLGRREEYDVLDKRRGRDPEMGGKPQRRKNPQEGLYNELQKDKMAEAYSEIGMKGERRRGKGHDGLYQGLSTATKDTYDALHMQALPPR

SEQ ID NO: 19173 - protein, 649 aa, Artificial Sequence
  Synthetic Polypeptide
MALPVTALLLPLALLLHAARPDIVMTQSPDSLAVSLGERATINCKSSQSVLYSSNNKNYLAWYQQKPGQPPKLLIYWASTRESGVPDRFSGSGSGTDFTLTISSLQAEDVAVYYCQQYYSTPLTFGQGTKVEIKGGGGSGGGGSGGGGSEVQLVQSGAEVKKPGESLKISCKGSGYSFTSYWIGWVRQMPGKGLEWMGIIYPGDSDTRYSPSFQGQVTISADKSISTAYLQWSSLKASDTAMYYCARDVGRWAPGGFLDYWGQGTLVTVSSTRGSGIQNPDPAVYQLRDSKSSDKSVCLFTDFDSQTNVSQSKDSDVYITDKTVLDMRSMDFKSNSAVAWSNKSDFACANAFNNSIIPEDTFFPSPESSCDVKLVEKSFETDTNLNFQNLSVIGFRILLLKVAGFNLLMTLRLWSSRAKRSGSGVKQTLNFDLLKLAGDVESNPGPSRGHMTEYKPTVRLATRDDVPRAVRTLAAAFADYPATRHTVDPDRHIERVTELQELFLTRVGLDIGKVWVADDGAAVAVWTTPESVEAGAVFAEIGPRMAELSGSRLAAQQQMEGLLAPHRPKEPAWFLATVGVSPDHQGKGLGSAVVLPGVEAAERAGVPAFLETSAPRNLPFYERLGFTVTADVEVPEGPRTWCMTRKPGA

SEQ ID NO: 19174 - protein, 681 aa, Artificial Sequence
  Synthetic Polypeptide
MALPVTALLLPLALLLHAARPDIVMTQSPDSLAVSLGERATINCKSSQSVLYSSNNKNYLAWYQQKPGQPPKLLIYWASTRESGVPDRFSGSGSGTDFTLTISSLQAEDVAVYYCQQYYSTPLTFGQGTKVEIKGGGGSGGGGSGGGGSEVQLVQSGAEVKKPGESLKISCKGSGYSFTSYWIGWVRQMPGKGLEWMGIIYPGDSDTRYSPSFQGQVTISADKSISTAYLQWSSLKASDTAMYYCARDVGRWAPGGFLDYWGQGTLVTVSSLEDLKNVFPPEVAVFEPSEAEISHTQKATLVCLATGFYPDHVELSWWVNGKEVHSGVSTDPQPLKEQPALNDSRYCLSSRLRVSATFWQNPRNHFRCQVQFYGLSENDEWTQDRAKPVTQIVSAEAWGRADCGFTSESYQQGVLSATILYEILLGKATLYAVLVSALVLMAMVKRKDSRGRAKRSGSGATNFSLLKQAGDVEENPGPTRGHMTEYKPTVRLATRDDVPRAVRTLAAAFADYPATRHTVDPDRHIERVTELQELFLTRVGLDIGKVWVADDGAAVAVWTTPESVEAGAVFAEIGPRMAELSGSRLAAQQQMEGLLAPHRPKEPAWFLATVGVSPDHQGKGLGSAVVLPGVEAAERAGVPAFLETSAPRNLPFYERLGFTVTADVEVPEGPRTWCMTRKPGA

SEQ ID NO: 19175 - protein, 731 aa, Artificial Sequence
  Synthetic Polypeptide
MALPVTALLLPLALLLHAARPDIVMTQSPDSLAVSLGERATINCKSSQSVLYSSNNKNYLAWYQQKPGQPPKLLIYWASTRESGVPDRFSGSGSGTDFTLTISSLQAEDVAVYYCQQYYSTPLTFGQGTKVEIKGGGGSGGGGSGGGGSEVQLVQSGAEVKKPGESLKISCKGSGYSFTSYWIGWVRQMPGKGLEWMGIIYPGDSDTRYSPSFQGQVTISADKSISTAYLQWSSLKASDTAMYYCARDVGRWAPGGFLDYWGQGTLVTVSSTREQKLISEEDLGSGTPFPSLAPPIMLLVDGKQQMVVVCLVLDVAPPGLDSPIWFSAGNGSALDAFTYGPSPATDGTWTNLAHLSLPSEELASWEPLVCHTGPGAEGHSRSTQPMHLSGEASTARTCPQEPLRGTPGGALWLGVLRLLLFKLLLFDLLLTCSCLCDPAGPLPSPATTTRLRALGSHRLHPATETGGREATSSPRPQPRDRRWGDTPPGRKPGSPVRAKRSGSGVKQTLNFDLLKLAGDVESNPGPSRSRGHMTEYKPTVRLATRDDVPRAVRTLAAAFADYPATRHTVDPDRHIERVTELQELFLTRVGLDIGKVWVADDGAAVAVWTTPESVEAGAVFAEIGPRMAELSGSRLAAQQQMEGLLAPHRPKEPAWFLATVGVSPDHQGKGLGSAVVLPGVEAAERAGVPAFLETSAPRNLPFYERLGFTVTADVEVPEGPRTWCMTRKPGA

SEQ ID NO: 19176 - protein, 544 aa, Artificial Sequence
  Synthetic Polypeptide
MALPVTALLLPLALLLHAARPDIVMTQSPDSLAVSLGERATINCKSSQSVLYSSNNKNYLAWYQQKPGQPPKLLIYWASTRESGVPDRFSGSGSGTDFTLTISSLQAEDVAVYYCQQYYSTPLTFGQGTKVEIKLEDLKNVFPPEVAVFEPSEAEISHTQKATLVCLATGFYPDHVELSWWVNGKEVHSGVSTDPQPLKEQPALNDSRYCLSSRLRVSATFWQNPRNHFRCQVQFYGLSENDEWTQDRAKPVTQIVSAEAWGRADCGFTSESYQQGVLSATILYEILLGKATLYAVLVSALVLMAMVKRKDSRGRAKRSGSGATNFSLLKQAGDVEENPGPTRGHMTEYKPTVRLATRDDVPRAVRTLAAAFADYPATRHTVDPDRHIERVTELQELFLTRVGLDIGKVWVADDGAAVAVWTTPESVEAGAVFAEIGPRMAELSGSRLAAQQQMEGLLAPHRPKEPAWFLATVGVSPDHQGKGLGSAVVLPGVEAAERAGVPAFLETSAPRNLPFYERLGFTVTADVEVPEGPRTWCMTRKPGA

SEQ ID NO: 19177 - protein, 314 aa, Artificial Sequence
  Synthetic Polypeptide
MALPVTALLLPLALLLHAARPDIVMTQSPDSLAVSLGERATINCKSSQSVLYSSNNKNYLAWYQQKPGQPPKLLIYWASTRESGVPDRFSGSGSGTDFTLTISSLQAEDVAVYYCQQYYSTPLTFGQGTKVEIKLEDLKNVFPPEVAVFEPSEAEISHTQKATLVCLATGFYPDHVELSWWVNGKEVHSGVSTDPQPLKEQPALNDSRYCLSSRLRVSATFWQNPRNHFRCQVQFYGLSENDEWTQDRAKPVTQIVSAEAWGRADCGFTSESYQQGVLSATILYEILLGKATLYAVLVSALVLMAMVKRKDSRG

SEQ ID NO: 19178 - protein, 451 aa, Artificial Sequence
  Synthetic Polypeptide
MDWIWRILFLVGAATGAHSFEEVQLVQSGAEVKKPGESLKISCKGSGYSFTSYWIGWVRQMPGKGLEWMGIIYPGDSDTRYSPSFQGQVTISADKSISTAYLQWSSLKASDTAMYYCARDVGRWAPGGFLDYWGQGTLVTVSSTRIQNPDPAVYQLRDSKSSDKSVCLFTDFDSQTNVSQSKDSDVYITDKTVLDMRSMDFKSNSAVAWSNKSDFACANAFNNSIIPEDTFFPSPESSCDVKLVEKSFETDTNLNFQNLSVIGFRILLLKVAGFNLLMTLRLWSSRAKRSGSGVKQTLNFDLLKLAGDVESNPGPSRGHMAKPLSQEESTLIERATATINSIPISEDYSVASAALSSDGRIFTGVNVYHFTGGPCAELVVLGTAAAAAAGNLTCIVAIGNENRGILSPCGRCRQVLLDLHPGIKAIVKDSDGQPTAVGIRELLPSGYVWEG

SEQ ID NO: 19179 - protein, 285 aa, Artificial Sequence
  Synthetic Polypeptide
MDWIWRILFLVGAATGAHSFEEVQLVQSGAEVKKPGESLKISCKGSGYSFTSYWIGWVRQMPGKGLEWMGIIYPGDSDTRYSPSFQGQVTISADKSISTAYLQWSSLKASDTAMYYCARDVGRWAPGGFLDYWGQGTLVTVSSTRIQNPDPAVYQLRDSKSSDKSVCLFTDFDSQTNVSQSKDSDVYITDKTVLDMRSMDFKSNSAVAWSNKSDFACANAFNNSIIPEDTFFPSPESSCDVKLVEKSFETDTNLNFQNLSVIGFRILLLKVAGFNLLMTLRLWSS

SEQ ID NO: 19180 - protein, 562 aa, Artificial Sequence
  Synthetic Polypeptide
MALPVTALLLPLALLLHAARPDIVMTQSPDSLAVSLGERATINCKSSQSVLYSSNNKNYLAWYQQKPGQPPKLLIYWASTRESGVPDRFSGSGSGTDFTLTISSLQAEDVAVYYCQQYYSTPLTFGQGTKVEIKLEGKPIPNPLLGLDSTGSGEDLKNVFPPEVAVFEPSEAEISHTQKATLVCLATGFYPDHVELSWWVNGKEVHSGVCTDPQPLKEQPALNDSRYCLSSRLRVSATFWQNPRNHFRCQVQFYGLSENDEWTQDRAKPVTQIVSAEAWGRADCGFTSESYQQGVLSATILYEILLGKATLYAVLVSALVLMAMVKRKDSRGRAKRSGSGATNFSLLKQAGDVEENPGPTRGHMTEYKPTVRLATRDDVPRAVRTLAAAFADYPATRHTVDPDRHIERVTELQELFLTRVGLDIGKVWVADDGAAVAVWTTPESVEAGAVFAEIGPRMAELSGSRLAAQQQMEGLLAPHRPKEPAWFLATVGVSPDHQGKGLGSAVVLPGVEAAERAGVPAFLETSAPRNLPFYERLGFTVTADVEVPEGPRTWCMTRKPGA

SEQ ID NO: 19181 - protein, 332 aa, Artificial Sequence
  Synthetic Polypeptide
MALPVTALLLPLALLLHAARPDIVMTQSPDSLAVSLGERATINCKSSQSVLYSSNNKNYLAWYQQKPGQPPKLLIYWASTRESGVPDRFSGSGSGTDFTLTISSLQAEDVAVYYCQQYYSTPLTFGQGTKVEIKLEGKPIPNPLLGLDSTGSGEDLKNVFPPEVAVFEPSEAEISHTQKATLVCLATGFYPDHVELSWWVNGKEVHSGVCTDPQPLKEQPALNDSRYCLSSRLRVSATFWQNPRNHFRCQVQFYGLSENDEWTQDRAKPVTQIVSAEAWGRADCGFTSESYQQGVLSATILYEILLGKATLYAVLVSALVLMAMVKRKDSRG

SEQ ID NO: 19182 - protein, 463 aa, Artificial Sequence
  Synthetic Polypeptide
MDWIWRILFLVGAATGAHSFEEVQLVQSGAEVKKPGESLKISCKGSGYSFTSYWIGWVRQMPGKGLEWMGIIYPGDSDTRYSPSFQGQVTISADKSISTAYLQWSSLKASDTAMYYCARDVGRWAPGGFLDYWGQGTLVTVSSTREQKLISEEDGSGIQNPDPAVYQLRDSKSSDKSVCLFTDFDSQTNVSQSKDSDVYITDKCVLDMRSMDFKSNSAVAWSNKSDFACANAFNNSIIPEDTFFPSPESSCDVKLVEKSFETDTNLNFQNLSVIGFRILLLKVAGFNLLMTLRLWSSRAKRSGSGVKQTLNFDLLKLAGDVESNPGPSRGHMAKPLSQEESTLIERATATINSIPISEDYSVASAALSSDGRIFTGVNVYHFTGGPCAELVVLGTAAAAAAGNLTCIVAIGNENRGILSPCGRCRQVLLDLHPGIKAIVKDSDGQPTAVGIRELLPSGYVWEG

SEQ ID NO: 19183 - protein, 297 aa, Artificial Sequence
  Synthetic Polypeptide
MDWIWRILFLVGAATGAHSFEEVQLVQSGAEVKKPGESLKISCKGSGYSFTSYWIGWVRQMPGKGLEWMGIIYPGDSDTRYSPSFQGQVTISADKSISTAYLQWSSLKASDTAMYYCARDVGRWAPGGFLDYWGQGTLVTVSSTREQKLISEEDGSGIQNPDPAVYQLRDSKSSDKSVCLFTDFDSQTNVSQSKDSDVYITDKCVLDMRSMDFKSNSAVAWSNKSDFACANAFNNSIIPEDTFFPSPESSCDVKLVEKSFETDTNLNFQNLSVIGFRILLLKVAGFNLLMTLRLWSS

SEQ ID NO: 19184 - protein, 649 aa, Artificial Sequence
  Synthetic Polypeptide
MALPVTALLLPLALLLHAARPDIVMTQSPDSLAVSLGERATINCKSSQSVLYSSNNKNYLAWYQQKPGQPPKLLIYWASTRESGVPDRFSGSGSGTDFTLTISSLQAEDVAVYYCQQYYSTPLTFGQGTKVEIKGGGGSGGGGSGGGGSEVQLVQSGAEVKKPGESLKISCKGSGYSFTSYWIGWVRQMPGKGLEWMGIIYPGDSDTRYSPSFQGQVTISADKSISTAYLQWSSLKASDTAMYYCARDVGRWAPGGFLDYWGQGTLVTVSSTRGSGIQNPDPAVYQLRDSKSSDKSVCLFTDFDSQTNVSQSKDSDVYITDKTVLDMRSMDFKSNSAVAWSNKSDFACANAFNNSIIPEDTFFPSSDVPCDVKLVEKSFETDTNLNFQNLSVIGFRILLLKVAGFNLLMTLRLWSSRAKRSGSGVKQTLNFDLLKLAGDVESNPGPSRGHMTEYKPTVRLATRDDVPRAVRTLAAAFADYPATRHTVDPDRHIERVTELQELFLTRVGLDIGKVWVADDGAAVAVWTTPESVEAGAVFAEIGPRMAELSGSRLAAQQQMEGLLAPHRPKEPAWFLATVGVSPDHQGKGLGSAVVLPGVEAAERAGVPAFLETSAPRNLPFYERLGFTVTADVEVPEGPRTWCMTRKPGA

SEQ ID NO: 19185 - protein, 681 aa, Artificial Sequence
  Synthetic Polypeptide
MALPVTALLLPLALLLHAARPDIVMTQSPDSLAVSLGERATINCKSSQSVLYSSNNKNYLAWYQQKPGQPPKLLIYWASTRESGVPDRFSGSGSGTDFTLTISSLQAEDVAVYYCQQYYSTPLTFGQGTKVEIKGGGGSGGGGSGGGGSEVQLVQSGAEVKKPGESLKISCKGSGYSFTSYWIGWVRQMPGKGLEWMGIIYPGDSDTRYSPSFQGQVTISADKSISTAYLQWSSLKASDTAMYYCARDVGRWAPGGFLDYWGQGTLVTVSSLEDLKNVFPPEVAVFEPSKAEIAHTQKATLVCLATGFYPDHVELSWWVNGKEVHSGVSTDPQPLKEQPALNDSRYCLSSRLRVSATFWQNPRNHFRCQVQFYGLSENDEWTQDRAKPVTQIVSAEAWGRADCGITSASYHQGVLSATILYEILLGKATLYAVLVSALVLMAMVKRKDSRGRAKRSGSGATNFSLLKQAGDVEENPGPTRGHMTEYKPTVRLATRDDVPRAVRTLAAAFADYPATRHTVDPDRHIERVTELQELFLTRVGLDIGKVWVADDGAAVAVWTTPESVEAGAVFAEIGPRMAELSGSRLAAQQQMEGLLAPHRPKEPAWFLATVGVSPDHQGKGLGSAVVLPGVEAAERAGVPAFLETSAPRNLPFYERLGFTVTADVEVPEGPRTWCMTRKPGA

SEQ ID NO: 19186 - protein, 704 aa, Artificial Sequence
  Synthetic Polypeptide
MALPVTALLLPLALLLHAARPDIVMTQSPDSLAVSLGERATINCKSSQSVLYSSNNKNYLAWYQQKPGQPPKLLIYWASTRESGVPDRFSGSGSGTDFTLTISSLQAEDVAVYYCQQYYSTPLTFGQGTKVEIKGGGGSGGGGSGGGGSEVQLVQSGAEVKKPGESLKISCKGSGYSFTSYWIGWVRQMPGKGLEWMGIIYPGDSDTRYSPSFQGQVTISADKSISTAYLQWSSLKASDTAMYYCARDVGRWAPGGFLDYWGQGTLVTVSSTRGSGGGGSGGGGSGDGNEEMGGITQTPYKVSISGTTVILTCPQYPGSEILWQHNDKNIGGDEDDKNIGSDEDHLSLKEFSELEQSGYYVCYPRGSKPEDANFYLYLRARVCENCMEMDVMSVATIVIVDICITGGLLLLVYYWSKNRKAKAKPVTRGAGAGGRQRGQNKERPPPVPNPDYEPIRKGQRDLYSGLNQRRIRAKRSGSGVKQTLNFDLLKLAGDVESNPGPSRGHMTEYKPTVRLATRDDVPRAVRTLAAAFADYPATRHTVDPDRHIERVTELQELFLTRVGLDIGKVWVADDGAAVAVWTTPESVEAGAVFAEIGPRMAELSGSRLAAQQQMEGLLAPHRPKEPAWFLATVGVSPDHQGKGLGSAVVLPGVEAAERAGVPAFLETSAPRNLPFYERLGFTVTADVEVPEGPRTWCMTRKPGA

SEQ ID NO: 19187 - protein, 669 aa, Artificial Sequence
  Synthetic Polypeptide
MALPVTALLLPLALLLHAARPDIVMTQSPDSLAVSLGERATINCKSSQSVLYSSNNKNYLAWYQQKPGQPPKLLIYWASTRESGVPDRFSGSGSGTDFTLTISSLQAEDVAVYYCQQYYSTPLTFGQGTKVEIKGGGGSGGGGSGGGGSEVQLVQSGAEVKKPGESLKISCKGSGYSFTSYWIGWVRQMPGKGLEWMGIIYPGDSDTRYSPSFQGQVTISADKSISTAYLQWSSLKASDTAMYYCARDVGRWAPGGFLDYWGQGTLVTVSSTRGSGGGGSGGGGSGFKIPIEELEDRVFVNCNTSITWVEGTVGTLLSDITRLDLGKRILDPRGIYRCNGTDIYKDKESTVQVHYRMCQSCVELDPATVAGIIVTDVIATLLLALGVFCFAGHETGRLSGAADTQALLRNDQVYQPLRDRDDAQYSHLGGNWARNKRAKRSGSGVKQTLNFDLLKLAGDVESNPGPSRGHMTEYKPTVRLATRDDVPRAVRTLAAAFADYPATRHTVDPDRHIERVTELQELFLTRVGLDIGKVWVADDGAAVAVWTTPESVEAGAVFAEIGPRMAELSGSRLAAQQQMEGLLAPHRPKEPAWFLATVGVSPDHQGKGLGSAVVLPGVEAAERAGVPAFLETSAPRNLPFYERLGFTVTADVEVPEGPRTWCMTRKPGA

SEQ ID NO: 19188 - protein, 679 aa, Artificial Sequence
  Synthetic Polypeptide
MALPVTALLLPLALLLHAARPDIVMTQSPDSLAVSLGERATINCKSSQSVLYSSNNKNYLAWYQQKPGQPPKLLIYWASTRESGVPDRFSGSGSGTDFTLTISSLQAEDVAVYYCQQYYSTPLTFGQGTKVEIKGGGGSGGGGSGGGGSEVQLVQSGAEVKKPGESLKISCKGSGYSFTSYWIGWVRQMPGKGLEWMGIIYPGDSDTRYSPSFQGQVTISADKSISTAYLQWSSLKASDTAMYYCARDVGRWAPGGFLDYWGQGTLVTVSSTRGSGGGGSGGGGSGQSIKGNHLVKVYDYQEDGSVLLTCDAEAKNITWFKDGKMIGFLTEDKKKWNLGSNAKDPRGMYQCKGSQNKSKPLQVYYRMCQNCIELNAATISGFLFAEIVSIFVLAVGVYFIAGQDGVRQSRASDKQTLLPNDQLYQPLKDREDDQYSHLQGNQLRRNRAKRSGSGVKQTLNFDLLKLAGDVESNPGPSRGHMTEYKPTVRLATRDDVPRAVRTLAAAFADYPATRHTVDPDRHIERVTELQELFLTRVGLDIGKVWVADDGAAVAVWTTPESVEAGAVFAEIGPRMAELSGSRLAAQQQMEGLLAPHRPKEPAWFLATVGVSPDHQGKGLGSAVVLPGVEAAERAGVPAFLETSAPRNLPFYERLGFTVTADVEVPEGPRTWCMTRKPGA

SEQ ID NO: 19189 - protein, 662 aa, Artificial Sequence
  Synthetic Polypeptide
MALPVTALLLPLALLLHAARPDIVMTQSPDSLAVSLGERATINCKSSQSVLYSSNNKNYLAWYQQKPGQPPKLLIYWASTRESGVPDRFSGSGSGTDFTLTISSLQAEDVAVYYCQQYYSTPLTFGQGTKVEIKGGGGSGGGGSGGGGSEVQLVQSGAEVKKPGESLKISCKGSGYSFTSYWIGWVRQMPGKGLEWMGIIYPGDSDTRYSPSFQGQVTISADKSISTAYLQWSSLKASDTAMYYCARDVGRWAPGGFLDYWGQGTLVTVSSTRGSGGGGSGGGGSGQSFGLLDPKLCYLLDGILFIYGVILTALFLRVKFSRSADAPAYQQGQNQLYNELNLGRREEYDVLDKRRGRDPEMGGKPQRRKNPQEGLYNELQKDKMAEAYSEIGMKGERRRGKGHDGLYQGLSTATKDTYDALHMQALPPRRAKRSGSGVKQTLNFDLLKLAGDVESNPGPSRGHMTEYKPTVRLATRDDVPRAVRTLAAAFADYPATRHTVDPDRHIERVTELQELFLTRVGLDIGKVWVADDGAAVAVWTTPESVEAGAVFAEIGPRMAELSGSRLAAQQQMEGLLAPHRPKEPAWFLATVGVSPDHQGKGLGSAVVLPGVEAAERAGVPAFLETSAPRNLPFYERLGFTVTADVEVPEGPRTWCMTRKPGA

SEQ ID NO: 19190 - protein, 763 aa, Artificial Sequence
  Synthetic Polypeptide
MALPVTALLLPLALLLHAARPEVQLVESGGGLVQPGGSLRLSCAASGFSFSDFWMSWVRQAPGKGLEWVATISQAGSEKDYVDSVKGRFTISRDNAKKSLYLQMNSLRAEDTAVYYCASGVYSFDYRGQGTLVTVSSGTGGGGSGGGGSGGGGSEFDIVMTQSPDSLAVSLGERATINCKSSQSVLYSSNNKNYLAWYQQKPGQPPKLLIYWASTRESGVPDRFSGSGSGTDFTLTISSLQAEDVAVYYCQQYYSTPLTFGQGTKVEIKLEDLKNVFPPEVAVFEPSEAEISHTQKATLVCLATGFYPDHVELSWWVNGKEVHSGVCTDPQPLKEQPALNDSRYCLSSRLRVSATFWQNPRNHFRCQVQFYGLSENDEWTQDRAKPVTQIVSAEAWGRADCGFTSESYQQGVLSATILYEILLGKATLYAVLVSALVLMAMVKRKDSRGRAKRSGSGATNFSLLKQAGDVEENPGPTSMDWIWRILFLVGAATGAHSFEEVQLVQSGAEVKKPGESLKISCKGSGYSFTSYWIGWVRQMPGKGLEWMGIIYPGDSDTRYSPSFQGQVTISADKSISTAYLQWSSLKASDTAMYYCARDVGRWAPGGFLDYWGQGTLVTVSSTRIQNPDPAVYQLRDSKSSDKSVCLFTDFDSQTNVSQSKDSDVYITDKCVLDMRSMDFKSNSAVAWSNKSDFACANAFNNSIIPEDTFFPSPESSCDVKLVEKSFETDTNLNFQNLSVIGFRILLLKVAGFNLLMTLRLWSS

SEQ ID NO: 19191 - protein, 767 aa, Artificial Sequence
  Synthetic Polypeptide
MALPVTALLLPLALLLHAARPEVQLVESGGGLVQPGGSLRLSCAASGFSFSDFWMSWVRQAPGKGLEWVATISQAGSEKDYVDSVKGRFTISRDNAKKSLYLQMNSLRAEDTAVYYCASGVYSFDYRGQGTLVTVSSGTGGGGSGGGGSGGGGSEFDIVMTQSPDSLAVSLGERATINCKSSQSVLYSSNNKNYLAWYQQKPGQPPKLLIYWASTRESGVPDRFSGSGSGTDFTLTISSLQAEDVAVYYCQQYYSTPLTFGQGTKVEIKLEIQNPDPAVYQLRDSKSSDKSVCLFTDFDSQTNVSQSKDSDVYITDKCVLDMRSMDFKSNSAVAWSNKSDFACANAFNNSIIPEDTFFPSPESSCDVKLVEKSFETDTNLNFQNLSVIGFRILLLKVAGFNLLMTLRLWSSRAKRSGSGVKQTLNFDLLKLAGDVESNPGPTSMDWIWRILFLVGAATGAHSFEEVQLVQSGAEVKKPGESLKISCKGSGYSFTSYWIGWVRQMPGKGLEWMGIIYPGDSDTRYSPSFQGQVTISADKSISTAYLQWSSLKASDTAMYYCARDVGRWAPGGFLDYWGQGTLVTVSSTREDLKNVFPPEVAVFEPSEAEISHTQKATLVCLATGFYPDHVELSWWVNGKEVHSGVCTDPQPLKEQPALNDSRYCLSSRLRVSATFWQNPRNHFRCQVQFYGLSENDEWTQDRAKPVTQIVSAEAWGRADCGFTSESYQQGVLSATILYEILLGKATLYAVLVSALVLMAMVKRKDSRG

SEQ ID NO: 19192 - protein, 959 aa, Artificial Sequence
  Synthetic Polypeptide
MALPVTALLLPLALLLHAARPEVQLVESGGGLVQPGGSLRLSCAASGFSFSDFWMSWVRQAPGKGLEWVATISQAGSEKDYVDSVKGRFTISRDNAKKSLYLQMNSLRAEDTAVYYCASGVYSFDYRGQGTLVTVSSGTGGGGSGGGGSGGGGSEFDIVMTQSPDSLAVSLGERATINCKSSQSVLYSSNNKNYLAWYQQKPGQPPKLLIYWASTRESGVPDRFSGSGSGTDFTLTISSLQAEDVAVYYCQQYYSTPLTFGQGTKVEIKLEDLKNVFPPEVAVFEPSEAEISHTQKATLVCLATGFYPDHVELSWWVNGKEVHSGVSTDPQPLKEQPALNDSRYCLSSRLRVSATFWQNPRNHFRCQVQFYGLSENDEWTQDRAKPVTQIVSAEAWGRADCGSQSFGLLDPKLCYLLDGILFIYGVILTALFLRVKFSRSADAPAYQQGQNQLYNELNLGRREEYDVLDKRRGRDPEMGGKPQRRKNPQEGLYNELQKDKMAEAYSEIGMKGERRRGKGHDGLYQGLSTATKDTYDALHMQALPPRRAKRSGSGATNFSLLKQAGDVEENPGPTSMDWIWRILFLVGAATGAHSFEEVQLVQSGAEVKKPGESLKISCKGSGYSFTSYWIGWVRQMPGKGLEWMGIIYPGDSDTRYSPSFQGQVTISADKSISTAYLQWSSLKASDTAMYYCARDVGRWAPGGFLDYWGQGTLVTVSSTRIQNPDPAVYQLRDSKSSDKSVCLFTDFDSQTNVSQSKDSDVYITDKTVLDMRSMDFKSNSAVAWSNKSDFACANAFNNSIIPEDTFFPSPESSCGTQSFGLLDPKLCYLLDGILFIYGVILTALFLRVKFSRSADAPAYQQGQNQLYNELNLGRREEYDVLDKRRGRDPEMGGKPQRRKNPQEGLYNELQKDKMAEAYSEIGMKGERRRGKGHDGLYQGLSTATKDTYDALHMQALPPR

SEQ ID NO: 19193 - protein, 789 aa, Artificial Sequence
  Synthetic Polypeptide
MALPVTALLLPLALLLHAARPEVQLVESGGGLVQPGGSLRLSCAASGFSFSDFWMSWVRQAPGKGLEWVATISQAGSEKDYVDSVKGRFTISRDNAKKSLYLQMNSLRAEDTAVYYCASGVYSFDYRGQGTLVTVSSGTGGGGSGGGGSGGGGSEFDIVMTQSPDSLAVSLGERATINCKSSQSVLYSSNNKNYLAWYQQKPGQPPKLLIYWASTRESGVPDRFSGSGSGTDFTLTISSLQAEDVAVYYCQQYYSTPLTFGQGTKVEIKLEGQPKANPTVTLFPPSSEELQANKATLVCLISDFYPGAVTVAWKADGSPVKAGVETTKPSKQSNNKYAASSYLSLTPEQWKSHRSYSCQVTHEGSTVEKTVAPTECSPIKTDVITMDPKDNCSKDANDTLLLQLTNTSAYYMYLLLLLKSVVYFAIITCCLLRRTAFCCNGEKSRAKRSGSGATNFSLLKQAGDVEENPGPTSMDWIWRILFLVGAATGAHSFEEVQLVQSGAEVKKPGESLKISCKGSGYSFTSYWIGWVRQMPGKGLEWMGIIYPGDSDTRYSPSFQGQVTISADKSISTAYLQWSSLKASDTAMYYCARDVGRWAPGGFLDYWGQGTLVTVSSTRASTKGPSVFPLAPSSKSTSGGTAALGCLVKDYFPEPVTVSWNSGALTSGVHTFPAVLQSSGLYSLSSVVTVPSSSLGTQTYICNVNHKPSNTKVDKRVEPKSCEVKTDSTDHVKPKETENTKQPSKSCHKPKAIVHTEKVNMMSLTVLGLRMLFAKTVAVNFLLTAKLFFL

SEQ ID NO: 19194 - protein, 770 aa, Artificial Sequence
  Synthetic Polypeptide
MALPVTALLLPLALLLHAARPEVQLVESGGGLVQPGGSLRLSCAASGFSFSDFWMSWVRQAPGKGLEWVATISQAGSEKDYVDSVKGRFTISRDNAKKSLYLQMNSLRAEDTAVYYCASGVYSFDYRGQGTLVTVSSGTGGGGSGGGGSGGGGSEFDIVMTQSPDSLAVSLGERATINCKSSQSVLYSSNNKNYLAWYQQKPGQPPKLLIYWASTRESGVPDRFSGSGSGTDFTLTISSLQAEDVAVYYCQQYYSTPLTFGQGTKVEIKLEGQPKANPTVTLFPPSSEELQANKATLVCLISDFYPGAVTVAWKADGSPVKAGVETTKPSKQSNNKYAASSYLSLTPEQWKSHRSYSCQVTHEGSTVEKTVAPTECSGRADCGFTSESYQQGVLSATILYEILLGKATLYAVLVSALVLMAMVKRKDSRGRAKRSGSGVKQTLNFDLLKLAGDVESNPGPTSMDWIWRILFLVGAATGAHSFEEVQLVQSGAEVKKPGESLKISCKGSGYSFTSYWIGWVRQMPGKGLEWMGIIYPGDSDTRYSPSFQGQVTISADKSISTAYLQWSSLKASDTAMYYCARDVGRWAPGGFLDYWGQGTLVTVSSTRASTKGPSVFPLAPSSKSTSGGTAALGCLVKDYFPEPVTVSWNSGALTSGVHTFPAVLQSSGLYSLSSVVTVPSSSLGTQTYICNVNHKPSNTKVDKRVEPKSCIPEDTFFPSPESSCDVKLVEKSFETDTNLNFQNLSVIGFRILLLKVAGFNLLMTLRLWSS

SEQ ID NO: 19195 - protein, 904 aa, Artificial Sequence
  Synthetic Polypeptide
MALPVTALLLPLALLLHAARPEVQLVESGGGLVQPGGSLRLSCAASGFSFSDFWMSWVRQAPGKGLEWVATISQAGSEKDYVDSVKGRFTISRDNAKKSLYLQMNSLRAEDTAVYYCASGVYSFDYRGQGTLVTVSSGTGGGGSGGGGSGGGGSEFDIVMTQSPDSLAVSLGERATINCKSSQSVLYSSNNKNYLAWYQQKPGQPPKLLIYWASTRESGVPDRFSGSGSGTDFTLTISSLQAEDVAVYYCQQYYSTPLTFGQGTKVEIKLEIQNPDPAVYQLRDSKSSDKSVCLFTDFDSQTNVSQSKDSDVYITDKCVLDMRSMDFKSNSAVAWSNKSDFACANAFNNSIIPEDTFFPSPESSCDVKLVEKSFETDTNLNFQNLSVIGFRILLLKVAGFNLLMTLRLWSSRAKRSGSGVKQTLNFDLLKLAGDVESNPGPTSMDWIWRILFLVGAATGAHSGPQLQLQESGPGLVKPSETLSLTCTVSGDSISSGDYYWGWIRQPPGKGLEWIGHIYYSGVTYYNPSLKSRVTISVDTSRNQFSLKLSSVTAADTAVYYCTREDSSNWRSRGQGTLVTVSSGSGGGGSGGGGSGGGGSFEEVQLVQSGAEVKKPGESLKISCKGSGYSFTSYWIGWVRQMPGKGLEWMGIIYPGDSDTRYSPSFQGQVTISADKSISTAYLQWSSLKASDTAMYYCARDVGRWAPGGFLDYWGQGTLVTVSSTREDLKNVFPPEVAVFEPSEAEISHTQKATLVCLATGFYPDHVELSWWVNGKEVHSGVCTDPQPLKEQPALNDSRYCLSSRLRVSATFWQNPRNHFRCQVQFYGLSENDEWTQDRAKPVTQIVSAEAWGRADCGFTSESYQQGVLSATILYEILLGKATLYAVLVSALVLMAMVKRKDSRG

SEQ ID NO: 19196 - protein, 1096 aa, Artificial Sequence
  Synthetic Polypeptide
MALPVTALLLPLALLLHAARPEVQLVESGGGLVQPGGSLRLSCAASGFSFSDFWMSWVRQAPGKGLEWVATISQAGSEKDYVDSVKGRFTISRDNAKKSLYLQMNSLRAEDTAVYYCASGVYSFDYRGQGTLVTVSSGTGGGGSGGGGSGGGGSEFDIVMTQSPDSLAVSLGERATINCKSSQSVLYSSNNKNYLAWYQQKPGQPPKLLIYWASTRESGVPDRFSGSGSGTDFTLTISSLQAEDVAVYYCQQYYSTPLTFGQGTKVEIKLEDLKNVFPPEVAVFEPSEAEISHTQKATLVCLATGFYPDHVELSWWVNGKEVHSGVSTDPQPLKEQPALNDSRYCLSSRLRVSATFWQNPRNHFRCQVQFYGLSENDEWTQDRAKPVTQIVSAEAWGRADCGSQSFGLLDPKLCYLLDGILFIYGVILTALFLRVKFSRSADAPAYQQGQNQLYNELNLGRREEYDVLDKRRGRDPEMGGKPQRRKNPQEGLYNELQKDKMAEAYSEIGMKGERRRGKGHDGLYQGLSTATKDTYDALHMQALPPRRAKRSGSGATNFSLLKQAGDVEENPGPTSMDWIWRILFLVGAATGAHSGPQLQLQESGPGLVKPSETLSLTCTVSGDSISSGDYYWGWIRQPPGKGLEWIGHIYYSGVTYYNPSLKSRVTISVDTSRNQFSLKLSSVTAADTAVYYCTREDSSNWRSRGQGTLVTVSSGSGGGGSGGGGSGGGGSFEEVQLVQSGAEVKKPGESLKISCKGSGYSFTSYWIGWVRQMPGKGLEWMGIIYPGDSDTRYSPSFQGQVTISADKSISTAYLQWSSLKASDTAMYYCARDVGRWAPGGFLDYWGQGTLVTVSSTRIQNPDPAVYQLRDSKSSDKSVCLFTDFDSQTNVSQSKDSDVYITDKTVLDMRSMDFKSNSAVAWSNKSDFACANAFNNSIIPEDTFFPSPESSCGTQSFGLLDPKLCYLLDGILFIYGVILTALFLRVKFSRSADAPAYQQGQNQLYNELNLGRREEYDVLDKRRGRDPEMGGKPQRRKNPQEGLYNELQKDKMAEAYSEIGMKGERRRGKGHDGLYQGLSTATKDTYDALHMQALPPR

SEQ ID NO: 19197 - protein, 926 aa, Artificial Sequence
  Synthetic Polypeptide
MALPVTALLLPLALLLHAARPEVQLVESGGGLVQPGGSLRLSCAASGFSFSDFWMSWVRQAPGKGLEWVATISQAGSEKDYVDSVKGRFTISRDNAKKSLYLQMNSLRAEDTAVYYCASGVYSFDYRGQGTLVTVSSGTGGGGSGGGGSGGGGSEFDIVMTQSPDSLAVSLGERATINCKSSQSVLYSSNNKNYLAWYQQKPGQPPKLLIYWASTRESGVPDRFSGSGSGTDFTLTISSLQAEDVAVYYCQQYYSTPLTFGQGTKVEIKLEGQPKANPTVTLFPPSSEELQANKATLVCLISDFYPGAVTVAWKADGSPVKAGVETTKPSKQSNNKYAASSYLSLTPEQWKSHRSYSCQVTHEGSTVEKTVAPTECSPIKTDVITMDPKDNCSKDANDTLLLQLTNTSAYYMYLLLLLKSVVYFAIITCCLLRRTAFCCNGEKSRAKRSGSGATNFSLLKQAGDVEENPGPTSMDWIWRILFLVGAATGAHSGPQLQLQESGPGLVKPSETLSLTCTVSGDSISSGDYYWGWIRQPPGKGLEWIGHIYYSGVTYYNPSLKSRVTISVDTSRNQFSLKLSSVTAADTAVYYCTREDSSNWRSRGQGTLVTVSSGSGGGGSGGGGSGGGGSFEEVQLVQSGAEVKKPGESLKISCKGSGYSFTSYWIGWVRQMPGKGLEWMGIIYPGDSDTRYSPSFQGQVTISADKSISTAYLQWSSLKASDTAMYYCARDVGRWAPGGFLDYWGQGTLVTVSSTRASTKGPSVFPLAPSSKSTSGGTAALGCLVKDYFPEPVTVSWNSGALTSGVHTFPAVLQSSGLYSLSSVVTVPSSSLGTQTYICNVNHKPSNTKVDKRVEPKSCEVKTDSTDHVKPKETENTKQPSKSCHKPKAIVHTEKVNMMSLTVLGLRMLFAKTVAVNFLLTAKLFFL

SEQ ID NO: 19198 - protein, 907 aa, Artificial Sequence
  Synthetic Polypeptide
MALPVTALLLPLALLLHAARPEVQLVESGGGLVQPGGSLRLSCAASGFSFSDFWMSWVRQAPGKGLEWVATISQAGSEKDYVDSVKGRFTISRDNAKKSLYLQMNSLRAEDTAVYYCASGVYSFDYRGQGTLVTVSSGTGGGGSGGGGSGGGGSEFDIVMTQSPDSLAVSLGERATINCKSSQSVLYSSNNKNYLAWYQQKPGQPPKLLIYWASTRESGVPDRFSGSGSGTDFTLTISSLQAEDVAVYYCQQYYSTPLTFGQGTKVEIKLEGQPKANPTVTLFPPSSEELQANKATLVCLISDFYPGAVTVAWKADGSPVKAGVETTKPSKQSNNKYAASSYLSLTPEQWKSHRSYSCQVTHEGSTVEKTVAPTECSGRADCGFTSESYQQGVLSATILYEILLGKATLYAVLVSALVLMAMVKRKDSRGRAKRSGSGVKQTLNFDLLKLAGDVESNPGPTSMDWIWRILFLVGAATGAHSGPQLQLQESGPGLVKPSETLSLTCTVSGDSISSGDYYWGWIRQPPGKGLEWIGHIYYSGVTYYNPSLKSRVTISVDTSRNQFSLKLSSVTAADTAVYYCTREDSSNWRSRGQGTLVTVSSGSGGGGSGGGGSGGGGSFEEVQLVQSGAEVKKPGESLKISCKGSGYSFTSYWIGWVRQMPGKGLEWMGIIYPGDSDTRYSPSFQGQVTISADKSISTAYLQWSSLKASDTAMYYCARDVGRWAPGGFLDYWGQGTLVTVSSTRASTKGPSVFPLAPSSKSTSGGTAALGCLVKDYFPEPVTVSWNSGALTSGVHTFPAVLQSSGLYSLSSVVTVPSSSLGTQTYICNVNHKPSNTKVDKRVEPKSCIPEDTFFPSPESSCDVKLVEKSFETDTNLNFQNLSVIGFRILLLKVAGFNLLMTLRLWSS

SEQ ID NO: 19199 - protein, 764 aa, Artificial Sequence
  Synthetic Polypeptide
MALPVTALLLPLALLLHAARPEVQVLESGGGLVQPGGSLRLSCAASGFTFSNFAMSWVRQAPGKGLEWVSTISGSAGTTDYADSVKGRFTISRDNSKKTLYLQMNSLRVEDTAVYYCADGRGPFFDYRGQGTLVTVSSGTGGGGSGGGGSGGGGSEFDIVMTQSPDSLAVSLGERATINCKSSQSVLYSSNNKNYLAWYQQKPGQPPKLLIYWASTRESGVPDRFSGSGSGTDFTLTISSLQAEDVAVYYCQQYYSTPLTFGQGTKVEIKLEDLKNVFPPEVAVFEPSEAEISHTQKATLVCLATGFYPDHVELSWWVNGKEVHSGVCTDPQPLKEQPALNDSRYCLSSRLRVSATFWQNPRNHFRCQVQFYGLSENDEWTQDRAKPVTQIVSAEAWGRADCGFTSESYQQGVLSATILYEILLGKATLYAVLVSALVLMAMVKRKDSRGRAKRSGSGATNFSLLKQAGDVEENPGPTSMDWIWRILFLVGAATGAHSFEEVQLVQSGAEVKKPGESLKISCKGSGYSFTSYWIGWVRQMPGKGLEWMGIIYPGDSDTRYSPSFQGQVTISADKSISTAYLQWSSLKASDTAMYYCARDVGRWAPGGFLDYWGQGTLVTVSSTRIQNPDPAVYQLRDSKSSDKSVCLFTDFDSQTNVSQSKDSDVYITDKCVLDMRSMDFKSNSAVAWSNKSDFACANAFNNSIIPEDTFFPSPESSCDVKLVEKSFETDTNLNFQNLSVIGFRILLLKVAGFNLLMTLRLWSS

SEQ ID NO: 19200 - protein, 765 aa, Artificial Sequence
  Synthetic Polypeptide
MALPVTALLLPLALLLHAARPDIVMTQSPDSLAVSLGERATINCKSSQSVLYSSNNKNYLAWYQQKPGQPPKLLIYWASTRESGVPDRFSGSGSGTDFTLTISSLQAEDVAVYYCQQYYSTPLTFGQGTKVEIKLEDLKNVFPPEVAVFEPSEAEISHTQKATLVCLATGFYPDHVELSWWVNGKEVHSGVCTDPQPLKEQPALNDSRYCLSSRLRVSATFWQNPRNHFRCQVQFYGLSENDEWTQDRAKPVTQIVSAEAWGRADCGFTSESYQQGVLSATILYEILLGKATLYAVLVSALVLMAMVKRKDSRGRAKRSGSGATNFSLLKQAGDVEENPGPTSMDWIWRILFLVGAATGAHSGPEVQLVESGGGLVQAGGSLRLSCAASGRTFSMGWFRQAPGKEREFVAAITYSGGSPYYADSVKGRFTISRDNAKNTVYLQMNSLKPEDTAVYYCAANPTYGSDWNAENWGQGTQVTVSSGSGGGGSGGGGSGGGGSFEEVQLVQSGAEVKKPGESLKISCKGSGYSFTSYWIGWVRQMPGKGLEWMGIIYPGDSDTRYSPSFQGQVTISADKSISTAYLQWSSLKASDTAMYYCARDVGRWAPGGFLDYWGQGTLVTVSSTRIQNPDPAVYQLRDSKSSDKSVCLFTDFDSQTNVSQSKDSDVYITDKCVLDMRSMDFKSNSAVAWSNKSDFACANAFNNSIIPEDTFFPSPESSCDVKLVEKSFETDTNLNFQNLSVIGFRILLLKVAGFNLLMTLRLWSS

SEQ ID NO: 19201 - protein, 892 aa, Artificial Sequence
  Synthetic Polypeptide
MALPVTALLLPLALLLHAARPDIVMTQSPDSLAVSLGERATINCKSSQSVLYSSNNKNYLAWYQQKPGQPPKLLIYWASTRESGVPDRFSGSGSGTDFTLTISSLQAEDVAVYYCQQYYSTPLTFGQGTKVEIKLEDLKNVFPPEVAVFEPSEAEISHTQKATLVCLATGFYPDHVELSWWVNGKEVHSGVCTDPQPLKEQPALNDSRYCLSSRLRVSATFWQNPRNHFRCQVQFYGLSENDEWTQDRAKPVTQIVSAEAWGRADCGFTSESYQQGVLSATILYEILLGKATLYAVLVSALVLMAMVKRKDSRGRAKRSGSGATNFSLLKQAGDVEENPGPTSMDWIWRILFLVGAATGAHSQLQLQESGPGLVKPSETLSLTCTVSGGSISSGDYYWGWIRQPPGKGLEWIGSISYSGSTYYNPSLKSRVTISVDTSRNQFSLKLSSVTAADTAVYYCTREDSSNWRSRGQGTLVTVSSSGGGGSGGGGSEVQLVESGGGLVQAGGSLRLSCAASGRTFSMGWFRQAPGKEREFVAAITYSGGSPYYADSVKGRFTISRDNAKNTVYLQMNSLKPEDTAVYYCAANPTYGSDWNAENWGQGTQVTVSSGSGGGGSGGGGSGGGGSFEEVQLVQSGAEVKKPGESLKISCKGSGYSFTSYWIGWVRQMPGKGLEWMGIIYPGDSDTRYSPSFQGQVTISADKSISTAYLQWSSLKASDTAMYYCARDVGRWAPGGFLDYWGQGTLVTVSSTRIQNPDPAVYQLRDSKSSDKSVCLFTDFDSQTNVSQSKDSDVYITDKCVLDMRSMDFKSNSAVAWSNKSDFACANAFNNSIIPEDTFFPSPESSCDVKLVEKSFETDTNLNFQNLSVIGFRILLLKVAGFNLLMTLRLWSS

SEQ ID NO: 19202 - protein, 901 aa, Artificial Sequence
  Synthetic Polypeptide
MALPVTALLLPLALLLHAARPEVQVLESGGGLVQPGGSLRLSCAASGFTFSNFAMSWVRQAPGKGLEWVSTISGSAGTTDYADSVKGRFTISRDNSKKTLYLQMNSLRVEDTAVYYCADGRGPFFDYRGQGTLVTVSSGTGGGGSGGGGSGGGGSEFDIVMTQSPDSLAVSLGERATINCKSSQSVLYSSNNKNYLAWYQQKPGQPPKLLIYWASTRESGVPDRFSGSGSGTDFTLTISSLQAEDVAVYYCQQYYSTPLTFGQGTKVEIKLEDLKNVFPPEVAVFEPSEAEISHTQKATLVCLATGFYPDHVELSWWVNGKEVHSGVCTDPQPLKEQPALNDSRYCLSSRLRVSATFWQNPRNHFRCQVQFYGLSENDEWTQDRAKPVTQIVSAEAWGRADCGFTSESYQQGVLSATILYEILLGKATLYAVLVSALVLMAMVKRKDSRGRAKRSGSGATNFSLLKQAGDVEENPGPTSMDWIWRILFLVGAATGAHSGPEVQLVESGGGLVQAGGSLRLSCAASGRTFSMGWFRQAPGKEREFVAAITYSGGSPYYASSVRGRFTISRDNAKNTVYLQMNSLKPEDTAVYYCAANPTYGSDWNAENWGQGTQVTVSSGSGGGGSGGGGSGGGGSFEEVQLVQSGAEVKKPGESLKISCKGSGYSFTSYWIGWVRQMPGKGLEWMGIIYPGDSDTRYSPSFQGQVTISADKSISTAYLQWSSLKASDTAMYYCARDVGRWAPGGFLDYWGQGTLVTVSSTRIQNPDPAVYQLRDSKSSDKSVCLFTDFDSQTNVSQSKDSDVYITDKCVLDMRSMDFKSNSAVAWSNKSDFACANAFNNSIIPEDTFFPSPESSCDVKLVEKSFETDTNLNFQNLSVIGFRILLLKVAGFNLLMTLRLWSS

SEQ ID NO: 19203 - protein, 723 aa, Artificial Sequence
  Synthetic Polypeptide
MALPVTALLLPLALLLHAARPDIQMTQSPSSLSASVGDRVTITCRASQSINKWLNWYQQKPGKAPKLLIYAASSLQSGVPSRFSGSGSGTDFTLTISSLQPEDFATYYCQQDYNFPYTFGQGTKVEIKRGGGGSGGGGSGGGGSQVQLVQSGAEVKKPGSSVKVSCKASGGTFSSYGISWVRQAPGQGLEWMGWISAIFGTANYAQKFQGRVTITADESTSTAYMELSSLRSEDTAVYYCARGVASWYLDYWGQGTLVTVSSTREQKLISEEDLAKPTTTPAPRPPTPAPTIASQPLSLRPEACRPAAGGAVHTRGLDFACDIYIWAPLAGTCGVLLLSLVITLYCKRGRKKLLYIFKQPFMRPVQTTQEEDGCSCRFPEEEEGGCELRVKFSRSADAPAYQQGQNQLYNELNLGRREEYDVLDKRRGRDPEMGGKPRRKNPQEGLYNELQKDKMAEAYSEIGMKGERRRGKGHDGLYQGLSTATKDTYDALHMQALPPRSSGSGEGRGSLLTCGDVEENPGPHMTEYKPTVRLATRDDVPRAVRTLAAAFADYPATRHTVDPDRHIERVTELQELFLTRVGLDIGKVWVADDGAAVAVWTTPESVEAGAVFAEIGPRMAELSGSRLAAQQQMEGLLAPHRPKEPAWFLATVGVSPDHQGKGLGSAVVLPGVEAAERAGVPAFLETSAPRNLPFYERLGFTVTADVEVPEGPRTWCMTRKPGA

SEQ ID NO: 19204 - protein, 717 aa, Artificial Sequence
  Synthetic Polypeptide
MALPVTALLLPLALLLHAARPDIQMTQSPSSLSASVGDRVTITCRASQSINKWLNWYQQKPGKAPKLLIYAASSLQSGVPSRFSGSGSGTDFTLTISSLQPEDFATYYCQQDYNFPYTFGQGTKVEIKRGGGGSGGGGSGGGGSQVQLVQSGAEVKKPGSSVKVSCKASGGTFSSYGISWVRQAPGQGLEWMGWISAIFGTANYAQKFQGRVTITADESTSTAYMELSSLRSEDTAVYYCARGVASWYLDYWGQGTLVTVSSTREQKLISEEDLKIEVMYPPPYLDNEKSNGTIIHVKGKHLCPSPLFPGPSKPFWVLVVVGGVLACYSLLVTVAFIIFWVRSKRSRLLHSDYMNMTPRRPGPTRKHYQPYAPPRDFAAYRSRVKFSRSADAPAYQQGQNQLYNELNLGRREEYDVLDKRRGRDPEMGGKPRRKNPQEGLYNELQKDKMAEAYSEIGMKGERRRGKGHDGLYQGLSTATKDTYDALHMQALPPRSSGSGEGRGSLLTCGDVEENPGPHMTEYKPTVRLATRDDVPRAVRTLAAAFADYPATRHTVDPDRHIERVTELQELFLTRVGLDIGKVWVADDGAAVAVWTTPESVEAGAVFAEIGPRMAELSGSRLAAQQQMEGLLAPHRPKEPAWFLATVGVSPDHQGKGLGSAVVLPGVEAAERAGVPAFLETSAPRNLPFYERLGFTVTADVEVPEGPRTWCMTRKPGA

SEQ ID NO: 19205 - protein, 494 aa, Artificial Sequence
  Synthetic Polypeptide
MALPVTALLLPLALLLHAARPDIQMTQSPSSLSASVGDRVTITCRASQSINKWLNWYQQKPGKAPKLLIYAASSLQSGVPSRFSGSGSGTDFTLTISSLQPEDFATYYCQQDYNFPYTFGQGTKVEIKRGGGGSGGGGSGGGGSQVQLVQSGAEVKKPGSSVKVSCKASGGTFSSYGISWVRQAPGQGLEWMGWISAIFGTANYAQKFQGRVTITADESTSTAYMELSSLRSEDTAVYYCARGVASWYLDYWGQGTLVTVSSTREQKLISEEDLKIEVMYPPPYLDNEKSNGTIIHVKGKHLCPSPLFPGPSKPFWVLVVVGGVLACYSLLVTVAFIIFWVRSKRSRLLHSDYMNMTPRRPGPTRKHYQPYAPPRDFAAYRSRVKFSRSADAPAYQQGQNQLYNELNLGRREEYDVLDKRRGRDPEMGGKPRRKNPQEGLYNELQKDKMAEAYSEIGMKGERRRGKGHDGLYQGLSTATKDTYDALHMQALPPR

SEQ ID NO: 19206 - protein, 500 aa, Artificial Sequence
  Synthetic Polypeptide
MALPVTALLLPLALLLHAARPDIQMTQSPSSLSASVGDRVTITCRASQSINKWLNWYQQKPGKAPKLLIYAASSLQSGVPSRFSGSGSGTDFTLTISSLQPEDFATYYCQQDYNFPYTFGQGTKVEIKRGGGGSGGGGSGGGGSQVQLVQSGAEVKKPGSSVKVSCKASGGTFSSYGISWVRQAPGQGLEWMGWISAIFGTANYAQKFQGRVTITADESTSTAYMELSSLRSEDTAVYYCARGVASWYLDYWGQGTLVTVSSTREQKLISEEDLAKPTTTPAPRPPTPAPTIASQPLSLRPEACRPAAGGAVHTRGLDFACDIYIWAPLAGTCGVLLLSLVITLYCKRGRKKLLYIFKQPFMRPVQTTQEEDGCSCRFPEEEEGGCELRVKFSRSADAPAYQQGQNQLYNELNLGRREEYDVLDKRRGRDPEMGGKPRRKNPQEGLYNELQKDKMAEAYSEIGMKGERRRGKGHDGLYQGLSTATKDTYDALHMQALPPR

SEQ ID NO: 19207 - protein, 500 aa, Artificial Sequence
  Synthetic Polypeptide
MALPVTALLLPLALLLHAARPQVQLVQSGAEVKKPGSSVKVSCKASGGTFSSYGISWVRQAPGQGLEWMGWISAIFGTANYAQKFQGRVTITADESTSTAYMELSSLRSEDTAVYYCARGVASWYLDYWGQGTLVTVSSGGGGSGGGGSGGGGSDIQMTQSPSSLSASVGDRVTITCRASQSINKWLNWYQQKPGKAPKLLIYAASSLQSGVPSRFSGSGSGTDFTLTISSLQPEDFATYYCQQDYNFPYTFGQGTKVEIKRTREQKLISEEDLAKPTTTPAPRPPTPAPTIASQPLSLRPEACRPAAGGAVHTRGLDFACDIYIWAPLAGTCGVLLLSLVITLYCKRGRKKLLYIFKQPFMRPVQTTQEEDGCSCRFPEEEEGGCELRVKFSRSADAPAYQQGQNQLYNELNLGRREEYDVLDKRRGRDPEMGGKPRRKNPQEGLYNELQKDKMAEAYSEIGMKGERRRGKGHDGLYQGLSTATKDTYDALHMQALPPR

SEQ ID NO: 19208 - protein, 913 aa, Artificial Sequence
  Synthetic Polypeptide
MALPVTALLLPLALLLHAARPDIQMTQSPSSLSASVGDRVTITCRASQSINKWLNWYQQKPGKAPKLLIYAASSLQSGVPSRFSGSGSGTDFTLTISSLQPEDFATYYCQQDYNFPYTFGQGTKVEIKRGGGGSGGGGSGGGGSQVQLVQSGAEVKKPGSSVKVSCKASGGTFSSYGISWVRQAPGQGLEWMGWISAIFGTANYAQKFQGRVTITADESTSTAYMELSSLRSEDTAVYYCARGVASWYLDYWGQGTLVTVSSTREQKLISEEDLAKPTTTPAPRPPTPAPTIASQPLSLRPEACRPAAGGAVHTRGLDFACDIYIWAPLAGTCGVLLLSLVITLYCGRARVKFSRSADAPAYQQGQNQLYNELNLGRREEYDVLDKRRGRDPEMGGKPRRKNPQEGLYNELQKDKMAEAYSEIGMKGERRRGKGHDGLYQGLSTATKDTYDALHMQALPPRSRGSGATNFSLLKQAGDVEENPGPGIHMATYEVLCEVARKLGTDDREVVLFLLNVFIPQPTLAQLIGALRALKEEGRLTFPLLAECLFRAGRRDLLRDLLHLDPRFLERHLAGTMSYFSPYQLTVLHVDGELCARDIRSLIFLSKDTIGSRSTPQTFLHWVYCMENLDLLGPTDVDALMSMLRSLSRVDLQRQVQTLMGLHLSGPSHSQHYRHTPLETDFYDYKDDDDKTSGSGEGRGSLLTCGDVEENPGPHMTEYKPTVRLATRDDVPRAVRTLAAAFADYPATRHTVDPDRHIERVTELQELFLTRVGLDIGKVWVADDGAAVAVWTTPESVEAGAVFAEIGPRMAELSGSRLAAQQQMEGLLAPHRPKEPAWFLATVGVSPDHQGKGLGSAVVLPGVEAAERAGVPAFLETSAPRNLPFYERLGFTVTADVEVPEGPRTWCMTRKPGA

SEQ ID NO: 19209 - protein, 853 aa, Artificial Sequence
  Synthetic Polypeptide
MALPVTALLLPLALLLHAARPDIQMTQSPSSLSASVGDRVTITCRASQSINKWLNWYQQKPGKAPKLLIYAASSLQSGVPSRFSGSGSGTDFTLTISSLQPEDFATYYCQQDYNFPYTFGQGTKVEIKRLEIQNPDPAVYQLRDSKSSDKSVCLFTDFDSQTNVSQSKDSDVYITDKCVLDMRSMDFKSNSAVAWSNKSDFACANAFNNSIIPEDTFFPSSDVPCDVKLVEKSFETDTNLNFQNLSVIGFRILLLKVAGFNLLMTLRLWSSRAKRSGSGVKQTLNFDLLKLAGDVESNPGPTSMDWIWRILFLVGAATGAHSFEQVQLVQSGAEVKKPGSSVKVSCKASGGTFSSYGISWVRQAPGQGLEWMGWISAIFGTANYAQKFQGRVTITADESTSTAYMELSSLRSEDTAVYYCARGVASWYLDYWGQGTLVTVSSTREDLKNVFPPEVAVFEPSKAEIAHTQKATLVCLATGFYPDHVELSWWVNGKEVHSGVCTDPQPLKEQPALNDSRYCLSSRLRVSATFWQNPRNHFRCQVQFYGLSENDEWTQDRAKPVTQIVSAEAWGRADCGITSASYHQGVLSATILYEILLGKATLYAVLVSALVLMAMVKRKDSRGRAKRSGSGATNFSLLKQAGDVEENPGPSRGHMTEYKPTVRLATRDDVPRAVRTLAAAFADYPATRHTVDPDRHIERVTELQELFLTRVGLDIGKVWVADDGAAVAVWTTPESVEAGAVFAEIGPRMAELSGSRLAAQQQMEGLLAPHRPKEPAWFLATVGVSPDHQGKGLGSAVVLPGVEAAERAGVPAFLETSAPRNLPFYERLGFTVTADVEVPEGPRTWCMTRKPGA

SEQ ID NO: 19210 - protein, 852 aa, Artificial Sequence
  Synthetic Polypeptide
MALPVTALLLPLALLLHAARPDIQMTQSPSSLSASVGDRVTITCRASQSINKWLNWYQQKPGKAPKLLIYAASSLQSGVPSRFSGSGSGTDFTLTISSLQPEDFATYYCQQDYNFPYTFGQGTKVEIKRLEDLKNVFPPEVAVFEPSKAEIAHTQKATLVCLATGFYPDHVELSWWVNGKEVHSGVCTDPQPLKEQPALNDSRYCLSSRLRVSATFWQNPRNHFRCQVQFYGLSENDEWTQDRAKPVTQIVSAEAWGRADCGITSASYHQGVLSATILYEILLGKATLYAVLVSALVLMAMVKRKDSRGRAKRSGSGATNFSLLKQAGDVEENPGPTSMDWIWRILFLVGAATGAHSFEQVQLVQSGAEVKKPGSSVKVSCKASGGTFSSYGISWVRQAPGQGLEWMGWISAIFGTANYAQKFQGRVTITADESTSTAYMELSSLRSEDTAVYYCARGVASWYLDYWGQGTLVTVSSTRIQNPDPAVYQLRDSKSSDKSVCLFTDFDSQTNVSQSKDSDVYITDKCVLDMRSMDFKSNSAVAWSNKSDFACANAFNNSIIPEDTFFPSSDVPCDVKLVEKSFETDTNLNFQNLSVIGFRILLLKVAGFNLLMTLRLWSSRAKRSGSGVKQTLNFDLLKLAGDVESNPGPSRGHMTEYKPTVRLATRDDVPRAVRTLAAAFADYPATRHTVDPDRHIERVTELQELFLTRVGLDIGKVWVADDGAAVAVWTTPESVEAGAVFAEIGPRMAELSGSRLAAQQQMEGLLAPHRPKEPAWFLATVGVSPDHQGKGLGSAVVLPGVEAAERAGVPAFLETSAPRNLPFYERLGFTVTADVEVPEGPRTWCMTRKPGA

SEQ ID NO: 19211 - protein, 619 aa, Artificial Sequence
  Synthetic Polypeptide
MALPVTALLLPLALLLHAARPDIQMTQSPSSLSASVGDRVTITCRASQSINKWLNWYQQKPGKAPKLLIYAASSLQSGVPSRFSGSGSGTDFTLTISSLQPEDFATYYCQQDYNFPYTFGQGTKVEIKRLEDLKNVFPPEVAVFEPSEAEISHTQKATLVCLATGFYPDHVELSWWVNGKEVHSGVCTDPQPLKEQPALNDSRYCLSSRLRVSATFWQNPRNHFRCQVQFYGLSENDEWTQDRAKPVTQIVSAEAWGRADCGFTSESYQQGVLSATILYEILLGKATLYAVLVSALVLMAMVKRKDSRGRAKRSGSGATNFSLLKQAGDVEENPGPTSMDWIWRILFLVGAATGAHSFEQVQLVQSGAEVKKPGSSVKVSCKASGGTFSSYGISWVRQAPGQGLEWMGWISAIFGTANYAQKFQGRVTITADESTSTAYMELSSLRSEDTAVYYCARGVASWYLDYWGQGTLVTVSSTRIQNPDPAVYQLRDSKSSDKSVCLFTDFDSQTNVSQSKDSDVYITDKCVLDMRSMDFKSNSAVAWSNKSDFACANAFNNSIIPEDTFFPSPESSCDVKLVEKSFETDTNLNFQNLSVIGFRILLLKVAGFNLLMTLRLWSS

SEQ ID NO: 19212 - protein, 844 aa, Artificial Sequence
  Synthetic Polypeptide
MALPVTALLLPLALLLHAARPDIQMTQSPSSLSASVGDRVTITCRASQSINKWLNWYQQKPGKAPKLLIYAASSLQSGVPSRFSGSGSGTDFTLTISSLQPEDFATYYCQQDYNFPYTFGQGTKVEIKRLEDLKNVFPPEVAVFEPSEAEISHTQKATLVCLATGFYPDHVELSWWVNGKEVHSGVCTDPQPLKEQPALNDSRYCLSSRLRVSATFWQNPRNHFRCQVQFYGLSENDEWTQDRAKPVTQIVSAEAWGRADCGFTSESYQQGVLSATILYEILLGKATLYAVLVSALVLMAMVKRKDSRGRAKRSGSGATNFSLLKQAGDVEENPGPTSMDWIWRILFLVGAATGAHSFEQVQLVQSGAEVKKPGSSVKVSCKASGGTFSSYGISWVRQAPGQGLEWMGWISAIFGTANYAQKFQGRVTITADESTSTAYMELSSLRSEDTAVYYCARGVASWYLDYWGQGTLVTVSSTRIQNPDPAVYQLRDSKSSDKSVCLFTDFDSQTNVSQSKDSDVYITDKCVLDMRSMDFKSNSAVAWSNKSDFACANAFNNSIIPEDTFFPSPESSCDVKLVEKSFETDTNLNFQNLSVIGFRILLLKVAGFNLLMTLRLWSSRAKRSGSGVKQTLNFDLLKLAGDVESNPGPSRGGIHTMATYEVLCEVARKLGTDDREVVLFLLNVFIPQPTLAQLIGALRALKEEGRLTFPLLAECLFRAGRRDLLRDLLHLDPRFLERHLAGTMSYFSPYQLTVLHVDGELCARDIRSLIFLSKDTIGSRSTPQTFLHWVYCMENLDLLGPTDVDALMSMLRSLSRVDLQRQVQTLMGLHLSGPSHSQHYRHTP

SEQ ID NO: 19213 - protein, 623 aa, Artificial Sequence
  Synthetic Polypeptide
MALPVTALLLPLALLLHAARPDIQMTQSPSSLSASVGDRVTITCRASQSINKWLNWYQQKPGKAPKLLIYAASSLQSGVPSRFSGSGSGTDFTLTISSLQPEDFATYYCQQDYNFPYTFGQGTKVEIKRLEIQNPDPAVYQLRDSKSSDKSVCLFTDFDSQTNVSQSKDSDVYITDKCVLDMRSMDFKSNSAVAWSNKSDFACANAFNNSIIPEDTFFPSPESSCDVKLVEKSFETDTNLNFQNLSVIGFRILLLKVAGFNLLMTLRLWSSRAKRSGSGVKQTLNFDLLKLAGDVESNPGPTSMDWIWRILFLVGAATGAHSFEQVQLVQSGAEVKKPGSSVKVSCKASGGTFSSYGISWVRQAPGQGLEWMGWISAIFGTANYAQKFQGRVTITADESTSTAYMELSSLRSEDTAVYYCARGVASWYLDYWGQGTLVTVSSTREDLKNVFPPEVAVFEPSEAEISHTQKATLVCLATGFYPDHVELSWWVNGKEVHSGVCTDPQPLKEQPALNDSRYCLSSRLRVSATFWQNPRNHFRCQVQFYGLSENDEWTQDRAKPVTQIVSAEAWGRADCGFTSESYQQGVLSATILYEILLGKATLYAVLVSALVLMAMVKRKDSRG

SEQ ID NO: 19214 - protein, 845 aa, Artificial Sequence
  Synthetic Polypeptide
MALPVTALLLPLALLLHAARPDIQMTQSPSSLSASVGDRVTITCRASQSINKWLNWYQQKPGKAPKLLIYAASSLQSGVPSRFSGSGSGTDFTLTISSLQPEDFATYYCQQDYNFPYTFGQGTKVEIKRLEIQNPDPAVYQLRDSKSSDKSVCLFTDFDSQTNVSQSKDSDVYITDKCVLDMRSMDFKSNSAVAWSNKSDFACANAFNNSIIPEDTFFPSPESSCDVKLVEKSFETDTNLNFQNLSVIGFRILLLKVAGFNLLMTLRLWSSRAKRSGSGVKQTLNFDLLKLAGDVESNPGPTSMDWIWRILFLVGAATGAHSFEQVQLVQSGAEVKKPGSSVKVSCKASGGTFSSYGISWVRQAPGQGLEWMGWISAIFGTANYAQKFQGRVTITADESTSTAYMELSSLRSEDTAVYYCARGVASWYLDYWGQGTLVTVSSTREDLKNVFPPEVAVFEPSEAEISHTQKATLVCLATGFYPDHVELSWWVNGKEVHSGVCTDPQPLKEQPALNDSRYCLSSRLRVSATFWQNPRNHFRCQVQFYGLSENDEWTQDRAKPVTQIVSAEAWGRADCGFTSESYQQGVLSATILYEILLGKATLYAVLVSALVLMAMVKRKDSRGRAKRSGSGATNFSLLKQAGDVEENPGPSRGGIHTMATYEVLCEVARKLGTDDREVVLFLLNVFIPQPTLAQLIGALRALKEEGRLTFPLLAECLFRAGRRDLLRDLLHLDPRFLERHLAGTMSYFSPYQLTVLHVDGELCARDIRSLIFLSKDTIGSRSTPQTFLHWVYCMENLDLLGPTDVDALMSMLRSLSRVDLQRQVQTLMGLHLSGPSHSQHYRHTP

SEQ ID NO: 19215 - protein, 897 aa, Artificial Sequence
  Synthetic Polypeptide
MALPVTALLLPLALLLHAARPLEGKPIPNPLLGLDSTGSGEDLKNVFPPEVAVFEPSKAEIAHTQKATLVCLATGFYPDHVELSWWVNGKEVHSGVCTDPQPLKEQPALNDSRYCLSSRLRVSATFWQNPRNHFRCQVQFYGLSENDEWTQDRAKPVTQIVSAEAWGRADCGITSASYHQGVLSATILYEILLGKATLYAVLVSALVLMAMVKRKDSRGRAKRSGSGATNFSLLKQAGDVEENPGPTSMALPVTALLLPLALLLHAARPDIQMTQSPSSLSASVGDRVTITCRASQSINKWLNWYQQKPGKAPKLLIYAASSLQSGVPSRFSGSGSGTDFTLTISSLQPEDFATYYCQQDYNFPYTFGQGTKVEIKRGGGGSGGGGSGGGGSQVQLVQSGAEVKKPGSSVKVSCKASGGTFSSYGISWVRQAPGQGLEWMGWISAIFGTANYAQKFQGRVTITADESTSTAYMELSSLRSEDTAVYYCARGVASWYLDYWGQGTLVTVSSTREQKLISEEDGSGIQNPDPAVYQLRDSKSSDKSVCLFTDFDSQTNVSQSKDSDVYITDKCVLDMRSMDFKSNSAVAWSNKSDFACANAFNNSIIPEDTFFPSSDVPCDVKLVEKSFETDTNLNFQNLSVIGFRILLLKVAGFNLLMTLRLWSSRAKRSGSGVKQTLNFDLLKLAGDVESNPGPSRGHMTEYKPTVRLATRDDVPRAVRTLAAAFADYPATRHTVDPDRHIERVTELQELFLTRVGLDIGKVWVADDGAAVAVWTTPESVEAGAVFAEIGPRMAELSGSRLAAQQQMEGLLAPHRPKEPAWFLATVGVSPDHQGKGLGSAVVLPGVEAAERAGVPAFLETSAPRNLPFYERLGFTVTADVEVPEGPRTWCMTRKPGA

SEQ ID NO: 19216 - protein, 898 aa, Artificial Sequence
  Synthetic Polypeptide
MALPVTALLLPLALLLHAARPLEQKLISEEDLGSGDRPDPAVYQLRDSKSSDKSVCLFTDFDSQTNVSQSKDSDVYITDKCVLDMRSMDFKSNSAVAWSNKSDFACANAFNNSIIPEDTFFPSPESSCDVKLVEKSFETDTNLNFQNLSVIGFRILLLKVAGFNLLMTLRLWSSSSRAKRSGSGVKQTLNFDLLKLAGDVESNPGPTSMALPVTALLLPLALLLHAARPDIQMTQSPSSLSASVGDRVTITCRASQSINKWLNWYQQKPGKAPKLLIYAASSLQSGVPSRFSGSGSGTDFTLTISSLQPEDFATYYCQQDYNFPYTFGQGTKVEIKRGGGGSGGGGSGGGGSQVQLVQSGAEVKKPGSSVKVSCKASGGTFSSYGISWVRQAPGQGLEWMGWISAIFGTANYAQKFQGRVTITADESTSTAYMELSSLRSEDTAVYYCARGVASWYLDYWGQGTLVTVSSTRGKPIPNPLLGLDSTGSGEDLKNVFPPEVAVFEPSEAEISHTQKATLVCLATGFYPDHVELSWWVNGKEVHSGVCTDPQPLKEQPALNDSRYCLSSRLRVSATFWQNPRNHFRCQVQFYGLSENDEWTQDRAKPVTQIVSAEAWGRADCGFTSESYQQGVLSATILYEILLGKATLYAVLVSALVLMAMVKRKDSRGRAKRSGSGATNFSLLKQAGDVEENPGPSRGHMTEYKPTVRLATRDDVPRAVRTLAAAFADYPATRHTVDPDRHIERVTELQELFLTRVGLDIGKVWVADDGAAVAVWTTPESVEAGAVFAEIGPRMAELSGSRLAAQQQMEGLLAPHRPKEPAWFLATVGVSPDHQGKGLGSAVVLPGVEAAERAGVPAFLETSAPRNLPFYERLGFTVTADVEVPEGPRTWCMTRKPGA

SEQ ID NO: 19217 - protein, 852 aa, Artificial Sequence
  Synthetic Polypeptide
MALPVTALLLPLALLLHAARPDIQMTQSPSSLSASVGDRVTITCRASQSINKWLNWYQQKPGKAPKLLIYAASSLQSGVPSRFSGSGSGTDFTLTISSLQPEDFATYYCQQDYNFPYTFGQGTKVEIKRLEDLKNVFPPEVAVFEPSEAEISHTQKATLVCLATGFYPDHVELSWWVNGKEVHSGVSTDPQPLKEQPALNDSRYCLSSRLRVSATFWQNPRNHFRCQVQFYGLSENDEWTQDRAKPVTQIVSAEAWGRADCGFTSESYQQGVLSATILYEILLGKATLYAVLVSALVLMAMVKRKDSRGRAKRSGSGATNFSLLKQAGDVEENPGPTSMDWIWRILFLVGAATGAHSFEQVQLVQSGAEVKKPGSSVKVSCKASGGTFSSYGISWVRQAPGQGLEWMGWISAIFGTANYAQKFQGRVTITADESTSTAYMELSSLRSEDTAVYYCARGVASWYLDYWGQGTLVTVSSTRIQNPDPAVYQLRDSKSSDKSVCLFTDFDSQTNVSQSKDSDVYITDKTVLDMRSMDFKSNSAVAWSNKSDFACANAFNNSIIPEDTFFPSPESSCDVKLVEKSFETDTNLNFQNLSVIGFRILLLKVAGFNLLMTLRLWSSRAKRSGSGVKQTLNFDLLKLAGDVESNPGPSRGHMTEYKPTVRLATRDDVPRAVRTLAAAFADYPATRHTVDPDRHIERVTELQELFLTRVGLDIGKVWVADDGAAVAVWTTPESVEAGAVFAEIGPRMAELSGSRLAAQQQMEGLLAPHRPKEPAWFLATVGVSPDHQGKGLGSAVVLPGVEAAERAGVPAFLETSAPRNLPFYERLGFTVTADVEVPEGPRTWCMTRKPGA

SEQ ID NO: 19218 - protein, 934 aa, Artificial Sequence
  Synthetic Polypeptide
MALPVTALLLPLALLLHAARPDIQMTQSPSSLSASVGDRVTITCRASQSINKWLNWYQQKPGKAPKLLIYAASSLQSGVPSRFSGSGSGTDFTLTISSLQPEDFATYYCQQDYNFPYTFGQGTKVEIKRLEDLKNVFPPEVAVFEPSEAEISHTQKATLVCLATGFYPDHVELSWWVNGKEVHSGVSTDPQPLKEQPALNDSRYCLSSRLRVSATFWQNPRNHFRCQVQFYGLSENDEWTQDRAKPVTQIVSAEAWGRADCGFTSESYQQGVLSATILYEILLGKATLYAVLVSALVLMAMVKRKDSRGRAKRSGSGATNFSLLKQAGDVEENPGPTSMDWIWRILFLVGAATGAHSFEQVQLVQSGAEVKKPGSSVKVSCKASGGTFSSYGISWVRQAPGQGLEWMGWISAIFGTANYAQKFQGRVTITADESTSTAYMELSSLRSEDTAVYYCARGVASWYLDYWGQGTLVTVSSTREQKLISEEDGSGTPFPSLAPPIMLLVDGKQQMVVVCLVLDVAPPGLDSPIWFSAGNGSALDAFTYGPSPATDGTWTNLAHLSLPSEELASWEPLVCHTGPGAEGHSRSTQPMHLSGEASTARTCPQEPLRGTPGGALWLGVLRLLLFKLLLFDLLLTCSCLCDPAGPLPSPATTTRLRALGSHRLHPATETGGREATSSPRPQPRDRRWGDTPPGRKPGSPVRAKRSGSGVKQTLNFDLLKLAGDVESNPGPSRGHMTEYKPTVRLATRDDVPRAVRTLAAAFADYPATRHTVDPDRHIERVTELQELFLTRVGLDIGKVWVADDGAAVAVWTTPESVEAGAVFAEIGPRMAELSGSRLAAQQQMEGLLAPHRPKEPAWFLATVGVSPDHQGKGLGSAVVLPGVEAAERAGVPAFLETSAPRNLPFYERLGFTVTADVEVPEGPRTWCMTRKPGA

SEQ ID NO: 19219 - protein, 952 aa, Artificial Sequence
  Synthetic Polypeptide
MALPVTALLLPLALLLHAARPLEDLKNVFPPEVAVFEPSEAEISHTQKATLVCLATGFYPDHVELSWWVNGKEVHSGVSTDPQPLKEQPALNDSRYCLSSRLRVSATFWQNPRNHFRCQVQFYGLSENDEWTQDRAKPVTQIVSAEAWGRADCGFTSESYQQGVLSATILYEILLGKATLYAVLVSALVLMAMVKRKDSRGRAKRSGSGATNFSLLKQAGDVEENPGPTSMALPVTALLLPLALLLHAARPDIQMTQSPSSLSASVGDRVTITCRASQSINKWLNWYQQKPGKAPKLLIYAASSLQSGVPSRFSGSGSGTDFTLTISSLQPEDFATYYCQQDYNFPYTFGQGTKVEIKRGGGGSGGGGSGGGGSQVQLVQSGAEVKKPGSSVKVSCKASGGTFSSYGISWVRQAPGQGLEWMGWISAIFGTANYAQKFQGRVTITADESTSTAYMELSSLRSEDTAVYYCARGVASWYLDYWGQGTLVTVSSTREQKLISEEDLGSGTPFPSLAPPIMLLVDGKQQMVVVCLVLDVAPPGLDSPIWFSAGNGSALDAFTYGPSPATDGTWTNLAHLSLPSEELASWEPLVCHTGPGAEGHSRSTQPMHLSGEASTARTCPQEPLRGTPGGALWLGVLRLLLFKLLLFDLLLTCSCLCDPAGPLPSPATTTRLRALGSHRLHPATETGGREATSSPRPQPRDRRWGDTPPGRKPGSPVRAKRSGSGVKQTLNFDLLKLAGDVESNPGPSRSRGHMTEYKPTVRLATRDDVPRAVRTLAAAFADYPATRHTVDPDRHIERVTELQELFLTRVGLDIGKVWVADDGAAVAVWTTPESVEAGAVFAEIGPRMAELSGSRLAAQQQMEGLLAPHRPKEPAWFLATVGVSPDHQGKGLGSAVVLPGVEAAERAGVPAFLETSAPRNLPFYERLGFTVTADVEVPEGPRTWCMTRKPGA

SEQ ID NO: 19220 - protein, 889 aa, Artificial Sequence
  Synthetic Polypeptide
MALPVTALLLPLALLLHAARPDIQMTQSPSSLSASVGDRVTITCRASQSINKWLNWYQQKPGKAPKLLIYAASSLQSGVPSRFSGSGSGTDFTLTISSLQPEDFATYYCQQDYNFPYTFGQGTKVEIKRLEGKPIPNPLLGLDSTGSGDKQLDADVSPKPTIFLPSIAETKLQKAGTYLCLLEKFFPDVIKIHWQEKKSNTILGSQEGNTMKTNDTYMKFSWLTVPEKSLDKEHRCIVRHENNKNGVDQEIIFPPIKTDVITMDPKDNCSKDANDTLLLQLTNTSAYYMYLLLLLKSVVYFAIITCCLLRRTAFCCNGEKSRAKRSGSGATNFSLLKQAGDVEENPGPTSMDWIWRILFLVGAATGAHSFEQVQLVQSGAEVKKPGSSVKVSCKASGGTFSSYGISWVRQAPGQGLEWMGWISAIFGTANYAQKFQGRVTITADESTSTAYMELSSLRSEDTAVYYCARGVASWYLDYWGQGTLVTVSSTREQKLISEEDGSGSQPHTKPSVFVMKNGTNVACLVKEFYPKDIRINLVSSKKITEFDPAIVISPSGKYNAVKLGKYEDSNSVTCSVQHDNKTVHSTDFEVKTDSTDHVKPKETENTKQPSKSCHKPKAIVHTEKVNMMSLTVLGLRMLFAKTVAVNFLLTAKLFFLRAKRSGSGVKQTLNFDLLKLAGDVESNPGPSRGHMTEYKPTVRLATRDDVPRAVRTLAAAFADYPATRHTVDPDRHIERVTELQELFLTRVGLDIGKVWVADDGAAVAVWTTPESVEAGAVFAEIGPRMAELSGSRLAAQQQMEGLLAPHRPKEPAWFLATVGVSPDHQGKGLGSAVVLPGVEAAERAGVPAFLETSAPRNLPFYERLGFTVTADVEVPEGPRTWCMTRKPGA

SEQ ID NO: 19221 - protein, 627 aa, Artificial Sequence
  Synthetic Polypeptide
MALPVTALLLPLALLLHAARPDIQMTQSPSSLSASVGDRVTITCRASQSINKWLNWYQQKPGKAPKLLIYAASSLQSGVPSRFSGSGSGTDFTLTISSLQPEDFATYYCQQDYNFPYTFGQGTKVEIKRLESQPHTKPSVFVMKNGTNVACLVKEFYPKDIRINLVSSKKITEFDPAIVISPSGKYNAVKLGKYEDSNSVTCSVQHDNKTVHSTDFEVKTDSTDHVKPKETENTKQPSKSCHKPKAIVHTEKVNMMSLTVLGLRMLFAKTVAVNFLLTAKLFFLRAKRSGSGATNFSLLKQAGDVEENPGPTSMDWIWRILFLVGAATGAHSFEQVQLVQSGAEVKKPGSSVKVSCKASGGTFSSYGISWVRQAPGQGLEWMGWISAIFGTANYAQKFQGRVTITADESTSTAYMELSSLRSEDTAVYYCARGVASWYLDYWGQGTLVTVSSTRDKQLDADVSPKPTIFLPSIAETKLQKAGTYLCLLEKFFPDVIKIHWQEKKSNTILGSQEGNTMKTNDTYMKFSWLTVPEKSLDKEHRCIVRHENNKNGVDQEIIFPPIKTDVITMDPKDNCSKDANDTLLLQLTNTSAYYMYLLLLLKSVVYFAIITCCLLRRTAFCCNGEKS

SEQ ID NO: 19222 - protein, 904 aa, Artificial Sequence
  Synthetic Polypeptide
MALPVTALLLPLALLLHAARPLEGKPIPNPLLGLDSTGSGDKQLDADVSPKPTIFLPSIAETKLQKAGTYLCLLEKFFPDVIKIHWQEKKSNTILGSQEGNTMKTNDTYMKFSWLTVPEKSLDKEHRCIVRHENNKNGVDQEIIFPPIKTDVITMDPKDNCSKDANDTLLLQLTNTSAYYMYLLLLLKSVVYFAIITCCLLRRTAFCCNGEKSRAKRSGSGATNFSLLKQAGDVEENPGPTSMALPVTALLLPLALLLHAARPDIQMTQSPSSLSASVGDRVTITCRASQSINKWLNWYQQKPGKAPKLLIYAASSLQSGVPSRFSGSGSGTDFTLTISSLQPEDFATYYCQQDYNFPYTFGQGTKVEIKRGGGGSGGGGSGGGGSQVQLVQSGAEVKKPGSSVKVSCKASGGTFSSYGISWVRQAPGQGLEWMGWISAIFGTANYAQKFQGRVTITADESTSTAYMELSSLRSEDTAVYYCARGVASWYLDYWGQGTLVTVSSTREQKLISEEDGSGSQPHTKPSVFVMKNGTNVACLVKEFYPKDIRINLVSSKKITEFDPAIVISPSGKYNAVKLGKYEDSNSVTCSVQHDNKTVHSTDFEVKTDSTDHVKPKETENTKQPSKSCHKPKAIVHTEKVNMMSLTVLGLRMLFAKTVAVNFLLTAKLFFLRAKRSGSGVKQTLNFDLLKLAGDVESNPGPSRGHMTEYKPTVRLATRDDVPRAVRTLAAAFADYPATRHTVDPDRHIERVTELQELFLTRVGLDIGKVWVADDGAAVAVWTTPESVEAGAVFAEIGPRMAELSGSRLAAQQQMEGLLAPHRPKEPAWFLATVGVSPDHQGKGLGSAVVLPGVEAAERAGVPAFLETSAPRNLPFYERLGFTVTADVEVPEGPRTWCMTRKPGA

SEQ ID NO: 19223 - protein, 1029 aa, Artificial Sequence
  Synthetic Polypeptide
MALPVTALLLPLALLLHAARPDIQMTQSPSSLSASVGDRVTITCRASQSINKWLNWYQQKPGKAPKLLIYAASSLQSGVPSRFSGSGSGTDFTLTISSLQPEDFATYYCQQDYNFPYTFGQGTKVEIKRGQPKANPTVTLFPPSSEELQANKATLVCLISDFYPGAVTVAWKADGSPVKAGVETTKPSKQSNNKYAASSYLSLTPEQWKSHRSYSCQVTHEGSTVEKTVAPTECSGSQSFGLLDPKLCYLLDGILFIYGVILTALFLRVKFSRSADAPAYQQGQNQLYNELNLGRREEYDVLDKRRGRDPEMGGKPQRRKNPQEGLYNELQKDKMAEAYSEIGMKGERRRGKGHDGLYQGLSTATKDTYDALHMQALPPRRAKRSGSGATNFSLLKQAGDVEENPGPTSMDWIWRILFLVGAATGAHSFEQVQLVQSGAEVKKPGSSVKVSCKASGGTFSSYGISWVRQAPGQGLEWMGWISAIFGTANYAQKFQGRVTITADESTSTAYMELSSLRSEDTAVYYCARGVASWYLDYWGQGTLVTVSSASTKGPSVFPLAPSSKSTSGGTAALGCLVKDYFPEPVTVSWNSGALTSGVHTFPAVLQSSGLYSLSSVVTVPSSSLGTQTYICNVNHKPSNTKVDKRVEPKSCGTQSFGLLDPKLCYLLDGILFIYGVILTALFLRVKFSRSADAPAYQQGQNQLYNELNLGRREEYDVLDKRRGRDPEMGGKPQRRKNPQEGLYNELQKDKMAEAYSEIGMKGERRRGKGHDGLYQGLSTATKDTYDALHMQALPPRRAKRSGSGVKQTLNFDLLKLAGDVESNPGPSRGHMTEYKPTVRLATRDDVPRAVRTLAAAFADYPATRHTVDPDRHIERVTELQELFLTRVGLDIGKVWVADDGAAVAVWTTPESVEAGAVFAEIGPRMAELSGSRLAAQQQMEGLLAPHRPKEPAWFLATVGVSPDHQGKGLGSAVVLPGVEAAERAGVPAFLETSAPRNLPFYERLGFTVTADVEVPEGPRTWCMTRKPGA

SEQ ID NO: 19224 - protein, 815 aa, Artificial Sequence
  Synthetic Polypeptide
MALPVTALLLPLALLLHAARPDIQMTQSPSSLSASVGDRVTITCRASQSINKWLNWYQQKPGKAPKLLIYAASSLQSGVPSRFSGSGSGTDFTLTISSLQPEDFATYYCQQDYNFPYTFGQGTKVEIKRLEDLKNVFPPEVAVFEPSEAEISHTQKATLVCLATGFYPDHVELSWWVNGKEVHSGVSTDPQPLKEQPALNDSRYCLSSRLRVSATFWQNPRNHFRCQVQFYGLSENDEWTQDRAKPVTQIVSAEAWGRADCGSQSFGLLDPKLCYLLDGILFIYGVILTALFLRVKFSRSADAPAYQQGQNQLYNELNLGRREEYDVLDKRRGRDPEMGGKPQRRKNPQEGLYNELQKDKMAEAYSEIGMKGERRRGKGHDGLYQGLSTATKDTYDALHMQALPPRRAKRSGSGATNFSLLKQAGDVEENPGPTSMDWIWRILFLVGAATGAHSFEQVQLVQSGAEVKKPGSSVKVSCKASGGTFSSYGISWVRQAPGQGLEWMGWISAIFGTANYAQKFQGRVTITADESTSTAYMELSSLRSEDTAVYYCARGVASWYLDYWGQGTLVTVSSTRIQNPDPAVYQLRDSKSSDKSVCLFTDFDSQTNVSQSKDSDVYITDKTVLDMRSMDFKSNSAVAWSNKSDFACANAFNNSIIPEDTFFPSPESSCGTQSFGLLDPKLCYLLDGILFIYGVILTALFLRVKFSRSADAPAYQQGQNQLYNELNLGRREEYDVLDKRRGRDPEMGGKPQRRKNPQEGLYNELQKDKMAEAYSEIGMKGERRRGKGHDGLYQGLSTATKDTYDALHMQALPPR

SEQ ID NO: 19225 - protein, 815 aa, Artificial Sequence
  Synthetic Polypeptide
MALPVTALLLPLALLLHAARPDIQMTQSPSSLSASVGDRVTITCRASQSINKWLNWYQQKPGKAPKLLIYAASSLQSGVPSRFSGSGSGTDFTLTISSLQPEDFATYYCQQDYNFPYTFGQGTKVEIKRLEDLKNVFPPEVAVFEPSKAEIAHTQKATLVCLATGFYPDHVELSWWVNGKEVHSGVCTDPQPLKEQPALNDSRYCLSSRLRVSATFWQNPRNHFRCQVQFYGLSENDEWTQDRAKPVTQIVSAEAWGRADCGSQSFGLLDPKLCYLLDGILFIYGVILTALFLRVKFSRSADAPAYQQGQNQLYNELNLGRREEYDVLDKRRGRDPEMGGKPQRRKNPQEGLYNELQKDKMAEAYSEIGMKGERRRGKGHDGLYQGLSTATKDTYDALHMQALPPRRAKRSGSGATNFSLLKQAGDVEENPGPTSMDWIWRILFLVGAATGAHSFEQVQLVQSGAEVKKPGSSVKVSCKASGGTFSSYGISWVRQAPGQGLEWMGWISAIFGTANYAQKFQGRVTITADESTSTAYMELSSLRSEDTAVYYCARGVASWYLDYWGQGTLVTVSSTRIQNPDPAVYQLRDSKSSDKSVCLFTDFDSQTNVSQSKDSDVYITDKCVLDMRSMDFKSNSAVAWSNKSDFACANAFNNSIIPEDTFFPSSDVPCGTQSFGLLDPKLCYLLDGILFIYGVILTALFLRVKFSRSADAPAYQQGQNQLYNELNLGRREEYDVLDKRRGRDPEMGGKPQRRKNPQEGLYNELQKDKMAEAYSEIGMKGERRRGKGHDGLYQGLSTATKDTYDALHMQALPPR

SEQ ID NO: 19226 - protein, 886 aa, Artificial Sequence
  Synthetic Polypeptide
MALPVTALLLPLALLLHAARPDIQMTQSPSSLSASVGDRVTITCRASQSINKWLNWYQQKPGKAPKLLIYAASSLQSGVPSRFSGSGSGTDFTLTISSLQPEDFATYYCQQDYNFPYTFGQGTKVEIKRLEGKPIPNPLLGLDSTGSGEDLKNVFPPEVAVFEPSEAEISHTQKATLVCLATGFYPDHVELSWWVNGKEVHSGVSTDPQPLKEQPALNDSRYCLSSRLRVSATFWQNPRNHFRCQVQFYGLSENDEWTQDRAKPVTQIVSAEAWGRADCGSQSFGLLDPKLCYLLDGILFIYGVILTALFLRVKFSRSADAPAYQQGQNQLYNELNLGRREEYDVLDKRRGRDPEMGGKPQRRKNPQEGLYNELQKDKMAEAYSEIGMKGERRRGKGHDGLYQGLSTATKDTYDALHMQALPPRRAKRSGSGATNFSLLKQAGDVEENPGPTSMDWIWRILFLVGAATGAHSFEQVQLVQSGAEVKKPGSSVKVSCKASGGTFSSYGISWVRQAPGQGLEWMGWISAIFGTANYAQKFQGRVTITADESTSTAYMELSSLRSEDTAVYYCARGVASWYLDYWGQGTLVTVSSTREQKLISEEDGSGIQNPDPAVYQLRDSKSSDKSVCLFTDFDSQTNVSQSKDSDVYITDKTVLDMRSMDFKSNSAVAWSNKSDFACANAFNNSIIPEDTFFPSPESSCGTQSFGLLDPKLCYLLDGILFIYGVILTALFLRSKRSRLLHSDYMNMTPRRPGPTRKHYQPYAPPRDFAAYRSRVKFSRSADAPAYQQGQNQLYNELNLGRREEYDVLDKRRGRDPEMGGKPQRRKNPQEGLYNELQKDKMAEAYSEIGMKGERRRGKGHDGLYQGLSTATKDTYDALHMQALPPR

SEQ ID NO: 19227 - protein, 927 aa, Artificial Sequence
  Synthetic Polypeptide
MALPVTALLLPLALLLHAARPDIQMTQSPSSLSASVGDRVTITCRASQSINKWLNWYQQKPGKAPKLLIYAASSLQSGVPSRFSGSGSGTDFTLTISSLQPEDFATYYCQQDYNFPYTFGQGTKVEIKRLEGKPIPNPLLGLDSTGSGEDLKNVFPPEVAVFEPSEAEISHTQKATLVCLATGFYPDHVELSWWVNGKEVHSGVSTDPQPLKEQPALNDSRYCLSSRLRVSATFWQNPRNHFRCQVQFYGLSENDEWTQDRAKPVTQIVSAEAWGRADCGSQSFGLLDPKLCYLLDGILFIYGVILTALFLRSKRSRLLHSDYMNMTPRRPGPTRKHYQPYAPPRDFAAYRSRVKFSRSADAPAYQQGQNQLYNELNLGRREEYDVLDKRRGRDPEMGGKPQRRKNPQEGLYNELQKDKMAEAYSEIGMKGERRRGKGHDGLYQGLSTATKDTYDALHMQALPPRRAKRSGSGATNFSLLKQAGDVEENPGPTSMDWIWRILFLVGAATGAHSFEQVQLVQSGAEVKKPGSSVKVSCKASGGTFSSYGISWVRQAPGQGLEWMGWISAIFGTANYAQKFQGRVTITADESTSTAYMELSSLRSEDTAVYYCARGVASWYLDYWGQGTLVTVSSTREQKLISEEDGSGIQNPDPAVYQLRDSKSSDKSVCLFTDFDSQTNVSQSKDSDVYITDKTVLDMRSMDFKSNSAVAWSNKSDFACANAFNNSIIPEDTFFPSPESSCGTQSFGLLDPKLCYLLDGILFIYGVILTALFLRSKRSRLLHSDYMNMTPRRPGPTRKHYQPYAPPRDFAAYRSRVKFSRSADAPAYQQGQNQLYNELNLGRREEYDVLDKRRGRDPEMGGKPQRRKNPQEGLYNELQKDKMAEAYSEIGMKGERRRGKGHDGLYQGLSTATKDTYDALHMQALPPR

SEQ ID NO: 19228 - protein, 888 aa, Artificial Sequence
  Synthetic Polypeptide
MALPVTALLLPLALLLHAARPDIQMTQSPSSLSASVGDRVTITCRASQSINKWLNWYQQKPGKAPKLLIYAASSLQSGVPSRFSGSGSGTDFTLTISSLQPEDFATYYCQQDYNFPYTFGQGTKVEIKRLEGKPIPNPLLGLDSTGSGEDLKNVFPPEVAVFEPSEAEISHTQKATLVCLATGFYPDHVELSWWVNGKEVHSGVSTDPQPLKEQPALNDSRYCLSSRLRVSATFWQNPRNHFRCQVQFYGLSENDEWTQDRAKPVTQIVSAEAWGRADCGSQSFGLLDPKLCYLLDGILFIYGVILTALFLRVKFSRSADAPAYQQGQNQLYNELNLGRREEYDVLDKRRGRDPEMGGKPQRRKNPQEGLYNELQKDKMAEAYSEIGMKGERRRGKGHDGLYQGLSTATKDTYDALHMQALPPRRAKRSGSGATNFSLLKQAGDVEENPGPTSMDWIWRILFLVGAATGAHSFEQVQLVQSGAEVKKPGSSVKVSCKASGGTFSSYGISWVRQAPGQGLEWMGWISAIFGTANYAQKFQGRVTITADESTSTAYMELSSLRSEDTAVYYCARGVASWYLDYWGQGTLVTVSSTREQKLISEEDLGSGIQNPDPAVYQLRDSKSSDKSVCLFTDFDSQTNVSQSKDSDVYITDKTVLDMRSMDFKSNSAVAWSNKSDFACANAFNNSIIPEDTFFPSPESSCGTQSFGLLDPKLCYLLDGILFIYGVILTALFLKRGRKKLLYIFKQPFMRPVQTTQEEDGCSCRFPEEEEGGCELRVKFSRSADAPAYQQGQNQLYNELNLGRREEYDVLDKRRGRDPEMGGKPQRRKNPQEGLYNELQKDKMAEAYSEIGMKGERRRGKGHDGLYQGLSTATKDTYDALHMQALPPR

SEQ ID NO: 19229 - protein, 930 aa, Artificial Sequence
  Synthetic Polypeptide
MALPVTALLLPLALLLHAARPDIQMTQSPSSLSASVGDRVTITCRASQSINKWLNWYQQKPGKAPKLLIYAASSLQSGVPSRFSGSGSGTDFTLTISSLQPEDFATYYCQQDYNFPYTFGQGTKVEIKRLEGKPIPNPLLGLDSTGSGEDLKNVFPPEVAVFEPSEAEISHTQKATLVCLATGFYPDHVELSWWVNGKEVHSGVSTDPQPLKEQPALNDSRYCLSSRLRVSATFWQNPRNHFRCQVQFYGLSENDEWTQDRAKPVTQIVSAEAWGRADCGSQSFGLLDPKLCYLLDGILFIYGVILTALFLKRGRKKLLYIFKQPFMRPVQTTQEEDGCSCRFPEEEEGGCELRVKFSRSADAPAYQQGQNQLYNELNLGRREEYDVLDKRRGRDPEMGGKPQRRKNPQEGLYNELQKDKMAEAYSEIGMKGERRRGKGHDGLYQGLSTATKDTYDALHMQALPPRRAKRSGSGATNFSLLKQAGDVEENPGPTSMDWIWRILFLVGAATGAHSFEQVQLVQSGAEVKKPGSSVKVSCKASGGTFSSYGISWVRQAPGQGLEWMGWISAIFGTANYAQKFQGRVTITADESTSTAYMELSSLRSEDTAVYYCARGVASWYLDYWGQGTLVTVSSTREQKLISEEDLGSGIQNPDPAVYQLRDSKSSDKSVCLFTDFDSQTNVSQSKDSDVYITDKTVLDMRSMDFKSNSAVAWSNKSDFACANAFNNSIIPEDTFFPSPESSCGTQSFGLLDPKLCYLLDGILFIYGVILTALFLKRGRKKLLYIFKQPFMRPVQTTQEEDGCSCRFPEEEEGGCELRVKFSRSADAPAYQQGQNQLYNELNLGRREEYDVLDKRRGRDPEMGGKPQRRKNPQEGLYNELQKDKMAEAYSEIGMKGERRRGKGHDGLYQGLSTATKDTYDALHMQALPPR

SEQ ID NO: 19230 - protein, 820 aa, Artificial Sequence
  Synthetic Polypeptide
MALPVTALLLPLALLLHAARPDIQMTQSPSSLSASVGDRVTITCRASQSINKWLNWYQQKPGKAPKLLIYAASSLQSGVPSRFSGSGSGTDFTLTISSLQPEDFATYYCQQDYNFPYTFGQGTKVEIKRLEQSFGLLDPKLCYLLDGILFIYGVILTALFLRVKFSRSADAPAYQQGQNQLYNELNLGRREEYDVLDKRRGRDPEMGGKPQRRKNPQEGLYNELQKDKMAEAYSEIGMKGERRRGKGHDGLYQGLSTATKDTYDALHMQALPPRRAKRSGSGATNFSLLKQAGDVEENPGPTSMDWIWRILFLVGAATGAHSFEQVQLVQSGAEVKKPGSSVKVSCKASGGTFSSYGISWVRQAPGQGLEWMGWISAIFGTANYAQKFQGRVTITADESTSTAYMELSSLRSEDTAVYYCARGVASWYLDYWGQGTLVTVSSTRQSFGLLDPKLCYLLDGILFIYGVILTALFLRVKFSRSADAPAYQQGQNQLYNELNLGRREEYDVLDKRRGRDPEMGGKPQRRKNPQEGLYNELQKDKMAEAYSEIGMKGERRRGKGHDGLYQGLSTATKDTYDALHMQALPPRRAKRSGSGVKQTLNFDLLKLAGDVESNPGPSRGHMTEYKPTVRLATRDDVPRAVRTLAAAFADYPATRHTVDPDRHIERVTELQELFLTRVGLDIGKVWVADDGAAVAVWTTPESVEAGAVFAEIGPRMAELSGSRLAAQQQMEGLLAPHRPKEPAWFLATVGVSPDHQGKGLGSAVVLPGVEAAERAGVPAFLETSAPRNLPFYERLGFTVTADVEVPEGPRTWCMTRKPGA

SEQ ID NO: 19231 - protein, 645 aa, Artificial Sequence
  Synthetic Polypeptide
MALPVTALLLPLALLLHAARPDIQMTQSPSSLSASVGDRVTITCRASQSINKWLNWYQQKPGKAPKLLIYAASSLQSGVPSRFSGSGSGTDFTLTISSLQPEDFATYYCQQDYNFPYTFGQGTKVEIKRLEGQPKANPTVTLFPPSSEELQANKATLVCLISDFYPGAVTVAWKADGSPVKAGVETTKPSKQSNNKYAASSYLSLTPEQWKSHRSYSCQVTHEGSTVEKTVAPTECSPIKTDVITMDPKDNCSKDANDTLLLQLTNTSAYYMYLLLLLKSVVYFAIITCCLLRRTAFCCNGEKSRAKRSGSGATNFSLLKQAGDVEENPGPTSMDWIWRILFLVGAATGAHSFEQVQLVQSGAEVKKPGSSVKVSCKASGGTFSSYGISWVRQAPGQGLEWMGWISAIFGTANYAQKFQGRVTITADESTSTAYMELSSLRSEDTAVYYCARGVASWYLDYWGQGTLVTVSSTRASTKGPSVFPLAPSSKSTSGGTAALGCLVKDYFPEPVTVSWNSGALTSGVHTFPAVLQSSGLYSLSSVVTVPSSSLGTQTYICNVNHKPSNTKVDKRVEPKSCEVKTDSTDHVKPKETENTKQPSKSCHKPKAIVHTEKVNMMSLTVLGLRMLFAKTVAVNFLLTAKLFFL

SEQ ID NO: 19232 - protein, 623 aa, Artificial Sequence
  Synthetic Polypeptide
MALPVTALLLPLALLLHAARPDIQMTQSPSSLSASVGDRVTITCRASQSINKWLNWYQQKPGKAPKLLIYAASSLQSGVPSRFSGSGSGTDFTLTISSLQPEDFATYYCQQDYNFPYTFGQGTKVEIKRLEGQPKANPTVTLFPPSSEELQANKATLVCLISDFYPGAVTVAWKADGSPVKAGVETTKPSKQSNNKYAASSYLSLTPEQWKSHRSYSCQVTHEGSTVEKTVAPTECSGRADCGITSASYHQGVLSATILYEILLGKATLYAVLVSALVLMAMVKRKDSRGRAKRSGSGATNFSLLKQAGDVEENPGPTSMDWIWRILFLVGAATGAHSFEQVQLVQSGAEVKKPGSSVKVSCKASGGTFSSYGISWVRQAPGQGLEWMGWISAIFGTANYAQKFQGRVTITADESTSTAYMELSSLRSEDTAVYYCARGVASWYLDYWGQGTLVTVSSTRASTKGPSVFPLAPSSKSTSGGTAALGCLVKDYFPEPVTVSWNSGALTSGVHTFPAVLQSSGLYSLSSVVTVPSSSLGTQTYICNVNHKPSNTKVDKRVEPKSCIPEDTFFPSSDVPCDVKLVEKSFETDTNLNFQNLSVIGFRILLLKVAGFNLLMTLRLWSS

SEQ ID NO: 19233 - protein, 623 aa, Artificial Sequence
  Synthetic Polypeptide
MALPVTALLLPLALLLHAARPDIQMTQSPSSLSASVGDRVTITCRASQSINKWLNWYQQKPGKAPKLLIYAASSLQSGVPSRFSGSGSGTDFTLTISSLQPEDFATYYCQQDYNFPYTFGQGTKVEIKRLEGQPKANPTVTLFPPSSEELQANKATLVCLISDFYPGAVTVAWKADGSPVKAGVETTKPSKQSNNKYAASSYLSLTPEQWKSHRSYSCQVTHEGSTVEKTVAPTECSGRADCGFTSESYQQGVLSATILYEILLGKATLYAVLVSALVLMAMVKRKDSRGRAKRSGSGATNFSLLKQAGDVEENPGPTSMDWIWRILFLVGAATGAHSFEQVQLVQSGAEVKKPGSSVKVSCKASGGTFSSYGISWVRQAPGQGLEWMGWISAIFGTANYAQKFQGRVTITADESTSTAYMELSSLRSEDTAVYYCARGVASWYLDYWGQGTLVTVSSTRASTKGPSVFPLAPSSKSTSGGTAALGCLVKDYFPEPVTVSWNSGALTSGVHTFPAVLQSSGLYSLSSVVTVPSSSLGTQTYICNVNHKPSNTKVDKRVEPKSCIPEDTFFPSPESSCDVKLVEKSFETDTNLNFQNLSVIGFRILLLKVAGFNLLMTLRLWSS

SEQ ID NO: 19234 - protein, 449 aa, Artificial Sequence
  Synthetic Polypeptide
MALPVTALLLPLALLLHAARPDIQMTQSPSSLSASVGDRVTITCRASQSINKWLNWYQQKPGKAPKLLIYAASSLQSGVPSRFSGSGSGTDFTLTISSLQPEDFATYYCQQDYNFPYTFGQGTKVEIKRGGGGSGGGGSGGGGSQVQLVQSGAEVKKPGSSVKVSCKASGGTFSSYGISWVRQAPGQGLEWMGWISAIFGTANYAQKFQGRVTITADESTSTAYMELSSLRSEDTAVYYCARGVASWYLDYWGQGTLVTVSSTRDGNEEMGGITQTPYKVSISGTTVILTCPQYPGSEILWQHNDKNIGGDEDDKNIGSDEDHLSLKEFSELEQSGYYVCYPRGSKPEDANFYLYLRARVCENCMEMDVMSVATIVIVDICITGGLLLLVYYWSKNRKAKAKPVTRGAGAGGRQRGQNKERPPPVPNPDYEPIRKGQRDLYSGLNQRRI

SEQ ID NO: 19235 - protein, 414 aa, Artificial Sequence
  Synthetic Polypeptide
MALPVTALLLPLALLLHAARPDIQMTQSPSSLSASVGDRVTITCRASQSINKWLNWYQQKPGKAPKLLIYAASSLQSGVPSRFSGSGSGTDFTLTISSLQPEDFATYYCQQDYNFPYTFGQGTKVEIKRGGGGSGGGGSGGGGSQVQLVQSGAEVKKPGSSVKVSCKASGGTFSSYGISWVRQAPGQGLEWMGWISAIFGTANYAQKFQGRVTITADESTSTAYMELSSLRSEDTAVYYCARGVASWYLDYWGQGTLVTVSSTRFKIPIEELEDRVFVNCNTSITWVEGTVGTLLSDITRLDLGKRILDPRGIYRCNGTDIYKDKESTVQVHYRMCQSCVELDPATVAGIIVTDVIATLLLALGVFCFAGHETGRLSGAADTQALLRNDQVYQPLRDRDDAQYSHLGGNWARNK

SEQ ID NO: 19236 - protein, 424 aa, Artificial Sequence
  Synthetic Polypeptide
MALPVTALLLPLALLLHAARPDIQMTQSPSSLSASVGDRVTITCRASQSINKWLNWYQQKPGKAPKLLIYAASSLQSGVPSRFSGSGSGTDFTLTISSLQPEDFATYYCQQDYNFPYTFGQGTKVEIKRGGGGSGGGGSGGGGSQVQLVQSGAEVKKPGSSVKVSCKASGGTFSSYGISWVRQAPGQGLEWMGWISAIFGTANYAQKFQGRVTITADESTSTAYMELSSLRSEDTAVYYCARGVASWYLDYWGQGTLVTVSSTRQSIKGNHLVKVYDYQEDGSVLLTCDAEAKNITWFKDGKMIGFLTEDKKKWNLGSNAKDPRGMYQCKGSQNKSKPLQVYYRMCQNCIELNAATISGFLFAEIVSIFVLAVGVYFIAGQDGVRQSRASDKQTLLPNDQLYQPLKDREDDQYSHLQGNQLRRN

SEQ ID NO: 19237 - protein, 407 aa, Artificial Sequence
  Synthetic Polypeptide
MALPVTALLLPLALLLHAARPDIQMTQSPSSLSASVGDRVTITCRASQSINKWLNWYQQKPGKAPKLLIYAASSLQSGVPSRFSGSGSGTDFTLTISSLQPEDFATYYCQQDYNFPYTFGQGTKVEIKRGGGGSGGGGSGGGGSQVQLVQSGAEVKKPGSSVKVSCKASGGTFSSYGISWVRQAPGQGLEWMGWISAIFGTANYAQKFQGRVTITADESTSTAYMELSSLRSEDTAVYYCARGVASWYLDYWGQGTLVTVSSTRQSFGLLDPKLCYLLDGILFIYGVILTALFLRVKFSRSADAPAYQQGQNQLYNELNLGRREEYDVLDKRRGRDPEMGGKPQRRKNPQEGLYNELQKDKMAEAYSEIGMKGERRRGKGHDGLYQGLSTATKDTYDALHMQALPPR

SEQ ID NO: 19238 - protein, 449 aa, Artificial Sequence
  Synthetic Polypeptide
MALPVTALLLPLALLLHAARPQVQLVQSGAEVKKPGSSVKVSCKASGGTFSSYGISWVRQAPGQGLEWMGWISAIFGTANYAQKFQGRVTITADESTSTAYMELSSLRSEDTAVYYCARGVASWYLDYWGQGTLVTVSSGGGGSGGGGSGGGGSDIQMTQSPSSLSASVGDRVTITCRASQSINKWLNWYQQKPGKAPKLLIYAASSLQSGVPSRFSGSGSGTDFTLTISSLQPEDFATYYCQQDYNFPYTFGQGTKVEIKRTRDGNEEMGGITQTPYKVSISGTTVILTCPQYPGSEILWQHNDKNIGGDEDDKNIGSDEDHLSLKEFSELEQSGYYVCYPRGSKPEDANFYLYLRARVCENCMEMDVMSVATIVIVDICITGGLLLLVYYWSKNRKAKAKPVTRGAGAGGRQRGQNKERPPPVPNPDYEPIRKGQRDLYSGLNQRRI

SEQ ID NO: 19239 - protein, 414 aa, Artificial Sequence
  Synthetic Polypeptide
MALPVTALLLPLALLLHAARPQVQLVQSGAEVKKPGSSVKVSCKASGGTFSSYGISWVRQAPGQGLEWMGWISAIFGTANYAQKFQGRVTITADESTSTAYMELSSLRSEDTAVYYCARGVASWYLDYWGQGTLVTVSSGGGGSGGGGSGGGGSDIQMTQSPSSLSASVGDRVTITCRASQSINKWLNWYQQKPGKAPKLLIYAASSLQSGVPSRFSGSGSGTDFTLTISSLQPEDFATYYCQQDYNFPYTFGQGTKVEIKRTRFKIPIEELEDRVFVNCNTSITWVEGTVGTLLSDITRLDLGKRILDPRGIYRCNGTDIYKDKESTVQVHYRMCQSCVELDPATVAGIIVTDVIATLLLALGVFCFAGHETGRLSGAADTQALLRNDQVYQPLRDRDDAQYSHLGGNWARNK

SEQ ID NO: 19240 - protein, 424 aa, Artificial Sequence
  Synthetic Polypeptide
MALPVTALLLPLALLLHAARPQVQLVQSGAEVKKPGSSVKVSCKASGGTFSSYGISWVRQAPGQGLEWMGWISAIFGTANYAQKFQGRVTITADESTSTAYMELSSLRSEDTAVYYCARGVASWYLDYWGQGTLVTVSSGGGGSGGGGSGGGGSDIQMTQSPSSLSASVGDRVTITCRASQSINKWLNWYQQKPGKAPKLLIYAASSLQSGVPSRFSGSGSGTDFTLTISSLQPEDFATYYCQQDYNFPYTFGQGTKVEIKRTRQSIKGNHLVKVYDYQEDGSVLLTCDAEAKNITWFKDGKMIGFLTEDKKKWNLGSNAKDPRGMYQCKGSQNKSKPLQVYYRMCQNCIELNAATISGFLFAEIVSIFVLAVGVYFIAGQDGVRQSRASDKQTLLPNDQLYQPLKDREDDQYSHLQGNQLRRN

SEQ ID NO: 19241 - protein, 407 aa, Artificial Sequence
  Synthetic Polypeptide
MALPVTALLLPLALLLHAARPQVQLVQSGAEVKKPGSSVKVSCKASGGTFSSYGISWVRQAPGQGLEWMGWISAIFGTANYAQKFQGRVTITADESTSTAYMELSSLRSEDTAVYYCARGVASWYLDYWGQGTLVTVSSGGGGSGGGGSGGGGSDIQMTQSPSSLSASVGDRVTITCRASQSINKWLNWYQQKPGKAPKLLIYAASSLQSGVPSRFSGSGSGTDFTLTISSLQPEDFATYYCQQDYNFPYTFGQGTKVEIKRTRQSFGLLDPKLCYLLDGILFIYGVILTALFLRVKFSRSADAPAYQQGQNQLYNELNLGRREEYDVLDKRRGRDPEMGGKPQRRKNPQEGLYNELQKDKMAEAYSEIGMKGERRRGKGHDGLYQGLSTATKDTYDALHMQALPPR

SEQ ID NO: 19242 - protein, 640 aa, Artificial Sequence
  Synthetic Polypeptide
MALPVTALLLPLALLLHAARPDIQMTQSPSSLSASVGDRVTITCRASQSINKWLNWYQQKPGKAPKLLIYAASSLQSGVPSRFSGSGSGTDFTLTISSLQPEDFATYYCQQDYNFPYTFGQGTKVEIKRGGGGSGGGGSGGGGSQVQLVQSGAEVKKPGSSVKVSCKASGGTFSSYGISWVRQAPGQGLEWMGWISAIFGTANYAQKFQGRVTITADESTSTAYMELSSLRSEDTAVYYCARGVASWYLDYWGQGTLVTVSSTRGSGIQNPDPAVYQLRDSKSSDKSVCLFTDFDSQTNVSQSKDSDVYITDKTVLDMRSMDFKSNSAVAWSNKSDFACANAFNNSIIPEDTFFPSPESSCDVKLVEKSFETDTNLNFQNLSVIGFRILLLKVAGFNLLMTLRLWSSRAKRSGSGVKQTLNFDLLKLAGDVESNPGPSRGHMTEYKPTVRLATRDDVPRAVRTLAAAFADYPATRHTVDPDRHIERVTELQELFLTRVGLDIGKVWVADDGAAVAVWTTPESVEAGAVFAEIGPRMAELSGSRLAAQQQMEGLLAPHRPKEPAWFLATVGVSPDHQGKGLGSAVVLPGVEAAERAGVPAFLETSAPRNLPFYERLGFTVTADVEVPEGPRTWCMTRKPGA

SEQ ID NO: 19243 - protein, 672 aa, Artificial Sequence
  Synthetic Polypeptide
MALPVTALLLPLALLLHAARPDIQMTQSPSSLSASVGDRVTITCRASQSINKWLNWYQQKPGKAPKLLIYAASSLQSGVPSRFSGSGSGTDFTLTISSLQPEDFATYYCQQDYNFPYTFGQGTKVEIKRGGGGSGGGGSGGGGSQVQLVQSGAEVKKPGSSVKVSCKASGGTFSSYGISWVRQAPGQGLEWMGWISAIFGTANYAQKFQGRVTITADESTSTAYMELSSLRSEDTAVYYCARGVASWYLDYWGQGTLVTVSSLEDLKNVFPPEVAVFEPSEAEISHTQKATLVCLATGFYPDHVELSWWVNGKEVHSGVSTDPQPLKEQPALNDSRYCLSSRLRVSATFWQNPRNHFRCQVQFYGLSENDEWTQDRAKPVTQIVSAEAWGRADCGFTSESYQQGVLSATILYEILLGKATLYAVLVSALVLMAMVKRKDSRGRAKRSGSGATNFSLLKQAGDVEENPGPTRGHMTEYKPTVRLATRDDVPRAVRTLAAAFADYPATRHTVDPDRHIERVTELQELFLTRVGLDIGKVWVADDGAAVAVWTTPESVEAGAVFAEIGPRMAELSGSRLAAQQQMEGLLAPHRPKEPAWFLATVGVSPDHQGKGLGSAVVLPGVEAAERAGVPAFLETSAPRNLPFYERLGFTVTADVEVPEGPRTWCMTRKPGA

SEQ ID NO: 19244 - protein, 722 aa, Artificial Sequence
  Synthetic Polypeptide
MALPVTALLLPLALLLHAARPDIQMTQSPSSLSASVGDRVTITCRASQSINKWLNWYQQKPGKAPKLLIYAASSLQSGVPSRFSGSGSGTDFTLTISSLQPEDFATYYCQQDYNFPYTFGQGTKVEIKRGGGGSGGGGSGGGGSQVQLVQSGAEVKKPGSSVKVSCKASGGTFSSYGISWVRQAPGQGLEWMGWISAIFGTANYAQKFQGRVTITADESTSTAYMELSSLRSEDTAVYYCARGVASWYLDYWGQGTLVTVSSTREQKLISEEDLGSGTPFPSLAPPIMLLVDGKQQMVVVCLVLDVAPPGLDSPIWFSAGNGSALDAFTYGPSPATDGTWTNLAHLSLPSEELASWEPLVCHTGPGAEGHSRSTQPMHLSGEASTARTCPQEPLRGTPGGALWLGVLRLLLFKLLLFDLLLTCSCLCDPAGPLPSPATTTRLRALGSHRLHPATETGGREATSSPRPQPRDRRWGDTPPGRKPGSPVRAKRSGSGVKQTLNFDLLKLAGDVESNPGPSRSRGHMTEYKPTVRLATRDDVPRAVRTLAAAFADYPATRHTVDPDRHIERVTELQELFLTRVGLDIGKVWVADDGAAVAVWTTPESVEAGAVFAEIGPRMAELSGSRLAAQQQMEGLLAPHRPKEPAWFLATVGVSPDHQGKGLGSAVVLPGVEAAERAGVPAFLETSAPRNLPFYERLGFTVTADVEVPEGPRTWCMTRKPGA

SEQ ID NO: 19245 - protein, 539 aa, Artificial Sequence
  Synthetic Polypeptide
MALPVTALLLPLALLLHAARPDIQMTQSPSSLSASVGDRVTITCRASQSINKWLNWYQQKPGKAPKLLIYAASSLQSGVPSRFSGSGSGTDFTLTISSLQPEDFATYYCQQDYNFPYTFGQGTKVEIKRLEDLKNVFPPEVAVFEPSEAEISHTQKATLVCLATGFYPDHVELSWWVNGKEVHSGVSTDPQPLKEQPALNDSRYCLSSRLRVSATFWQNPRNHFRCQVQFYGLSENDEWTQDRAKPVTQIVSAEAWGRADCGFTSESYQQGVLSATILYEILLGKATLYAVLVSALVLMAMVKRKDSRGRAKRSGSGATNFSLLKQAGDVEENPGPTRGHMTEYKPTVRLATRDDVPRAVRTLAAAFADYPATRHTVDPDRHIERVTELQELFLTRVGLDIGKVWVADDGAAVAVWTTPESVEAGAVFAEIGPRMAELSGSRLAAQQQMEGLLAPHRPKEPAWFLATVGVSPDHQGKGLGSAVVLPGVEAAERAGVPAFLETSAPRNLPFYERLGFTVTADVEVPEGPRTWCMTRKPGA

SEQ ID NO: 19246 - protein, 309 aa, Artificial Sequence
  Synthetic Polypeptide
MALPVTALLLPLALLLHAARPDIQMTQSPSSLSASVGDRVTITCRASQSINKWLNWYQQKPGKAPKLLIYAASSLQSGVPSRFSGSGSGTDFTLTISSLQPEDFATYYCQQDYNFPYTFGQGTKVEIKRLEDLKNVFPPEVAVFEPSEAEISHTQKATLVCLATGFYPDHVELSWWVNGKEVHSGVSTDPQPLKEQPALNDSRYCLSSRLRVSATFWQNPRNHFRCQVQFYGLSENDEWTQDRAKPVTQIVSAEAWGRADCGFTSESYQQGVLSATILYEILLGKATLYAVLVSALVLMAMVKRKDSRG

SEQ ID NO: 19247 - protein, 447 aa, Artificial Sequence
  Synthetic Polypeptide
MDWIWRILFLVGAATGAHSFEQVQLVQSGAEVKKPGSSVKVSCKASGGTFSSYGISWVRQAPGQGLEWMGWISAIFGTANYAQKFQGRVTITADESTSTAYMELSSLRSEDTAVYYCARGVASWYLDYWGQGTLVTVSSTRIQNPDPAVYQLRDSKSSDKSVCLFTDFDSQTNVSQSKDSDVYITDKTVLDMRSMDFKSNSAVAWSNKSDFACANAFNNSIIPEDTFFPSPESSCDVKLVEKSFETDTNLNFQNLSVIGFRILLLKVAGFNLLMTLRLWSSRAKRSGSGVKQTLNFDLLKLAGDVESNPGPSRGHMAKPLSQEESTLIERATATINSIPISEDYSVASAALSSDGRIFTGVNVYHFTGGPCAELVVLGTAAAAAAGNLTCIVAIGNENRGILSPCGRCRQVLLDLHPGIKAIVKDSDGQPTAVGIRELLPSGYVWEG

SEQ ID NO: 19248 - protein, 281 aa, Artificial Sequence
  Synthetic Polypeptide
MDWIWRILFLVGAATGAHSFEQVQLVQSGAEVKKPGSSVKVSCKASGGTFSSYGISWVRQAPGQGLEWMGWISAIFGTANYAQKFQGRVTITADESTSTAYMELSSLRSEDTAVYYCARGVASWYLDYWGQGTLVTVSSTRIQNPDPAVYQLRDSKSSDKSVCLFTDFDSQTNVSQSKDSDVYITDKTVLDMRSMDFKSNSAVAWSNKSDFACANAFNNSIIPEDTFFPSPESSCDVKLVEKSFETDTNLNFQNLSVIGFRILLLKVAGFNLLMTLRLWSS

SEQ ID NO: 19249 - protein, 557 aa, Artificial Sequence
  Synthetic Polypeptide
MALPVTALLLPLALLLHAARPDIQMTQSPSSLSASVGDRVTITCRASQSINKWLNWYQQKPGKAPKLLIYAASSLQSGVPSRFSGSGSGTDFTLTISSLQPEDFATYYCQQDYNFPYTFGQGTKVEIKRLEGKPIPNPLLGLDSTGSGEDLKNVFPPEVAVFEPSEAEISHTQKATLVCLATGFYPDHVELSWWVNGKEVHSGVCTDPQPLKEQPALNDSRYCLSSRLRVSATFWQNPRNHFRCQVQFYGLSENDEWTQDRAKPVTQIVSAEAWGRADCGFTSESYQQGVLSATILYEILLGKATLYAVLVSALVLMAMVKRKDSRGRAKRSGSGATNFSLLKQAGDVEENPGPTRGHMTEYKPTVRLATRDDVPRAVRTLAAAFADYPATRHTVDPDRHIERVTELQELFLTRVGLDIGKVWVADDGAAVAVWTTPESVEAGAVFAEIGPRMAELSGSRLAAQQQMEGLLAPHRPKEPAWFLATVGVSPDHQGKGLGSAVVLPGVEAAERAGVPAFLETSAPRNLPFYERLGFTVTADVEVPEGPRTWCMTRKPGA

SEQ ID NO: 19250 - protein, 327 aa, Artificial Sequence
  Synthetic Polypeptide
MALPVTALLLPLALLLHAARPDIQMTQSPSSLSASVGDRVTITCRASQSINKWLNWYQQKPGKAPKLLIYAASSLQSGVPSRFSGSGSGTDFTLTISSLQPEDFATYYCQQDYNFPYTFGQGTKVEIKRLEGKPIPNPLLGLDSTGSGEDLKNVFPPEVAVFEPSEAEISHTQKATLVCLATGFYPDHVELSWWVNGKEVHSGVCTDPQPLKEQPALNDSRYCLSSRLRVSATFWQNPRNHFRCQVQFYGLSENDEWTQDRAKPVTQIVSAEAWGRADCGFTSESYQQGVLSATILYEILLGKATLYAVLVSALVLMAMVKRKDSRG

SEQ ID NO: 19251 - protein, 459 aa, Artificial Sequence
  Synthetic Polypeptide
MDWIWRILFLVGAATGAHSFEQVQLVQSGAEVKKPGSSVKVSCKASGGTFSSYGISWVRQAPGQGLEWMGWISAIFGTANYAQKFQGRVTITADESTSTAYMELSSLRSEDTAVYYCARGVASWYLDYWGQGTLVTVSSTREQKLISEEDGSGIQNPDPAVYQLRDSKSSDKSVCLFTDFDSQTNVSQSKDSDVYITDKCVLDMRSMDFKSNSAVAWSNKSDFACANAFNNSIIPEDTFFPSPESSCDVKLVEKSFETDTNLNFQNLSVIGFRILLLKVAGFNLLMTLRLWSSRAKRSGSGVKQTLNFDLLKLAGDVESNPGPSRGHMAKPLSQEESTLIERATATINSIPISEDYSVASAALSSDGRIFTGVNVYHFTGGPCAELVVLGTAAAAAAGNLTCIVAIGNENRGILSPCGRCRQVLLDLHPGIKAIVKDSDGQPTAVGIRELLPSGYVWEG

SEQ ID NO: 19252 - protein, 293 aa, Artificial Sequence
  Synthetic Polypeptide
MDWIWRILFLVGAATGAHSFEQVQLVQSGAEVKKPGSSVKVSCKASGGTFSSYGISWVRQAPGQGLEWMGWISAIFGTANYAQKFQGRVTITADESTSTAYMELSSLRSEDTAVYYCARGVASWYLDYWGQGTLVTVSSTREQKLISEEDGSGIQNPDPAVYQLRDSKSSDKSVCLFTDFDSQTNVSQSKDSDVYITDKCVLDMRSMDFKSNSAVAWSNKSDFACANAFNNSIIPEDTFFPSPESSCDVKLVEKSFETDTNLNFQNLSVIGFRILLLKVAGFNLLMTLRLWSS

SEQ ID NO: 19253 - protein, 640 aa, Artificial Sequence
  Synthetic Polypeptide
MALPVTALLLPLALLLHAARPDIQMTQSPSSLSASVGDRVTITCRASQSINKWLNWYQQKPGKAPKLLIYAASSLQSGVPSRFSGSGSGTDFTLTISSLQPEDFATYYCQQDYNFPYTFGQGTKVEIKRGGGGSGGGGSGGGGSQVQLVQSGAEVKKPGSSVKVSCKASGGTFSSYGISWVRQAPGQGLEWMGWISAIFGTANYAQKFQGRVTITADESTSTAYMELSSLRSEDTAVYYCARGVASWYLDYWGQGTLVTVSSTRGSGIQNPDPAVYQLRDSKSSDKSVCLFTDFDSQTNVSQSKDSDVYITDKTVLDMRSMDFKSNSAVAWSNKSDFACANAFNNSIIPEDTFFPSSDVPCDVKLVEKSFETDTNLNFQNLSVIGFRILLLKVAGFNLLMTLRLWSSRAKRSGSGVKQTLNFDLLKLAGDVESNPGPSRGHMTEYKPTVRLATRDDVPRAVRTLAAAFADYPATRHTVDPDRHIERVTELQELFLTRVGLDIGKVWVADDGAAVAVWTTPESVEAGAVFAEIGPRMAELSGSRLAAQQQMEGLLAPHRPKEPAWFLATVGVSPDHQGKGLGSAVVLPGVEAAERAGVPAFLETSAPRNLPFYERLGFTVTADVEVPEGPRTWCMTRKPGA

SEQ ID NO: 19254 - protein, 672 aa, Artificial Sequence
  Synthetic Polypeptide
MALPVTALLLPLALLLHAARPDIQMTQSPSSLSASVGDRVTITCRASQSINKWLNWYQQKPGKAPKLLIYAASSLQSGVPSRFSGSGSGTDFTLTISSLQPEDFATYYCQQDYNFPYTFGQGTKVEIKRGGGGSGGGGSGGGGSQVQLVQSGAEVKKPGSSVKVSCKASGGTFSSYGISWVRQAPGQGLEWMGWISAIFGTANYAQKFQGRVTITADESTSTAYMELSSLRSEDTAVYYCARGVASWYLDYWGQGTLVTVSSLEDLKNVFPPEVAVFEPSKAEIAHTQKATLVCLATGFYPDHVELSWWVNGKEVHSGVSTDPQPLKEQPALNDSRYCLSSRLRVSATFWQNPRNHFRCQVQFYGLSENDEWTQDRAKPVTQIVSAEAWGRADCGITSASYHQGVLSATILYEILLGKATLYAVLVSALVLMAMVKRKDSRGRAKRSGSGATNFSLLKQAGDVEENPGPTRGHMTEYKPTVRLATRDDVPRAVRTLAAAFADYPATRHTVDPDRHIERVTELQELFLTRVGLDIGKVWVADDGAAVAVWTTPESVEAGAVFAEIGPRMAELSGSRLAAQQQMEGLLAPHRPKEPAWFLATVGVSPDHQGKGLGSAVVLPGVEAAERAGVPAFLETSAPRNLPFYERLGFTVTADVEVPEGPRTWCMTRKPGA

SEQ ID NO: 19255 - protein, 695 aa, Artificial Sequence
  Synthetic Polypeptide
MALPVTALLLPLALLLHAARPDIQMTQSPSSLSASVGDRVTITCRASQSINKWLNWYQQKPGKAPKLLIYAASSLQSGVPSRFSGSGSGTDFTLTISSLQPEDFATYYCQQDYNFPYTFGQGTKVEIKRGGGGSGGGGSGGGGSQVQLVQSGAEVKKPGSSVKVSCKASGGTFSSYGISWVRQAPGQGLEWMGWISAIFGTANYAQKFQGRVTITADESTSTAYMELSSLRSEDTAVYYCARGVASWYLDYWGQGTLVTVSSTRGSGGGGSGGGGSGDGNEEMGGITQTPYKVSISGTTVILTCPQYPGSEILWQHNDKNIGGDEDDKNIGSDEDHLSLKEFSELEQSGYYVCYPRGSKPEDANFYLYLRARVCENCMEMDVMSVATIVIVDICITGGLLLLVYYWSKNRKAKAKPVTRGAGAGGRQRGQNKERPPPVPNPDYEPIRKGQRDLYSGLNQRRIRAKRSGSGVKQTLNFDLLKLAGDVESNPGPSRGHMTEYKPTVRLATRDDVPRAVRTLAAAFADYPATRHTVDPDRHIERVTELQELFLTRVGLDIGKVWVADDGAAVAVWTTPESVEAGAVFAEIGPRMAELSGSRLAAQQQMEGLLAPHRPKEPAWFLATVGVSPDHQGKGLGSAVVLPGVEAAERAGVPAFLETSAPRNLPFYERLGFTVTADVEVPEGPRTWCMTRKPGA

SEQ ID NO: 19256 - protein, 660 aa, Artificial Sequence
  Synthetic Polypeptide
MALPVTALLLPLALLLHAARPDIQMTQSPSSLSASVGDRVTITCRASQSINKWLNWYQQKPGKAPKLLIYAASSLQSGVPSRFSGSGSGTDFTLTISSLQPEDFATYYCQQDYNFPYTFGQGTKVEIKRGGGGSGGGGSGGGGSQVQLVQSGAEVKKPGSSVKVSCKASGGTFSSYGISWVRQAPGQGLEWMGWISAIFGTANYAQKFQGRVTITADESTSTAYMELSSLRSEDTAVYYCARGVASWYLDYWGQGTLVTVSSTRGSGGGGSGGGGSGFKIPIEELEDRVFVNCNTSITWVEGTVGTLLSDITRLDLGKRILDPRGIYRCNGTDIYKDKESTVQVHYRMCQSCVELDPATVAGIIVTDVIATLLLALGVFCFAGHETGRLSGAADTQALLRNDQVYQPLRDRDDAQYSHLGGNWARNKRAKRSGSGVKQTLNFDLLKLAGDVESNPGPSRGHMTEYKPTVRLATRDDVPRAVRTLAAAFADYPATRHTVDPDRHIERVTELQELFLTRVGLDIGKVWVADDGAAVAVWTTPESVEAGAVFAEIGPRMAELSGSRLAAQQQMEGLLAPHRPKEPAWFLATVGVSPDHQGKGLGSAVVLPGVEAAERAGVPAFLETSAPRNLPFYERLGFTVTADVEVPEGPRTWCMTRKPGA

SEQ ID NO: 19257 - protein, 670 aa, Artificial Sequence
  Synthetic Polypeptide
MALPVTALLLPLALLLHAARPDIQMTQSPSSLSASVGDRVTITCRASQSINKWLNWYQQKPGKAPKLLIYAASSLQSGVPSRFSGSGSGTDFTLTISSLQPEDFATYYCQQDYNFPYTFGQGTKVEIKRGGGGSGGGGSGGGGSQVQLVQSGAEVKKPGSSVKVSCKASGGTFSSYGISWVRQAPGQGLEWMGWISAIFGTANYAQKFQGRVTITADESTSTAYMELSSLRSEDTAVYYCARGVASWYLDYWGQGTLVTVSSTRGSGGGGSGGGGSGQSIKGNHLVKVYDYQEDGSVLLTCDAEAKNITWFKDGKMIGFLTEDKKKWNLGSNAKDPRGMYQCKGSQNKSKPLQVYYRMCQNCIELNAATISGFLFAEIVSIFVLAVGVYFIAGQDGVRQSRASDKQTLLPNDQLYQPLKDREDDQYSHLQGNQLRRNRAKRSGSGVKQTLNFDLLKLAGDVESNPGPSRGHMTEYKPTVRLATRDDVPRAVRTLAAAFADYPATRHTVDPDRHIERVTELQELFLTRVGLDIGKVWVADDGAAVAVWTTPESVEAGAVFAEIGPRMAELSGSRLAAQQQMEGLLAPHRPKEPAWFLATVGVSPDHQGKGLGSAVVLPGVEAAERAGVPAFLETSAPRNLPFYERLGFTVTADVEVPEGPRTWCMTRKPGA

SEQ ID NO: 19258 - protein, 653 aa, Artificial Sequence
  Synthetic Polypeptide
MALPVTALLLPLALLLHAARPDIQMTQSPSSLSASVGDRVTITCRASQSINKWLNWYQQKPGKAPKLLIYAASSLQSGVPSRFSGSGSGTDFTLTISSLQPEDFATYYCQQDYNFPYTFGQGTKVEIKRGGGGSGGGGSGGGGSQVQLVQSGAEVKKPGSSVKVSCKASGGTFSSYGISWVRQAPGQGLEWMGWISAIFGTANYAQKFQGRVTITADESTSTAYMELSSLRSEDTAVYYCARGVASWYLDYWGQGTLVTVSSTRGSGGGGSGGGGSGQSFGLLDPKLCYLLDGILFIYGVILTALFLRVKFSRSADAPAYQQGQNQLYNELNLGRREEYDVLDKRRGRDPEMGGKPQRRKNPQEGLYNELQKDKMAEAYSEIGMKGERRRGKGHDGLYQGLSTATKDTYDALHMQALPPRRAKRSGSGVKQTLNFDLLKLAGDVESNPGPSRGHMTEYKPTVRLATRDDVPRAVRTLAAAFADYPATRHTVDPDRHIERVTELQELFLTRVGLDIGKVWVADDGAAVAVWTTPESVEAGAVFAEIGPRMAELSGSRLAAQQQMEGLLAPHRPKEPAWFLATVGVSPDHQGKGLGSAVVLPGVEAAERAGVPAFLETSAPRNLPFYERLGFTVTADVEVPEGPRTWCMTRKPGA

SEQ ID NO: 19259 - protein, 754 aa, Artificial Sequence
  Synthetic Polypeptide
MALPVTALLLPLALLLHAARPEVQLVESGGGLVQPGGSLRLSCAASGFSFSDFWMSWVRQAPGKGLEWVATISQAGSEKDYVDSVKGRFTISRDNAKKSLYLQMNSLRAEDTAVYYCASGVYSFDYRGQGTLVTVSSGTGGGGSGGGGSGGGGSEFDIQMTQSPSSLSASVGDRVTITCRASQSINKWLNWYQQKPGKAPKLLIYAASSLQSGVPSRFSGSGSGTDFTLTISSLQPEDFATYYCQQDYNFPYTFGQGTKVEIKRLEDLKNVFPPEVAVFEPSEAEISHTQKATLVCLATGFYPDHVELSWWVNGKEVHSGVCTDPQPLKEQPALNDSRYCLSSRLRVSATFWQNPRNHFRCQVQFYGLSENDEWTQDRAKPVTQIVSAEAWGRADCGFTSESYQQGVLSATILYEILLGKATLYAVLVSALVLMAMVKRKDSRGRAKRSGSGATNFSLLKQAGDVEENPGPTSMDWIWRILFLVGAATGAHSFEQVQLVQSGAEVKKPGSSVKVSCKASGGTFSSYGISWVRQAPGQGLEWMGWISAIFGTANYAQKFQGRVTITADESTSTAYMELSSLRSEDTAVYYCARGVASWYLDYWGQGTLVTVSSTRIQNPDPAVYQLRDSKSSDKSVCLFTDFDSQTNVSQSKDSDVYITDKCVLDMRSMDFKSNSAVAWSNKSDFACANAFNNSIIPEDTFFPSPESSCDVKLVEKSFETDTNLNFQNLSVIGFRILLLKVAGFNLLMTLRLWSS

SEQ ID NO: 19260 - protein, 758 aa, Artificial Sequence
  Synthetic Polypeptide
MALPVTALLLPLALLLHAARPEVQLVESGGGLVQPGGSLRLSCAASGFSFSDFWMSWVRQAPGKGLEWVATISQAGSEKDYVDSVKGRFTISRDNAKKSLYLQMNSLRAEDTAVYYCASGVYSFDYRGQGTLVTVSSGTGGGGSGGGGSGGGGSEFDIQMTQSPSSLSASVGDRVTITCRASQSINKWLNWYQQKPGKAPKLLIYAASSLQSGVPSRFSGSGSGTDFTLTISSLQPEDFATYYCQQDYNFPYTFGQGTKVEIKRLEIQNPDPAVYQLRDSKSSDKSVCLFTDFDSQTNVSQSKDSDVYITDKCVLDMRSMDFKSNSAVAWSNKSDFACANAFNNSIIPEDTFFPSPESSCDVKLVEKSFETDTNLNFQNLSVIGFRILLLKVAGFNLLMTLRLWSSRAKRSGSGVKQTLNFDLLKLAGDVESNPGPTSMDWIWRILFLVGAATGAHSFEQVQLVQSGAEVKKPGSSVKVSCKASGGTFSSYGISWVRQAPGQGLEWMGWISAIFGTANYAQKFQGRVTITADESTSTAYMELSSLRSEDTAVYYCARGVASWYLDYWGQGTLVTVSSTREDLKNVFPPEVAVFEPSEAEISHTQKATLVCLATGFYPDHVELSWWVNGKEVHSGVCTDPQPLKEQPALNDSRYCLSSRLRVSATFWQNPRNHFRCQVQFYGLSENDEWTQDRAKPVTQIVSAEAWGRADCGFTSESYQQGVLSATILYEILLGKATLYAVLVSALVLMAMVKRKDSRG

SEQ ID NO: 19261 - protein, 950 aa, Artificial Sequence
  Synthetic Polypeptide
MALPVTALLLPLALLLHAARPEVQLVESGGGLVQPGGSLRLSCAASGFSFSDFWMSWVRQAPGKGLEWVATISQAGSEKDYVDSVKGRFTISRDNAKKSLYLQMNSLRAEDTAVYYCASGVYSFDYRGQGTLVTVSSGTGGGGSGGGGSGGGGSEFDIQMTQSPSSLSASVGDRVTITCRASQSINKWLNWYQQKPGKAPKLLIYAASSLQSGVPSRFSGSGSGTDFTLTISSLQPEDFATYYCQQDYNFPYTFGQGTKVEIKRLEDLKNVFPPEVAVFEPSEAEISHTQKATLVCLATGFYPDHVELSWWVNGKEVHSGVSTDPQPLKEQPALNDSRYCLSSRLRVSATFWQNPRNHFRCQVQFYGLSENDEWTQDRAKPVTQIVSAEAWGRADCGSQSFGLLDPKLCYLLDGILFIYGVILTALFLRVKFSRSADAPAYQQGQNQLYNELNLGRREEYDVLDKRRGRDPEMGGKPQRRKNPQEGLYNELQKDKMAEAYSEIGMKGERRRGKGHDGLYQGLSTATKDTYDALHMQALPPRRAKRSGSGATNFSLLKQAGDVEENPGPTSMDWIWRILFLVGAATGAHSFEQVQLVQSGAEVKKPGSSVKVSCKASGGTFSSYGISWVRQAPGQGLEWMGWISAIFGTANYAQKFQGRVTITADESTSTAYMELSSLRSEDTAVYYCARGVASWYLDYWGQGTLVTVSSTRIQNPDPAVYQLRDSKSSDKSVCLFTDFDSQTNVSQSKDSDVYITDKTVLDMRSMDFKSNSAVAWSNKSDFACANAFNNSIIPEDTFFPSPESSCGTQSFGLLDPKLCYLLDGILFIYGVILTALFLRVKFSRSADAPAYQQGQNQLYNELNLGRREEYDVLDKRRGRDPEMGGKPQRRKNPQEGLYNELQKDKMAEAYSEIGMKGERRRGKGHDGLYQGLSTATKDTYDALHMQALPPR

SEQ ID NO: 19262 - protein, 780 aa, Artificial Sequence
  Synthetic Polypeptide
MALPVTALLLPLALLLHAARPEVQLVESGGGLVQPGGSLRLSCAASGFSFSDFWMSWVRQAPGKGLEWVATISQAGSEKDYVDSVKGRFTISRDNAKKSLYLQMNSLRAEDTAVYYCASGVYSFDYRGQGTLVTVSSGTGGGGSGGGGSGGGGSEFDIQMTQSPSSLSASVGDRVTITCRASQSINKWLNWYQQKPGKAPKLLIYAASSLQSGVPSRFSGSGSGTDFTLTISSLQPEDFATYYCQQDYNFPYTFGQGTKVEIKRLEGQPKANPTVTLFPPSSEELQANKATLVCLISDFYPGAVTVAWKADGSPVKAGVETTKPSKQSNNKYAASSYLSLTPEQWKSHRSYSCQVTHEGSTVEKTVAPTECSPIKTDVITMDPKDNCSKDANDTLLLQLTNTSAYYMYLLLLLKSVVYFAIITCCLLRRTAFCCNGEKSRAKRSGSGATNFSLLKQAGDVEENPGPTSMDWIWRILFLVGAATGAHSFEQVQLVQSGAEVKKPGSSVKVSCKASGGTFSSYGISWVRQAPGQGLEWMGWISAIFGTANYAQKFQGRVTITADESTSTAYMELSSLRSEDTAVYYCARGVASWYLDYWGQGTLVTVSSTRASTKGPSVFPLAPSSKSTSGGTAALGCLVKDYFPEPVTVSWNSGALTSGVHTFPAVLQSSGLYSLSSVVTVPSSSLGTQTYICNVNHKPSNTKVDKRVEPKSCEVKTDSTDHVKPKETENTKQPSKSCHKPKAIVHTEKVNMMSLTVLGLRMLFAKTVAVNFLLTAKLFFL

SEQ ID NO: 19263 - protein, 761 aa, Artificial Sequence
  Synthetic Polypeptide
MALPVTALLLPLALLLHAARPEVQLVESGGGLVQPGGSLRLSCAASGFSFSDFWMSWVRQAPGKGLEWVATISQAGSEKDYVDSVKGRFTISRDNAKKSLYLQMNSLRAEDTAVYYCASGVYSFDYRGQGTLVTVSSGTGGGGSGGGGSGGGGSEFDIQMTQSPSSLSASVGDRVTITCRASQSINKWLNWYQQKPGKAPKLLIYAASSLQSGVPSRFSGSGSGTDFTLTISSLQPEDFATYYCQQDYNFPYTFGQGTKVEIKRLEGQPKANPTVTLFPPSSEELQANKATLVCLISDFYPGAVTVAWKADGSPVKAGVETTKPSKQSNNKYAASSYLSLTPEQWKSHRSYSCQVTHEGSTVEKTVAPTECSGRADCGFTSESYQQGVLSATILYEILLGKATLYAVLVSALVLMAMVKRKDSRGRAKRSGSGVKQTLNFDLLKLAGDVESNPGPTSMDWIWRILFLVGAATGAHSFEQVQLVQSGAEVKKPGSSVKVSCKASGGTFSSYGISWVRQAPGQGLEWMGWISAIFGTANYAQKFQGRVTITADESTSTAYMELSSLRSEDTAVYYCARGVASWYLDYWGQGTLVTVSSTRASTKGPSVFPLAPSSKSTSGGTAALGCLVKDYFPEPVTVSWNSGALTSGVHTFPAVLQSSGLYSLSSVVTVPSSSLGTQTYICNVNHKPSNTKVDKRVEPKSCIPEDTFFPSPESSCDVKLVEKSFETDTNLNFQNLSVIGFRILLLKVAGFNLLMTLRLWSS

SEQ ID NO: 19264 - protein, 895 aa, Artificial Sequence
  Synthetic Polypeptide
MALPVTALLLPLALLLHAARPEVQLVESGGGLVQPGGSLRLSCAASGFSFSDFWMSWVRQAPGKGLEWVATISQAGSEKDYVDSVKGRFTISRDNAKKSLYLQMNSLRAEDTAVYYCASGVYSFDYRGQGTLVTVSSGTGGGGSGGGGSGGGGSEFDIQMTQSPSSLSASVGDRVTITCRASQSINKWLNWYQQKPGKAPKLLIYAASSLQSGVPSRFSGSGSGTDFTLTISSLQPEDFATYYCQQDYNFPYTFGQGTKVEIKRLEIQNPDPAVYQLRDSKSSDKSVCLFTDFDSQTNVSQSKDSDVYITDKCVLDMRSMDFKSNSAVAWSNKSDFACANAFNNSIIPEDTFFPSPESSCDVKLVEKSFETDTNLNFQNLSVIGFRILLLKVAGFNLLMTLRLWSSRAKRSGSGVKQTLNFDLLKLAGDVESNPGPTSMDWIWRILFLVGAATGAHSGPQLQLQESGPGLVKPSETLSLTCTVSGDSISSGDYYWGWIRQPPGKGLEWIGHIYYSGVTYYNPSLKSRVTISVDTSRNQFSLKLSSVTAADTAVYYCTREDSSNWRSRGQGTLVTVSSGSGGGGSGGGGSGGGGSFEQVQLVQSGAEVKKPGSSVKVSCKASGGTFSSYGISWVRQAPGQGLEWMGWISAIFGTANYAQKFQGRVTITADESTSTAYMELSSLRSEDTAVYYCARGVASWYLDYWGQGTLVTVSSTREDLKNVFPPEVAVFEPSEAEISHTQKATLVCLATGFYPDHVELSWWVNGKEVHSGVCTDPQPLKEQPALNDSRYCLSSRLRVSATFWQNPRNHFRCQVQFYGLSENDEWTQDRAKPVTQIVSAEAWGRADCGFTSESYQQGVLSATILYEILLGKATLYAVLVSALVLMAMVKRKDSRG

SEQ ID NO: 19265 - protein, 1087 aa, Artificial Sequence
  Synthetic Polypeptide
MALPVTALLLPLALLLHAARPEVQLVESGGGLVQPGGSLRLSCAASGFSFSDFWMSWVRQAPGKGLEWVATISQAGSEKDYVDSVKGRFTISRDNAKKSLYLQMNSLRAEDTAVYYCASGVYSFDYRGQGTLVTVSSGTGGGGSGGGGSGGGGSEFDIQMTQSPSSLSASVGDRVTITCRASQSINKWLNWYQQKPGKAPKLLIYAASSLQSGVPSRFSGSGSGTDFTLTISSLQPEDFATYYCQQDYNFPYTFGQGTKVEIKRLEDLKNVFPPEVAVFEPSEAEISHTQKATLVCLATGFYPDHVELSWWVNGKEVHSGVSTDPQPLKEQPALNDSRYCLSSRLRVSATFWQNPRNHFRCQVQFYGLSENDEWTQDRAKPVTQIVSAEAWGRADCGSQSFGLLDPKLCYLLDGILFIYGVILTALFLRVKFSRSADAPAYQQGQNQLYNELNLGRREEYDVLDKRRGRDPEMGGKPQRRKNPQEGLYNELQKDKMAEAYSEIGMKGERRRGKGHDGLYQGLSTATKDTYDALHMQALPPRRAKRSGSGATNFSLLKQAGDVEENPGPTSMDWIWRILFLVGAATGAHSGPQLQLQESGPGLVKPSETLSLTCTVSGDSISSGDYYWGWIRQPPGKGLEWIGHIYYSGVTYYNPSLKSRVTISVDTSRNQFSLKLSSVTAADTAVYYCTREDSSNWRSRGQGTLVTVSSGSGGGGSGGGGSGGGGSFEQVQLVQSGAEVKKPGSSVKVSCKASGGTFSSYGISWVRQAPGQGLEWMGWISAIFGTANYAQKFQGRVTITADESTSTAYMELSSLRSEDTAVYYCARGVASWYLDYWGQGTLVTVSSTRIQNPDPAVYQLRDSKSSDKSVCLFTDFDSQTNVSQSKDSDVYITDKTVLDMRSMDFKSNSAVAWSNKSDFACANAFNNSIIPEDTFFPSPESSCGTQSFGLLDPKLCYLLDGILFIYGVILTALFLRVKFSRSADAPAYQQGQNQLYNELNLGRREEYDVLDKRRGRDPEMGGKPQRRKNPQEGLYNELQKDKMAEAYSEIGMKGERRRGKGHDGLYQGLSTATKDTYDALHMQALPPR

SEQ ID NO: 19266 - protein, 917 aa, Artificial Sequence
  Synthetic Polypeptide
MALPVTALLLPLALLLHAARPEVQLVESGGGLVQPGGSLRLSCAASGFSFSDFWMSWVRQAPGKGLEWVATISQAGSEKDYVDSVKGRFTISRDNAKKSLYLQMNSLRAEDTAVYYCASGVYSFDYRGQGTLVTVSSGTGGGGSGGGGSGGGGSEFDIQMTQSPSSLSASVGDRVTITCRASQSINKWLNWYQQKPGKAPKLLIYAASSLQSGVPSRFSGSGSGTDFTLTISSLQPEDFATYYCQQDYNFPYTFGQGTKVEIKRLEGQPKANPTVTLFPPSSEELQANKATLVCLISDFYPGAVTVAWKADGSPVKAGVETTKPSKQSNNKYAASSYLSLTPEQWKSHRSYSCQVTHEGSTVEKTVAPTECSPIKTDVITMDPKDNCSKDANDTLLLQLTNTSAYYMYLLLLLKSVVYFAIITCCLLRRTAFCCNGEKSRAKRSGSGATNFSLLKQAGDVEENPGPTSMDWIWRILFLVGAATGAHSGPQLQLQESGPGLVKPSETLSLTCTVSGDSISSGDYYWGWIRQPPGKGLEWIGHIYYSGVTYYNPSLKSRVTISVDTSRNQFSLKLSSVTAADTAVYYCTREDSSNWRSRGQGTLVTVSSGSGGGGSGGGGSGGGGSFEQVQLVQSGAEVKKPGSSVKVSCKASGGTFSSYGISWVRQAPGQGLEWMGWISAIFGTANYAQKFQGRVTITADESTSTAYMELSSLRSEDTAVYYCARGVASWYLDYWGQGTLVTVSSTRASTKGPSVFPLAPSSKSTSGGTAALGCLVKDYFPEPVTVSWNSGALTSGVHTFPAVLQSSGLYSLSSVVTVPSSSLGTQTYICNVNHKPSNTKVDKRVEPKSCEVKTDSTDHVKPKETENTKQPSKSCHKPKAIVHTEKVNMMSLTVLGLRMLFAKTVAVNFLLTAKLFFL

SEQ ID NO: 19267 - protein, 898 aa, Artificial Sequence
  Synthetic Polypeptide
MALPVTALLLPLALLLHAARPEVQLVESGGGLVQPGGSLRLSCAASGFSFSDFWMSWVRQAPGKGLEWVATISQAGSEKDYVDSVKGRFTISRDNAKKSLYLQMNSLRAEDTAVYYCASGVYSFDYRGQGTLVTVSSGTGGGGSGGGGSGGGGSEFDIQMTQSPSSLSASVGDRVTITCRASQSINKWLNWYQQKPGKAPKLLIYAASSLQSGVPSRFSGSGSGTDFTLTISSLQPEDFATYYCQQDYNFPYTFGQGTKVEIKRLEGQPKANPTVTLFPPSSEELQANKATLVCLISDFYPGAVTVAWKADGSPVKAGVETTKPSKQSNNKYAASSYLSLTPEQWKSHRSYSCQVTHEGSTVEKTVAPTECSGRADCGFTSESYQQGVLSATILYEILLGKATLYAVLVSALVLMAMVKRKDSRGRAKRSGSGVKQTLNFDLLKLAGDVESNPGPTSMDWIWRILFLVGAATGAHSGPQLQLQESGPGLVKPSETLSLTCTVSGDSISSGDYYWGWIRQPPGKGLEWIGHIYYSGVTYYNPSLKSRVTISVDTSRNQFSLKLSSVTAADTAVYYCTREDSSNWRSRGQGTLVTVSSGSGGGGSGGGGSGGGGSFEQVQLVQSGAEVKKPGSSVKVSCKASGGTFSSYGISWVRQAPGQGLEWMGWISAIFGTANYAQKFQGRVTITADESTSTAYMELSSLRSEDTAVYYCARGVASWYLDYWGQGTLVTVSSTRASTKGPSVFPLAPSSKSTSGGTAALGCLVKDYFPEPVTVSWNSGALTSGVHTFPAVLQSSGLYSLSSVVTVPSSSLGTQTYICNVNHKPSNTKVDKRVEPKSCIPEDTFFPSPESSCDVKLVEKSFETDTNLNFQNLSVIGFRILLLKVAGFNLLMTLRLWSS

SEQ ID NO: 19268 - protein, 755 aa, Artificial Sequence
  Synthetic Polypeptide
MALPVTALLLPLALLLHAARPEVQVLESGGGLVQPGGSLRLSCAASGFTFSNFAMSWVRQAPGKGLEWVSTISGSAGTTDYADSVKGRFTISRDNSKKTLYLQMNSLRVEDTAVYYCADGRGPFFDYRGQGTLVTVSSGTGGGGSGGGGSGGGGSEFDIQMTQSPSSLSASVGDRVTITCRASQSINKWLNWYQQKPGKAPKLLIYAASSLQSGVPSRFSGSGSGTDFTLTISSLQPEDFATYYCQQDYNFPYTFGQGTKVEIKRLEDLKNVFPPEVAVFEPSEAEISHTQKATLVCLATGFYPDHVELSWWVNGKEVHSGVCTDPQPLKEQPALNDSRYCLSSRLRVSATFWQNPRNHFRCQVQFYGLSENDEWTQDRAKPVTQIVSAEAWGRADCGFTSESYQQGVLSATILYEILLGKATLYAVLVSALVLMAMVKRKDSRGRAKRSGSGATNFSLLKQAGDVEENPGPTSMDWIWRILFLVGAATGAHSFEQVQLVQSGAEVKKPGSSVKVSCKASGGTFSSYGISWVRQAPGQGLEWMGWISAIFGTANYAQKFQGRVTITADESTSTAYMELSSLRSEDTAVYYCARGVASWYLDYWGQGTLVTVSSTRIQNPDPAVYQLRDSKSSDKSVCLFTDFDSQTNVSQSKDSDVYITDKCVLDMRSMDFKSNSAVAWSNKSDFACANAFNNSIIPEDTFFPSPESSCDVKLVEKSFETDTNLNFQNLSVIGFRILLLKVAGFNLLMTLRLWSS

SEQ ID NO: 19269 - protein, 756 aa, Artificial Sequence
  Synthetic Polypeptide
MALPVTALLLPLALLLHAARPDIQMTQSPSSLSASVGDRVTITCRASQSINKWLNWYQQKPGKAPKLLIYAASSLQSGVPSRFSGSGSGTDFTLTISSLQPEDFATYYCQQDYNFPYTFGQGTKVEIKRLEDLKNVFPPEVAVFEPSEAEISHTQKATLVCLATGFYPDHVELSWWVNGKEVHSGVCTDPQPLKEQPALNDSRYCLSSRLRVSATFWQNPRNHFRCQVQFYGLSENDEWTQDRAKPVTQIVSAEAWGRADCGFTSESYQQGVLSATILYEILLGKATLYAVLVSALVLMAMVKRKDSRGRAKRSGSGATNFSLLKQAGDVEENPGPTSMDWIWRILFLVGAATGAHSGPEVQLVESGGGLVQAGGSLRLSCAASGRTFSMGWFRQAPGKEREFVAAITYSGGSPYYADSVKGRFTISRDNAKNTVYLQMNSLKPEDTAVYYCAANPTYGSDWNAENWGQGTQVTVSSGSGGGGSGGGGSGGGGSFEQVQLVQSGAEVKKPGSSVKVSCKASGGTFSSYGISWVRQAPGQGLEWMGWISAIFGTANYAQKFQGRVTITADESTSTAYMELSSLRSEDTAVYYCARGVASWYLDYWGQGTLVTVSSTRIQNPDPAVYQLRDSKSSDKSVCLFTDFDSQTNVSQSKDSDVYITDKCVLDMRSMDFKSNSAVAWSNKSDFACANAFNNSIIPEDTFFPSPESSCDVKLVEKSFETDTNLNFQNLSVIGFRILLLKVAGFNLLMTLRLWSS

SEQ ID NO: 19270 - protein, 883 aa, Artificial Sequence
  Synthetic Polypeptide
MALPVTALLLPLALLLHAARPDIQMTQSPSSLSASVGDRVTITCRASQSINKWLNWYQQKPGKAPKLLIYAASSLQSGVPSRFSGSGSGTDFTLTISSLQPEDFATYYCQQDYNFPYTFGQGTKVEIKRLEDLKNVFPPEVAVFEPSEAEISHTQKATLVCLATGFYPDHVELSWWVNGKEVHSGVCTDPQPLKEQPALNDSRYCLSSRLRVSATFWQNPRNHFRCQVQFYGLSENDEWTQDRAKPVTQIVSAEAWGRADCGFTSESYQQGVLSATILYEILLGKATLYAVLVSALVLMAMVKRKDSRGRAKRSGSGATNFSLLKQAGDVEENPGPTSMDWIWRILFLVGAATGAHSQLQLQESGPGLVKPSETLSLTCTVSGGSISSGDYYWGWIRQPPGKGLEWIGSISYSGSTYYNPSLKSRVTISVDTSRNQFSLKLSSVTAADTAVYYCTREDSSNWRSRGQGTLVTVSSSGGGGSGGGGSEVQLVESGGGLVQAGGSLRLSCAASGRTFSMGWFRQAPGKEREFVAAITYSGGSPYYADSVKGRFTISRDNAKNTVYLQMNSLKPEDTAVYYCAANPTYGSDWNAENWGQGTQVTVSSGSGGGGSGGGGSGGGGSFEQVQLVQSGAEVKKPGSSVKVSCKASGGTFSSYGISWVRQAPGQGLEWMGWISAIFGTANYAQKFQGRVTITADESTSTAYMELSSLRSEDTAVYYCARGVASWYLDYWGQGTLVTVSSTRIQNPDPAVYQLRDSKSSDKSVCLFTDFDSQTNVSQSKDSDVYITDKCVLDMRSMDFKSNSAVAWSNKSDFACANAFNNSIIPEDTFFPSPESSCDVKLVEKSFETDTNLNFQNLSVIGFRILLLKVAGFNLLMTLRLWSS

SEQ ID NO: 19271 - protein, 892 aa, Artificial Sequence
  Synthetic Polypeptide
MALPVTALLLPLALLLHAARPEVQVLESGGGLVQPGGSLRLSCAASGFTFSNFAMSWVRQAPGKGLEWVSTISGSAGTTDYADSVKGRFTISRDNSKKTLYLQMNSLRVEDTAVYYCADGRGPFFDYRGQGTLVTVSSGTGGGGSGGGGSGGGGSEFDIQMTQSPSSLSASVGDRVTITCRASQSINKWLNWYQQKPGKAPKLLIYAASSLQSGVPSRFSGSGSGTDFTLTISSLQPEDFATYYCQQDYNFPYTFGQGTKVEIKRLEDLKNVFPPEVAVFEPSEAEISHTQKATLVCLATGFYPDHVELSWWVNGKEVHSGVCTDPQPLKEQPALNDSRYCLSSRLRVSATFWQNPRNHFRCQVQFYGLSENDEWTQDRAKPVTQIVSAEAWGRADCGFTSESYQQGVLSATILYEILLGKATLYAVLVSALVLMAMVKRKDSRGRAKRSGSGATNFSLLKQAGDVEENPGPTSMDWIWRILFLVGAATGAHSGPEVQLVESGGGLVQAGGSLRLSCAASGRTFSMGWFRQAPGKEREFVAAITYSGGSPYYASSVRGRFTISRDNAKNTVYLQMNSLKPEDTAVYYCAANPTYGSDWNAENWGQGTQVTVSSGSGGGGSGGGGSGGGGSFEQVQLVQSGAEVKKPGSSVKVSCKASGGTFSSYGISWVRQAPGQGLEWMGWISAIFGTANYAQKFQGRVTITADESTSTAYMELSSLRSEDTAVYYCARGVASWYLDYWGQGTLVTVSSTRIQNPDPAVYQLRDSKSSDKSVCLFTDFDSQTNVSQSKDSDVYITDKCVLDMRSMDFKSNSAVAWSNKSDFACANAFNNSIIPEDTFFPSPESSCDVKLVEKSFETDTNLNFQNLSVIGFRILLLKVAGFNLLMTLRLWSS

SEQ ID NO: 19272 - protein, 723 aa, Artificial Sequence
  Synthetic Polypeptide
MALPVTALLLPLALLLHAARPQIVLSQSPAILSASPGEKVTMTCRASSSVSYIHWFQQKPGSSPKPWIYATSNLASGVPVRFSGSGSGTSYSLTISRVEAEDAATYYCQQWTSNPPTFGGGTKLEIKGGGGSGGGGSGGGGSQVQLQQPGAELVKPGASVKMSCKASGYTFTSYNMHWVKQTPGRGLEWIGAIYPGNGDTSYNQKFKGKATLTADKSSSTAYMQLSSLTSEDSAVYYCARSTYYGGDWYFNVWGAGTTVTVSTREQKLISEEDLAKPTTTPAPRPPTPAPTIASQPLSLRPEACRPAAGGAVHTRGLDFACDIYIWAPLAGTCGVLLLSLVITLYCKRGRKKLLYIFKQPFMRPVQTTQEEDGCSCRFPEEEEGGCELRVKFSRSADAPAYQQGQNQLYNELNLGRREEYDVLDKRRGRDPEMGGKPRRKNPQEGLYNELQKDKMAEAYSEIGMKGERRRGKGHDGLYQGLSTATKDTYDALHMQALPPRSSGSGEGRGSLLTCGDVEENPGPHMTEYKPTVRLATRDDVPRAVRTLAAAFADYPATRHTVDPDRHIERVTELQELFLTRVGLDIGKVWVADDGAAVAVWTTPESVEAGAVFAEIGPRMAELSGSRLAAQQQMEGLLAPHRPKEPAWFLATVGVSPDHQGKGLGSAVVLPGVEAAERAGVPAFLETSAPRNLPFYERLGFTVTADVEVPEGPRTWCMTRKPGA

SEQ ID NO: 19273 - protein, 717 aa, Artificial Sequence
  Synthetic Polypeptide
MALPVTALLLPLALLLHAARPQIVLSQSPAILSASPGEKVTMTCRASSSVSYIHWFQQKPGSSPKPWIYATSNLASGVPVRFSGSGSGTSYSLTISRVEAEDAATYYCQQWTSNPPTFGGGTKLEIKGGGGSGGGGSGGGGSQVQLQQPGAELVKPGASVKMSCKASGYTFTSYNMHWVKQTPGRGLEWIGAIYPGNGDTSYNQKFKGKATLTADKSSSTAYMQLSSLTSEDSAVYYCARSTYYGGDWYFNVWGAGTTVTVSTREQKLISEEDLKIEVMYPPPYLDNEKSNGTIIHVKGKHLCPSPLFPGPSKPFWVLVVVGGVLACYSLLVTVAFIIFWVRSKRSRLLHSDYMNMTPRRPGPTRKHYQPYAPPRDFAAYRSRVKFSRSADAPAYQQGQNQLYNELNLGRREEYDVLDKRRGRDPEMGGKPRRKNPQEGLYNELQKDKMAEAYSEIGMKGERRRGKGHDGLYQGLSTATKDTYDALHMQALPPRSSGSGEGRGSLLTCGDVEENPGPHMTEYKPTVRLATRDDVPRAVRTLAAAFADYPATRHTVDPDRHIERVTELQELFLTRVGLDIGKVWVADDGAAVAVWTTPESVEAGAVFAEIGPRMAELSGSRLAAQQQMEGLLAPHRPKEPAWFLATVGVSPDHQGKGLGSAVVLPGVEAAERAGVPAFLETSAPRNLPFYERLGFTVTADVEVPEGPRTWCMTRKPGA

SEQ ID NO: 19274 - protein, 494 aa, Artificial Sequence
  Synthetic Polypeptide
MALPVTALLLPLALLLHAARPQIVLSQSPAILSASPGEKVTMTCRASSSVSYIHWFQQKPGSSPKPWIYATSNLASGVPVRFSGSGSGTSYSLTISRVEAEDAATYYCQQWTSNPPTFGGGTKLEIKGGGGSGGGGSGGGGSQVQLQQPGAELVKPGASVKMSCKASGYTFTSYNMHWVKQTPGRGLEWIGAIYPGNGDTSYNQKFKGKATLTADKSSSTAYMQLSSLTSEDSAVYYCARSTYYGGDWYFNVWGAGTTVTVSTREQKLISEEDLKIEVMYPPPYLDNEKSNGTIIHVKGKHLCPSPLFPGPSKPFWVLVVVGGVLACYSLLVTVAFIIFWVRSKRSRLLHSDYMNMTPRRPGPTRKHYQPYAPPRDFAAYRSRVKFSRSADAPAYQQGQNQLYNELNLGRREEYDVLDKRRGRDPEMGGKPRRKNPQEGLYNELQKDKMAEAYSEIGMKGERRRGKGHDGLYQGLSTATKDTYDALHMQALPPR

SEQ ID NO: 19275 - protein, 500 aa, Artificial Sequence
  Synthetic Polypeptide
MALPVTALLLPLALLLHAARPQIVLSQSPAILSASPGEKVTMTCRASSSVSYIHWFQQKPGSSPKPWIYATSNLASGVPVRFSGSGSGTSYSLTISRVEAEDAATYYCQQWTSNPPTFGGGTKLEIKGGGGSGGGGSGGGGSQVQLQQPGAELVKPGASVKMSCKASGYTFTSYNMHWVKQTPGRGLEWIGAIYPGNGDTSYNQKFKGKATLTADKSSSTAYMQLSSLTSEDSAVYYCARSTYYGGDWYFNVWGAGTTVTVSTREQKLISEEDLAKPTTTPAPRPPTPAPTIASQPLSLRPEACRPAAGGAVHTRGLDFACDIYIWAPLAGTCGVLLLSLVITLYCKRGRKKLLYIFKQPFMRPVQTTQEEDGCSCRFPEEEEGGCELRVKFSRSADAPAYQQGQNQLYNELNLGRREEYDVLDKRRGRDPEMGGKPRRKNPQEGLYNELQKDKMAEAYSEIGMKGERRRGKGHDGLYQGLSTATKDTYDALHMQALPPR

SEQ ID NO: 19276 - protein, 500 aa, Artificial Sequence
  Synthetic Polypeptide
MALPVTALLLPLALLLHAARPQVQLQQPGAELVKPGASVKMSCKASGYTFTSYNMHWVKQTPGRGLEWIGAIYPGNGDTSYNQKFKGKATLTADKSSSTAYMQLSSLTSEDSAVYYCARSTYYGGDWYFNVWGAGTTVTVSGGGGSGGGGSGGGGSQIVLSQSPAILSASPGEKVTMTCRASSSVSYIHWFQQKPGSSPKPWIYATSNLASGVPVRFSGSGSGTSYSLTISRVEAEDAATYYCQQWTSNPPTFGGGTKLEIKTREQKLISEEDLAKPTTTPAPRPPTPAPTIASQPLSLRPEACRPAAGGAVHTRGLDFACDIYIWAPLAGTCGVLLLSLVITLYCKRGRKKLLYIFKQPFMRPVQTTQEEDGCSCRFPEEEEGGCELRVKFSRSADAPAYQQGQNQLYNELNLGRREEYDVLDKRRGRDPEMGGKPRRKNPQEGLYNELQKDKMAEAYSEIGMKGERRRGKGHDGLYQGLSTATKDTYDALHMQALPPR

SEQ ID NO: 19277 - protein, 913 aa, Artificial Sequence
  Synthetic Polypeptide
MALPVTALLLPLALLLHAARPQIVLSQSPAILSASPGEKVTMTCRASSSVSYIHWFQQKPGSSPKPWIYATSNLASGVPVRFSGSGSGTSYSLTISRVEAEDAATYYCQQWTSNPPTFGGGTKLEIKGGGGSGGGGSGGGGSQVQLQQPGAELVKPGASVKMSCKASGYTFTSYNMHWVKQTPGRGLEWIGAIYPGNGDTSYNQKFKGKATLTADKSSSTAYMQLSSLTSEDSAVYYCARSTYYGGDWYFNVWGAGTTVTVSTREQKLISEEDLAKPTTTPAPRPPTPAPTIASQPLSLRPEACRPAAGGAVHTRGLDFACDIYIWAPLAGTCGVLLLSLVITLYCGRARVKFSRSADAPAYQQGQNQLYNELNLGRREEYDVLDKRRGRDPEMGGKPRRKNPQEGLYNELQKDKMAEAYSEIGMKGERRRGKGHDGLYQGLSTATKDTYDALHMQALPPRSRGSGATNFSLLKQAGDVEENPGPGIHMATYEVLCEVARKLGTDDREVVLFLLNVFIPQPTLAQLIGALRALKEEGRLTFPLLAECLFRAGRRDLLRDLLHLDPRFLERHLAGTMSYFSPYQLTVLHVDGELCARDIRSLIFLSKDTIGSRSTPQTFLHWVYCMENLDLLGPTDVDALMSMLRSLSRVDLQRQVQTLMGLHLSGPSHSQHYRHTPLETDFYDYKDDDDKTSGSGEGRGSLLTCGDVEENPGPHMTEYKPTVRLATRDDVPRAVRTLAAAFADYPATRHTVDPDRHIERVTELQELFLTRVGLDIGKVWVADDGAAVAVWTTPESVEAGAVFAEIGPRMAELSGSRLAAQQQMEGLLAPHRPKEPAWFLATVGVSPDHQGKGLGSAVVLPGVEAAERAGVPAFLETSAPRNLPFYERLGFTVTADVEVPEGPRTWCMTRKPGA

SEQ ID NO: 19278 - protein, 853 aa, Artificial Sequence
  Synthetic Polypeptide
MALPVTALLLPLALLLHAARPQIVLSQSPAILSASPGEKVTMTCRASSSVSYIHWFQQKPGSSPKPWIYATSNLASGVPVRFSGSGSGTSYSLTISRVEAEDAATYYCQQWTSNPPTFGGGTKLEIKLEIQNPDPAVYQLRDSKSSDKSVCLFTDFDSQTNVSQSKDSDVYITDKCVLDMRSMDFKSNSAVAWSNKSDFACANAFNNSIIPEDTFFPSSDVPCDVKLVEKSFETDTNLNFQNLSVIGFRILLLKVAGFNLLMTLRLWSSRAKRSGSGVKQTLNFDLLKLAGDVESNPGPTSMDWIWRILFLVGAATGAHSFEQVQLQQPGAELVKPGASVKMSCKASGYTFTSYNMHWVKQTPGRGLEWIGAIYPGNGDTSYNQKFKGKATLTADKSSSTAYMQLSSLTSEDSAVYYCARSTYYGGDWYFNVWGAGTTVTVSTREDLKNVFPPEVAVFEPSKAEIAHTQKATLVCLATGFYPDHVELSWWVNGKEVHSGVCTDPQPLKEQPALNDSRYCLSSRLRVSATFWQNPRNHFRCQVQFYGLSENDEWTQDRAKPVTQIVSAEAWGRADCGITSASYHQGVLSATILYEILLGKATLYAVLVSALVLMAMVKRKDSRGRAKRSGSGATNFSLLKQAGDVEENPGPSRGHMTEYKPTVRLATRDDVPRAVRTLAAAFADYPATRHTVDPDRHIERVTELQELFLTRVGLDIGKVWVADDGAAVAVWTTPESVEAGAVFAEIGPRMAELSGSRLAAQQQMEGLLAPHRPKEPAWFLATVGVSPDHQGKGLGSAVVLPGVEAAERAGVPAFLETSAPRNLPFYERLGFTVTADVEVPEGPRTWCMTRKPGA

SEQ ID NO: 19279 - protein, 852 aa, Artificial Sequence
  Synthetic Polypeptide
MALPVTALLLPLALLLHAARPQIVLSQSPAILSASPGEKVTMTCRASSSVSYIHWFQQKPGSSPKPWIYATSNLASGVPVRFSGSGSGTSYSLTISRVEAEDAATYYCQQWTSNPPTFGGGTKLEIKLEDLKNVFPPEVAVFEPSKAEIAHTQKATLVCLATGFYPDHVELSWWVNGKEVHSGVCTDPQPLKEQPALNDSRYCLSSRLRVSATFWQNPRNHFRCQVQFYGLSENDEWTQDRAKPVTQIVSAEAWGRADCGITSASYHQGVLSATILYEILLGKATLYAVLVSALVLMAMVKRKDSRGRAKRSGSGATNFSLLKQAGDVEENPGPTSMDWIWRILFLVGAATGAHSFEQVQLQQPGAELVKPGASVKMSCKASGYTFTSYNMHWVKQTPGRGLEWIGAIYPGNGDTSYNQKFKGKATLTADKSSSTAYMQLSSLTSEDSAVYYCARSTYYGGDWYFNVWGAGTTVTVSTRIQNPDPAVYQLRDSKSSDKSVCLFTDFDSQTNVSQSKDSDVYITDKCVLDMRSMDFKSNSAVAWSNKSDFACANAFNNSIIPEDTFFPSSDVPCDVKLVEKSFETDTNLNFQNLSVIGFRILLLKVAGFNLLMTLRLWSSRAKRSGSGVKQTLNFDLLKLAGDVESNPGPSRGHMTEYKPTVRLATRDDVPRAVRTLAAAFADYPATRHTVDPDRHIERVTELQELFLTRVGLDIGKVWVADDGAAVAVWTTPESVEAGAVFAEIGPRMAELSGSRLAAQQQMEGLLAPHRPKEPAWFLATVGVSPDHQGKGLGSAVVLPGVEAAERAGVPAFLETSAPRNLPFYERLGFTVTADVEVPEGPRTWCMTRKPGA

SEQ ID NO: 19280 - protein, 619 aa, Artificial Sequence
  Synthetic Polypeptide
MALPVTALLLPLALLLHAARPQIVLSQSPAILSASPGEKVTMTCRASSSVSYIHWFQQKPGSSPKPWIYATSNLASGVPVRFSGSGSGTSYSLTISRVEAEDAATYYCQQWTSNPPTFGGGTKLEIKLEDLKNVFPPEVAVFEPSEAEISHTQKATLVCLATGFYPDHVELSWWVNGKEVHSGVCTDPQPLKEQPALNDSRYCLSSRLRVSATFWQNPRNHFRCQVQFYGLSENDEWTQDRAKPVTQIVSAEAWGRADCGFTSESYQQGVLSATILYEILLGKATLYAVLVSALVLMAMVKRKDSRGRAKRSGSGATNFSLLKQAGDVEENPGPTSMDWIWRILFLVGAATGAHSFEQVQLQQPGAELVKPGASVKMSCKASGYTFTSYNMHWVKQTPGRGLEWIGAIYPGNGDTSYNQKFKGKATLTADKSSSTAYMQLSSLTSEDSAVYYCARSTYYGGDWYFNVWGAGTTVTVSTRIQNPDPAVYQLRDSKSSDKSVCLFTDFDSQTNVSQSKDSDVYITDKCVLDMRSMDFKSNSAVAWSNKSDFACANAFNNSIIPEDTFFPSPESSCDVKLVEKSFETDTNLNFQNLSVIGFRILLLKVAGFNLLMTLRLWSS

SEQ ID NO: 19281 - protein, 844 aa, Artificial Sequence
  Synthetic Polypeptide
MALPVTALLLPLALLLHAARPQIVLSQSPAILSASPGEKVTMTCRASSSVSYIHWFQQKPGSSPKPWIYATSNLASGVPVRFSGSGSGTSYSLTISRVEAEDAATYYCQQWTSNPPTFGGGTKLEIKLEDLKNVFPPEVAVFEPSEAEISHTQKATLVCLATGFYPDHVELSWWVNGKEVHSGVCTDPQPLKEQPALNDSRYCLSSRLRVSATFWQNPRNHFRCQVQFYGLSENDEWTQDRAKPVTQIVSAEAWGRADCGFTSESYQQGVLSATILYEILLGKATLYAVLVSALVLMAMVKRKDSRGRAKRSGSGATNFSLLKQAGDVEENPGPTSMDWIWRILFLVGAATGAHSFEQVQLQQPGAELVKPGASVKMSCKASGYTFTSYNMHWVKQTPGRGLEWIGAIYPGNGDTSYNQKFKGKATLTADKSSSTAYMQLSSLTSEDSAVYYCARSTYYGGDWYFNVWGAGTTVTVSTRIQNPDPAVYQLRDSKSSDKSVCLFTDFDSQTNVSQSKDSDVYITDKCVLDMRSMDFKSNSAVAWSNKSDFACANAFNNSIIPEDTFFPSPESSCDVKLVEKSFETDTNLNFQNLSVIGFRILLLKVAGFNLLMTLRLWSSRAKRSGSGVKQTLNFDLLKLAGDVESNPGPSRGGIHTMATYEVLCEVARKLGTDDREVVLFLLNVFIPQPTLAQLIGALRALKEEGRLTFPLLAECLFRAGRRDLLRDLLHLDPRFLERHLAGTMSYFSPYQLTVLHVDGELCARDIRSLIFLSKDTIGSRSTPQTFLHWVYCMENLDLLGPTDVDALMSMLRSLSRVDLQRQVQTLMGLHLSGPSHSQHYRHTP

SEQ ID NO: 19282 - protein, 623 aa, Artificial Sequence
  Synthetic Polypeptide
MALPVTALLLPLALLLHAARPQIVLSQSPAILSASPGEKVTMTCRASSSVSYIHWFQQKPGSSPKPWIYATSNLASGVPVRFSGSGSGTSYSLTISRVEAEDAATYYCQQWTSNPPTFGGGTKLEIKLEIQNPDPAVYQLRDSKSSDKSVCLFTDFDSQTNVSQSKDSDVYITDKCVLDMRSMDFKSNSAVAWSNKSDFACANAFNNSIIPEDTFFPSPESSCDVKLVEKSFETDTNLNFQNLSVIGFRILLLKVAGFNLLMTLRLWSSRAKRSGSGVKQTLNFDLLKLAGDVESNPGPTSMDWIWRILFLVGAATGAHSFEQVQLQQPGAELVKPGASVKMSCKASGYTFTSYNMHWVKQTPGRGLEWIGAIYPGNGDTSYNQKFKGKATLTADKSSSTAYMQLSSLTSEDSAVYYCARSTYYGGDWYFNVWGAGTTVTVSTREDLKNVFPPEVAVFEPSEAEISHTQKATLVCLATGFYPDHVELSWWVNGKEVHSGVCTDPQPLKEQPALNDSRYCLSSRLRVSATFWQNPRNHFRCQVQFYGLSENDEWTQDRAKPVTQIVSAEAWGRADCGFTSESYQQGVLSATILYEILLGKATLYAVLVSALVLMAMVKRKDSRG

SEQ ID NO: 19283 - protein, 845 aa, Artificial Sequence
  Synthetic Polypeptide
MALPVTALLLPLALLLHAARPQIVLSQSPAILSASPGEKVTMTCRASSSVSYIHWFQQKPGSSPKPWIYATSNLASGVPVRFSGSGSGTSYSLTISRVEAEDAATYYCQQWTSNPPTFGGGTKLEIKLEIQNPDPAVYQLRDSKSSDKSVCLFTDFDSQTNVSQSKDSDVYITDKCVLDMRSMDFKSNSAVAWSNKSDFACANAFNNSIIPEDTFFPSPESSCDVKLVEKSFETDTNLNFQNLSVIGFRILLLKVAGFNLLMTLRLWSSRAKRSGSGVKQTLNFDLLKLAGDVESNPGPTSMDWIWRILFLVGAATGAHSFEQVQLQQPGAELVKPGASVKMSCKASGYTFTSYNMHWVKQTPGRGLEWIGAIYPGNGDTSYNQKFKGKATLTADKSSSTAYMQLSSLTSEDSAVYYCARSTYYGGDWYFNVWGAGTTVTVSTREDLKNVFPPEVAVFEPSEAEISHTQKATLVCLATGFYPDHVELSWWVNGKEVHSGVCTDPQPLKEQPALNDSRYCLSSRLRVSATFWQNPRNHFRCQVQFYGLSENDEWTQDRAKPVTQIVSAEAWGRADCGFTSESYQQGVLSATILYEILLGKATLYAVLVSALVLMAMVKRKDSRGRAKRSGSGATNFSLLKQAGDVEENPGPSRGGIHTMATYEVLCEVARKLGTDDREVVLFLLNVFIPQPTLAQLIGALRALKEEGRLTFPLLAECLFRAGRRDLLRDLLHLDPRFLERHLAGTMSYFSPYQLTVLHVDGELCARDIRSLIFLSKDTIGSRSTPQTFLHWVYCMENLDLLGPTDVDALMSMLRSLSRVDLQRQVQTLMGLHLSGPSHSQHYRHTP

SEQ ID NO: 19284 - protein, 897 aa, Artificial Sequence
  Synthetic Polypeptide
MALPVTALLLPLALLLHAARPLEGKPIPNPLLGLDSTGSGEDLKNVFPPEVAVFEPSKAEIAHTQKATLVCLATGFYPDHVELSWWVNGKEVHSGVCTDPQPLKEQPALNDSRYCLSSRLRVSATFWQNPRNHFRCQVQFYGLSENDEWTQDRAKPVTQIVSAEAWGRADCGITSASYHQGVLSATILYEILLGKATLYAVLVSALVLMAMVKRKDSRGRAKRSGSGATNFSLLKQAGDVEENPGPTSMALPVTALLLPLALLLHAARPQIVLSQSPAILSASPGEKVTMTCRASSSVSYIHWFQQKPGSSPKPWIYATSNLASGVPVRFSGSGSGTSYSLTISRVEAEDAATYYCQQWTSNPPTFGGGTKLEIKGGGGSGGGGSGGGGSQVQLQQPGAELVKPGASVKMSCKASGYTFTSYNMHWVKQTPGRGLEWIGAIYPGNGDTSYNQKFKGKATLTADKSSSTAYMQLSSLTSEDSAVYYCARSTYYGGDWYFNVWGAGTTVTVSTREQKLISEEDGSGIQNPDPAVYQLRDSKSSDKSVCLFTDFDSQTNVSQSKDSDVYITDKCVLDMRSMDFKSNSAVAWSNKSDFACANAFNNSIIPEDTFFPSSDVPCDVKLVEKSFETDTNLNFQNLSVIGFRILLLKVAGFNLLMTLRLWSSRAKRSGSGVKQTLNFDLLKLAGDVESNPGPSRGHMTEYKPTVRLATRDDVPRAVRTLAAAFADYPATRHTVDPDRHIERVTELQELFLTRVGLDIGKVWVADDGAAVAVWTTPESVEAGAVFAEIGPRMAELSGSRLAAQQQMEGLLAPHRPKEPAWFLATVGVSPDHQGKGLGSAVVLPGVEAAERAGVPAFLETSAPRNLPFYERLGFTVTADVEVPEGPRTWCMTRKPGA

SEQ ID NO: 19285 - protein, 898 aa, Artificial Sequence
  Synthetic Polypeptide
MALPVTALLLPLALLLHAARPLEQKLISEEDLGSGDRPDPAVYQLRDSKSSDKSVCLFTDFDSQTNVSQSKDSDVYITDKCVLDMRSMDFKSNSAVAWSNKSDFACANAFNNSIIPEDTFFPSPESSCDVKLVEKSFETDTNLNFQNLSVIGFRILLLKVAGFNLLMTLRLWSSSSRAKRSGSGVKQTLNFDLLKLAGDVESNPGPTSMALPVTALLLPLALLLHAARPQIVLSQSPAILSASPGEKVTMTCRASSSVSYIHWFQQKPGSSPKPWIYATSNLASGVPVRFSGSGSGTSYSLTISRVEAEDAATYYCQQWTSNPPTFGGGTKLEIKGGGGSGGGGSGGGGSQVQLQQPGAELVKPGASVKMSCKASGYTFTSYNMHWVKQTPGRGLEWIGAIYPGNGDTSYNQKFKGKATLTADKSSSTAYMQLSSLTSEDSAVYYCARSTYYGGDWYFNVWGAGTTVTVSTRGKPIPNPLLGLDSTGSGEDLKNVFPPEVAVFEPSEAEISHTQKATLVCLATGFYPDHVELSWWVNGKEVHSGVCTDPQPLKEQPALNDSRYCLSSRLRVSATFWQNPRNHFRCQVQFYGLSENDEWTQDRAKPVTQIVSAEAWGRADCGFTSESYQQGVLSATILYEILLGKATLYAVLVSALVLMAMVKRKDSRGRAKRSGSGATNFSLLKQAGDVEENPGPSRGHMTEYKPTVRLATRDDVPRAVRTLAAAFADYPATRHTVDPDRHIERVTELQELFLTRVGLDIGKVWVADDGAAVAVWTTPESVEAGAVFAEIGPRMAELSGSRLAAQQQMEGLLAPHRPKEPAWFLATVGVSPDHQGKGLGSAVVLPGVEAAERAGVPAFLETSAPRNLPFYERLGFTVTADVEVPEGPRTWCMTRKPGA

SEQ ID NO: 19286 - protein, 852 aa, Artificial Sequence
  Synthetic Polypeptide
MALPVTALLLPLALLLHAARPQIVLSQSPAILSASPGEKVTMTCRASSSVSYIHWFQQKPGSSPKPWIYATSNLASGVPVRFSGSGSGTSYSLTISRVEAEDAATYYCQQWTSNPPTFGGGTKLEIKLEDLKNVFPPEVAVFEPSEAEISHTQKATLVCLATGFYPDHVELSWWVNGKEVHSGVSTDPQPLKEQPALNDSRYCLSSRLRVSATFWQNPRNHFRCQVQFYGLSENDEWTQDRAKPVTQIVSAEAWGRADCGFTSESYQQGVLSATILYEILLGKATLYAVLVSALVLMAMVKRKDSRGRAKRSGSGATNFSLLKQAGDVEENPGPTSMDWIWRILFLVGAATGAHSFEQVQLQQPGAELVKPGASVKMSCKASGYTFTSYNMHWVKQTPGRGLEWIGAIYPGNGDTSYNQKFKGKATLTADKSSSTAYMQLSSLTSEDSAVYYCARSTYYGGDWYFNVWGAGTTVTVSTRIQNPDPAVYQLRDSKSSDKSVCLFTDFDSQTNVSQSKDSDVYITDKTVLDMRSMDFKSNSAVAWSNKSDFACANAFNNSIIPEDTFFPSPESSCDVKLVEKSFETDTNLNFQNLSVIGFRILLLKVAGFNLLMTLRLWSSRAKRSGSGVKQTLNFDLLKLAGDVESNPGPSRGHMTEYKPTVRLATRDDVPRAVRTLAAAFADYPATRHTVDPDRHIERVTELQELFLTRVGLDIGKVWVADDGAAVAVWTTPESVEAGAVFAEIGPRMAELSGSRLAAQQQMEGLLAPHRPKEPAWFLATVGVSPDHQGKGLGSAVVLPGVEAAERAGVPAFLETSAPRNLPFYERLGFTVTADVEVPEGPRTWCMTRKPGA

SEQ ID NO: 19287 - protein, 934 aa, Artificial Sequence
  Synthetic Polypeptide
MALPVTALLLPLALLLHAARPQIVLSQSPAILSASPGEKVTMTCRASSSVSYIHWFQQKPGSSPKPWIYATSNLASGVPVRFSGSGSGTSYSLTISRVEAEDAATYYCQQWTSNPPTFGGGTKLEIKLEDLKNVFPPEVAVFEPSEAEISHTQKATLVCLATGFYPDHVELSWWVNGKEVHSGVSTDPQPLKEQPALNDSRYCLSSRLRVSATFWQNPRNHFRCQVQFYGLSENDEWTQDRAKPVTQIVSAEAWGRADCGFTSESYQQGVLSATILYEILLGKATLYAVLVSALVLMAMVKRKDSRGRAKRSGSGATNFSLLKQAGDVEENPGPTSMDWIWRILFLVGAATGAHSFEQVQLQQPGAELVKPGASVKMSCKASGYTFTSYNMHWVKQTPGRGLEWIGAIYPGNGDTSYNQKFKGKATLTADKSSSTAYMQLSSLTSEDSAVYYCARSTYYGGDWYFNVWGAGTTVTVSTREQKLISEEDGSGTPFPSLAPPIMLLVDGKQQMVVVCLVLDVAPPGLDSPIWFSAGNGSALDAFTYGPSPATDGTWTNLAHLSLPSEELASWEPLVCHTGPGAEGHSRSTQPMHLSGEASTARTCPQEPLRGTPGGALWLGVLRLLLFKLLLFDLLLTCSCLCDPAGPLPSPATTTRLRALGSHRLHPATETGGREATSSPRPQPRDRRWGDTPPGRKPGSPVRAKRSGSGVKQTLNFDLLKLAGDVESNPGPSRGHMTEYKPTVRLATRDDVPRAVRTLAAAFADYPATRHTVDPDRHIERVTELQELFLTRVGLDIGKVWVADDGAAVAVWTTPESVEAGAVFAEIGPRMAELSGSRLAAQQQMEGLLAPHRPKEPAWFLATVGVSPDHQGKGLGSAVVLPGVEAAERAGVPAFLETSAPRNLPFYERLGFTVTADVEVPEGPRTWCMTRKPGA

SEQ ID NO: 19288 - protein, 952 aa, Artificial Sequence
  Synthetic Polypeptide
MALPVTALLLPLALLLHAARPLEDLKNVFPPEVAVFEPSEAEISHTQKATLVCLATGFYPDHVELSWWVNGKEVHSGVSTDPQPLKEQPALNDSRYCLSSRLRVSATFWQNPRNHFRCQVQFYGLSENDEWTQDRAKPVTQIVSAEAWGRADCGFTSESYQQGVLSATILYEILLGKATLYAVLVSALVLMAMVKRKDSRGRAKRSGSGATNFSLLKQAGDVEENPGPTSMALPVTALLLPLALLLHAARPQIVLSQSPAILSASPGEKVTMTCRASSSVSYIHWFQQKPGSSPKPWIYATSNLASGVPVRFSGSGSGTSYSLTISRVEAEDAATYYCQQWTSNPPTFGGGTKLEIKGGGGSGGGGSGGGGSQVQLQQPGAELVKPGASVKMSCKASGYTFTSYNMHWVKQTPGRGLEWIGAIYPGNGDTSYNQKFKGKATLTADKSSSTAYMQLSSLTSEDSAVYYCARSTYYGGDWYFNVWGAGTTVTVSTREQKLISEEDLGSGTPFPSLAPPIMLLVDGKQQMVVVCLVLDVAPPGLDSPIWFSAGNGSALDAFTYGPSPATDGTWTNLAHLSLPSEELASWEPLVCHTGPGAEGHSRSTQPMHLSGEASTARTCPQEPLRGTPGGALWLGVLRLLLFKLLLFDLLLTCSCLCDPAGPLPSPATTTRLRALGSHRLHPATETGGREATSSPRPQPRDRRWGDTPPGRKPGSPVRAKRSGSGVKQTLNFDLLKLAGDVESNPGPSRSRGHMTEYKPTVRLATRDDVPRAVRTLAAAFADYPATRHTVDPDRHIERVTELQELFLTRVGLDIGKVWVADDGAAVAVWTTPESVEAGAVFAEIGPRMAELSGSRLAAQQQMEGLLAPHRPKEPAWFLATVGVSPDHQGKGLGSAVVLPGVEAAERAGVPAFLETSAPRNLPFYERLGFTVTADVEVPEGPRTWCMTRKPGA

SEQ ID NO: 19289 - protein, 889 aa, Artificial Sequence
  Synthetic Polypeptide
MALPVTALLLPLALLLHAARPQIVLSQSPAILSASPGEKVTMTCRASSSVSYIHWFQQKPGSSPKPWIYATSNLASGVPVRFSGSGSGTSYSLTISRVEAEDAATYYCQQWTSNPPTFGGGTKLEIKLEGKPIPNPLLGLDSTGSGDKQLDADVSPKPTIFLPSIAETKLQKAGTYLCLLEKFFPDVIKIHWQEKKSNTILGSQEGNTMKTNDTYMKFSWLTVPEKSLDKEHRCIVRHENNKNGVDQEIIFPPIKTDVITMDPKDNCSKDANDTLLLQLTNTSAYYMYLLLLLKSVVYFAIITCCLLRRTAFCCNGEKSRAKRSGSGATNFSLLKQAGDVEENPGPTSMDWIWRILFLVGAATGAHSFEQVQLQQPGAELVKPGASVKMSCKASGYTFTSYNMHWVKQTPGRGLEWIGAIYPGNGDTSYNQKFKGKATLTADKSSSTAYMQLSSLTSEDSAVYYCARSTYYGGDWYFNVWGAGTTVTVSTREQKLISEEDGSGSQPHTKPSVFVMKNGTNVACLVKEFYPKDIRINLVSSKKITEFDPAIVISPSGKYNAVKLGKYEDSNSVTCSVQHDNKTVHSTDFEVKTDSTDHVKPKETENTKQPSKSCHKPKAIVHTEKVNMMSLTVLGLRMLFAKTVAVNFLLTAKLFFLRAKRSGSGVKQTLNFDLLKLAGDVESNPGPSRGHMTEYKPTVRLATRDDVPRAVRTLAAAFADYPATRHTVDPDRHIERVTELQELFLTRVGLDIGKVWVADDGAAVAVWTTPESVEAGAVFAEIGPRMAELSGSRLAAQQQMEGLLAPHRPKEPAWFLATVGVSPDHQGKGLGSAVVLPGVEAAERAGVPAFLETSAPRNLPFYERLGFTVTADVEVPEGPRTWCMTRKPGA

SEQ ID NO: 19290 - protein, 627 aa, Artificial Sequence
  Synthetic Polypeptide
MALPVTALLLPLALLLHAARPQIVLSQSPAILSASPGEKVTMTCRASSSVSYIHWFQQKPGSSPKPWIYATSNLASGVPVRFSGSGSGTSYSLTISRVEAEDAATYYCQQWTSNPPTFGGGTKLEIKLESQPHTKPSVFVMKNGTNVACLVKEFYPKDIRINLVSSKKITEFDPAIVISPSGKYNAVKLGKYEDSNSVTCSVQHDNKTVHSTDFEVKTDSTDHVKPKETENTKQPSKSCHKPKAIVHTEKVNMMSLTVLGLRMLFAKTVAVNFLLTAKLFFLRAKRSGSGATNFSLLKQAGDVEENPGPTSMDWIWRILFLVGAATGAHSFEQVQLQQPGAELVKPGASVKMSCKASGYTFTSYNMHWVKQTPGRGLEWIGAIYPGNGDTSYNQKFKGKATLTADKSSSTAYMQLSSLTSEDSAVYYCARSTYYGGDWYFNVWGAGTTVTVSTRDKQLDADVSPKPTIFLPSIAETKLQKAGTYLCLLEKFFPDVIKIHWQEKKSNTILGSQEGNTMKTNDTYMKFSWLTVPEKSLDKEHRCIVRHENNKNGVDQEIIFPPIKTDVITMDPKDNCSKDANDTLLLQLTNTSAYYMYLLLLLKSVVYFAIITCCLLRRTAFCCNGEKS

SEQ ID NO: 19291 - protein, 904 aa, Artificial Sequence
  Synthetic Polypeptide
MALPVTALLLPLALLLHAARPLEGKPIPNPLLGLDSTGSGDKQLDADVSPKPTIFLPSIAETKLQKAGTYLCLLEKFFPDVIKIHWQEKKSNTILGSQEGNTMKTNDTYMKFSWLTVPEKSLDKEHRCIVRHENNKNGVDQEIIFPPIKTDVITMDPKDNCSKDANDTLLLQLTNTSAYYMYLLLLLKSVVYFAIITCCLLRRTAFCCNGEKSRAKRSGSGATNFSLLKQAGDVEENPGPTSMALPVTALLLPLALLLHAARPQIVLSQSPAILSASPGEKVTMTCRASSSVSYIHWFQQKPGSSPKPWIYATSNLASGVPVRFSGSGSGTSYSLTISRVEAEDAATYYCQQWTSNPPTFGGGTKLEIKGGGGSGGGGSGGGGSQVQLQQPGAELVKPGASVKMSCKASGYTFTSYNMHWVKQTPGRGLEWIGAIYPGNGDTSYNQKFKGKATLTADKSSSTAYMQLSSLTSEDSAVYYCARSTYYGGDWYFNVWGAGTTVTVSTREQKLISEEDGSGSQPHTKPSVFVMKNGTNVACLVKEFYPKDIRINLVSSKKITEFDPAIVISPSGKYNAVKLGKYEDSNSVTCSVQHDNKTVHSTDFEVKTDSTDHVKPKETENTKQPSKSCHKPKAIVHTEKVNMMSLTVLGLRMLFAKTVAVNFLLTAKLFFLRAKRSGSGVKQTLNFDLLKLAGDVESNPGPSRGHMTEYKPTVRLATRDDVPRAVRTLAAAFADYPATRHTVDPDRHIERVTELQELFLTRVGLDIGKVWVADDGAAVAVWTTPESVEAGAVFAEIGPRMAELSGSRLAAQQQMEGLLAPHRPKEPAWFLATVGVSPDHQGKGLGSAVVLPGVEAAERAGVPAFLETSAPRNLPFYERLGFTVTADVEVPEGPRTWCMTRKPGA

SEQ ID NO: 19292 - protein, 1029 aa, Artificial Sequence
  Synthetic Polypeptide
MALPVTALLLPLALLLHAARPQIVLSQSPAILSASPGEKVTMTCRASSSVSYIHWFQQKPGSSPKPWIYATSNLASGVPVRFSGSGSGTSYSLTISRVEAEDAATYYCQQWTSNPPTFGGGTKLEIKGQPKANPTVTLFPPSSEELQANKATLVCLISDFYPGAVTVAWKADGSPVKAGVETTKPSKQSNNKYAASSYLSLTPEQWKSHRSYSCQVTHEGSTVEKTVAPTECSGSQSFGLLDPKLCYLLDGILFIYGVILTALFLRVKFSRSADAPAYQQGQNQLYNELNLGRREEYDVLDKRRGRDPEMGGKPQRRKNPQEGLYNELQKDKMAEAYSEIGMKGERRRGKGHDGLYQGLSTATKDTYDALHMQALPPRRAKRSGSGATNFSLLKQAGDVEENPGPTSMDWIWRILFLVGAATGAHSFEQVQLQQPGAELVKPGASVKMSCKASGYTFTSYNMHWVKQTPGRGLEWIGAIYPGNGDTSYNQKFKGKATLTADKSSSTAYMQLSSLTSEDSAVYYCARSTYYGGDWYFNVWGAGTTVTVSASTKGPSVFPLAPSSKSTSGGTAALGCLVKDYFPEPVTVSWNSGALTSGVHTFPAVLQSSGLYSLSSVVTVPSSSLGTQTYICNVNHKPSNTKVDKRVEPKSCGTQSFGLLDPKLCYLLDGILFIYGVILTALFLRVKFSRSADAPAYQQGQNQLYNELNLGRREEYDVLDKRRGRDPEMGGKPQRRKNPQEGLYNELQKDKMAEAYSEIGMKGERRRGKGHDGLYQGLSTATKDTYDALHMQALPPRRAKRSGSGVKQTLNFDLLKLAGDVESNPGPSRGHMTEYKPTVRLATRDDVPRAVRTLAAAFADYPATRHTVDPDRHIERVTELQELFLTRVGLDIGKVWVADDGAAVAVWTTPESVEAGAVFAEIGPRMAELSGSRLAAQQQMEGLLAPHRPKEPAWFLATVGVSPDHQGKGLGSAVVLPGVEAAERAGVPAFLETSAPRNLPFYERLGFTVTADVEVPEGPRTWCMTRKPGA

SEQ ID NO: 19293 - protein, 815 aa, Artificial Sequence
  Synthetic Polypeptide
MALPVTALLLPLALLLHAARPQIVLSQSPAILSASPGEKVTMTCRASSSVSYIHWFQQKPGSSPKPWIYATSNLASGVPVRFSGSGSGTSYSLTISRVEAEDAATYYCQQWTSNPPTFGGGTKLEIKLEDLKNVFPPEVAVFEPSEAEISHTQKATLVCLATGFYPDHVELSWWVNGKEVHSGVSTDPQPLKEQPALNDSRYCLSSRLRVSATFWQNPRNHFRCQVQFYGLSENDEWTQDRAKPVTQIVSAEAWGRADCGSQSFGLLDPKLCYLLDGILFIYGVILTALFLRVKFSRSADAPAYQQGQNQLYNELNLGRREEYDVLDKRRGRDPEMGGKPQRRKNPQEGLYNELQKDKMAEAYSEIGMKGERRRGKGHDGLYQGLSTATKDTYDALHMQALPPRRAKRSGSGATNFSLLKQAGDVEENPGPTSMDWIWRILFLVGAATGAHSFEQVQLQQPGAELVKPGASVKMSCKASGYTFTSYNMHWVKQTPGRGLEWIGAIYPGNGDTSYNQKFKGKATLTADKSSSTAYMQLSSLTSEDSAVYYCARSTYYGGDWYFNVWGAGTTVTVSTRIQNPDPAVYQLRDSKSSDKSVCLFTDFDSQTNVSQSKDSDVYITDKTVLDMRSMDFKSNSAVAWSNKSDFACANAFNNSIIPEDTFFPSPESSCGTQSFGLLDPKLCYLLDGILFIYGVILTALFLRVKFSRSADAPAYQQGQNQLYNELNLGRREEYDVLDKRRGRDPEMGGKPQRRKNPQEGLYNELQKDKMAEAYSEIGMKGERRRGKGHDGLYQGLSTATKDTYDALHMQALPPR

SEQ ID NO: 19294 - protein, 815 aa, Artificial Sequence
  Synthetic Polypeptide
MALPVTALLLPLALLLHAARPQIVLSQSPAILSASPGEKVTMTCRASSSVSYIHWFQQKPGSSPKPWIYATSNLASGVPVRFSGSGSGTSYSLTISRVEAEDAATYYCQQWTSNPPTFGGGTKLEIKLEDLKNVFPPEVAVFEPSKAEIAHTQKATLVCLATGFYPDHVELSWWVNGKEVHSGVCTDPQPLKEQPALNDSRYCLSSRLRVSATFWQNPRNHFRCQVQFYGLSENDEWTQDRAKPVTQIVSAEAWGRADCGSQSFGLLDPKLCYLLDGILFIYGVILTALFLRVKFSRSADAPAYQQGQNQLYNELNLGRREEYDVLDKRRGRDPEMGGKPQRRKNPQEGLYNELQKDKMAEAYSEIGMKGERRRGKGHDGLYQGLSTATKDTYDALHMQALPPRRAKRSGSGATNFSLLKQAGDVEENPGPTSMDWIWRILFLVGAATGAHSFEQVQLQQPGAELVKPGASVKMSCKASGYTFTSYNMHWVKQTPGRGLEWIGAIYPGNGDTSYNQKFKGKATLTADKSSSTAYMQLSSLTSEDSAVYYCARSTYYGGDWYFNVWGAGTTVTVSTRIQNPDPAVYQLRDSKSSDKSVCLFTDFDSQTNVSQSKDSDVYITDKCVLDMRSMDFKSNSAVAWSNKSDFACANAFNNSIIPEDTFFPSSDVPCGTQSFGLLDPKLCYLLDGILFIYGVILTALFLRVKFSRSADAPAYQQGQNQLYNELNLGRREEYDVLDKRRGRDPEMGGKPQRRKNPQEGLYNELQKDKMAEAYSEIGMKGERRRGKGHDGLYQGLSTATKDTYDALHMQALPPR

SEQ ID NO: 19295 - protein, 886 aa, Artificial Sequence
  Synthetic Polypeptide
MALPVTALLLPLALLLHAARPQIVLSQSPAILSASPGEKVTMTCRASSSVSYIHWFQQKPGSSPKPWIYATSNLASGVPVRFSGSGSGTSYSLTISRVEAEDAATYYCQQWTSNPPTFGGGTKLEIKLEGKPIPNPLLGLDSTGSGEDLKNVFPPEVAVFEPSEAEISHTQKATLVCLATGFYPDHVELSWWVNGKEVHSGVSTDPQPLKEQPALNDSRYCLSSRLRVSATFWQNPRNHFRCQVQFYGLSENDEWTQDRAKPVTQIVSAEAWGRADCGSQSFGLLDPKLCYLLDGILFIYGVILTALFLRVKFSRSADAPAYQQGQNQLYNELNLGRREEYDVLDKRRGRDPEMGGKPQRRKNPQEGLYNELQKDKMAEAYSEIGMKGERRRGKGHDGLYQGLSTATKDTYDALHMQALPPRRAKRSGSGATNFSLLKQAGDVEENPGPTSMDWIWRILFLVGAATGAHSFEQVQLQQPGAELVKPGASVKMSCKASGYTFTSYNMHWVKQTPGRGLEWIGAIYPGNGDTSYNQKFKGKATLTADKSSSTAYMQLSSLTSEDSAVYYCARSTYYGGDWYFNVWGAGTTVTVSTREQKLISEEDGSGIQNPDPAVYQLRDSKSSDKSVCLFTDFDSQTNVSQSKDSDVYITDKTVLDMRSMDFKSNSAVAWSNKSDFACANAFNNSIIPEDTFFPSPESSCGTQSFGLLDPKLCYLLDGILFIYGVILTALFLRSKRSRLLHSDYMNMTPRRPGPTRKHYQPYAPPRDFAAYRSRVKFSRSADAPAYQQGQNQLYNELNLGRREEYDVLDKRRGRDPEMGGKPQRRKNPQEGLYNELQKDKMAEAYSEIGMKGERRRGKGHDGLYQGLSTATKDTYDALHMQALPPR

SEQ ID NO: 19296 - protein, 927 aa, Artificial Sequence
  Synthetic Polypeptide
MALPVTALLLPLALLLHAARPQIVLSQSPAILSASPGEKVTMTCRASSSVSYIHWFQQKPGSSPKPWIYATSNLASGVPVRFSGSGSGTSYSLTISRVEAEDAATYYCQQWTSNPPTFGGGTKLEIKLEGKPIPNPLLGLDSTGSGEDLKNVFPPEVAVFEPSEAEISHTQKATLVCLATGFYPDHVELSWWVNGKEVHSGVSTDPQPLKEQPALNDSRYCLSSRLRVSATFWQNPRNHFRCQVQFYGLSENDEWTQDRAKPVTQIVSAEAWGRADCGSQSFGLLDPKLCYLLDGILFIYGVILTALFLRSKRSRLLHSDYMNMTPRRPGPTRKHYQPYAPPRDFAAYRSRVKFSRSADAPAYQQGQNQLYNELNLGRREEYDVLDKRRGRDPEMGGKPQRRKNPQEGLYNELQKDKMAEAYSEIGMKGERRRGKGHDGLYQGLSTATKDTYDALHMQALPPRRAKRSGSGATNFSLLKQAGDVEENPGPTSMDWIWRILFLVGAATGAHSFEQVQLQQPGAELVKPGASVKMSCKASGYTFTSYNMHWVKQTPGRGLEWIGAIYPGNGDTSYNQKFKGKATLTADKSSSTAYMQLSSLTSEDSAVYYCARSTYYGGDWYFNVWGAGTTVTVSTREQKLISEEDGSGIQNPDPAVYQLRDSKSSDKSVCLFTDFDSQTNVSQSKDSDVYITDKTVLDMRSMDFKSNSAVAWSNKSDFACANAFNNSIIPEDTFFPSPESSCGTQSFGLLDPKLCYLLDGILFIYGVILTALFLRSKRSRLLHSDYMNMTPRRPGPTRKHYQPYAPPRDFAAYRSRVKFSRSADAPAYQQGQNQLYNELNLGRREEYDVLDKRRGRDPEMGGKPQRRKNPQEGLYNELQKDKMAEAYSEIGMKGERRRGKGHDGLYQGLSTATKDTYDALHMQALPPR

SEQ ID NO: 19297 - protein, 888 aa, Artificial Sequence
  Synthetic Polypeptide
MALPVTALLLPLALLLHAARPQIVLSQSPAILSASPGEKVTMTCRASSSVSYIHWFQQKPGSSPKPWIYATSNLASGVPVRFSGSGSGTSYSLTISRVEAEDAATYYCQQWTSNPPTFGGGTKLEIKLEGKPIPNPLLGLDSTGSGEDLKNVFPPEVAVFEPSEAEISHTQKATLVCLATGFYPDHVELSWWVNGKEVHSGVSTDPQPLKEQPALNDSRYCLSSRLRVSATFWQNPRNHFRCQVQFYGLSENDEWTQDRAKPVTQIVSAEAWGRADCGSQSFGLLDPKLCYLLDGILFIYGVILTALFLRVKFSRSADAPAYQQGQNQLYNELNLGRREEYDVLDKRRGRDPEMGGKPQRRKNPQEGLYNELQKDKMAEAYSEIGMKGERRRGKGHDGLYQGLSTATKDTYDALHMQALPPRRAKRSGSGATNFSLLKQAGDVEENPGPTSMDWIWRILFLVGAATGAHSFEQVQLQQPGAELVKPGASVKMSCKASGYTFTSYNMHWVKQTPGRGLEWIGAIYPGNGDTSYNQKFKGKATLTADKSSSTAYMQLSSLTSEDSAVYYCARSTYYGGDWYFNVWGAGTTVTVSTREQKLISEEDLGSGIQNPDPAVYQLRDSKSSDKSVCLFTDFDSQTNVSQSKDSDVYITDKTVLDMRSMDFKSNSAVAWSNKSDFACANAFNNSIIPEDTFFPSPESSCGTQSFGLLDPKLCYLLDGILFIYGVILTALFLKRGRKKLLYIFKQPFMRPVQTTQEEDGCSCRFPEEEEGGCELRVKFSRSADAPAYQQGQNQLYNELNLGRREEYDVLDKRRGRDPEMGGKPQRRKNPQEGLYNELQKDKMAEAYSEIGMKGERRRGKGHDGLYQGLSTATKDTYDALHMQALPPR

SEQ ID NO: 19298 - protein, 930 aa, Artificial Sequence
  Synthetic Polypeptide
MALPVTALLLPLALLLHAARPQIVLSQSPAILSASPGEKVTMTCRASSSVSYIHWFQQKPGSSPKPWIYATSNLASGVPVRFSGSGSGTSYSLTISRVEAEDAATYYCQQWTSNPPTFGGGTKLEIKLEGKPIPNPLLGLDSTGSGEDLKNVFPPEVAVFEPSEAEISHTQKATLVCLATGFYPDHVELSWWVNGKEVHSGVSTDPQPLKEQPALNDSRYCLSSRLRVSATFWQNPRNHFRCQVQFYGLSENDEWTQDRAKPVTQIVSAEAWGRADCGSQSFGLLDPKLCYLLDGILFIYGVILTALFLKRGRKKLLYIFKQPFMRPVQTTQEEDGCSCRFPEEEEGGCELRVKFSRSADAPAYQQGQNQLYNELNLGRREEYDVLDKRRGRDPEMGGKPQRRKNPQEGLYNELQKDKMAEAYSEIGMKGERRRGKGHDGLYQGLSTATKDTYDALHMQALPPRRAKRSGSGATNFSLLKQAGDVEENPGPTSMDWIWRILFLVGAATGAHSFEQVQLQQPGAELVKPGASVKMSCKASGYTFTSYNMHWVKQTPGRGLEWIGAIYPGNGDTSYNQKFKGKATLTADKSSSTAYMQLSSLTSEDSAVYYCARSTYYGGDWYFNVWGAGTTVTVSTREQKLISEEDLGSGIQNPDPAVYQLRDSKSSDKSVCLFTDFDSQTNVSQSKDSDVYITDKTVLDMRSMDFKSNSAVAWSNKSDFACANAFNNSIIPEDTFFPSPESSCGTQSFGLLDPKLCYLLDGILFIYGVILTALFLKRGRKKLLYIFKQPFMRPVQTTQEEDGCSCRFPEEEEGGCELRVKFSRSADAPAYQQGQNQLYNELNLGRREEYDVLDKRRGRDPEMGGKPQRRKNPQEGLYNELQKDKMAEAYSEIGMKGERRRGKGHDGLYQGLSTATKDTYDALHMQALPPR

SEQ ID NO: 19299 - protein, 820 aa, Artificial Sequence
  Synthetic Polypeptide
MALPVTALLLPLALLLHAARPQIVLSQSPAILSASPGEKVTMTCRASSSVSYIHWFQQKPGSSPKPWIYATSNLASGVPVRFSGSGSGTSYSLTISRVEAEDAATYYCQQWTSNPPTFGGGTKLEIKLEQSFGLLDPKLCYLLDGILFIYGVILTALFLRVKFSRSADAPAYQQGQNQLYNELNLGRREEYDVLDKRRGRDPEMGGKPQRRKNPQEGLYNELQKDKMAEAYSEIGMKGERRRGKGHDGLYQGLSTATKDTYDALHMQALPPRRAKRSGSGATNFSLLKQAGDVEENPGPTSMDWIWRILFLVGAATGAHSFEQVQLQQPGAELVKPGASVKMSCKASGYTFTSYNMHWVKQTPGRGLEWIGAIYPGNGDTSYNQKFKGKATLTADKSSSTAYMQLSSLTSEDSAVYYCARSTYYGGDWYFNVWGAGTTVTVSTRQSFGLLDPKLCYLLDGILFIYGVILTALFLRVKFSRSADAPAYQQGQNQLYNELNLGRREEYDVLDKRRGRDPEMGGKPQRRKNPQEGLYNELQKDKMAEAYSEIGMKGERRRGKGHDGLYQGLSTATKDTYDALHMQALPPRRAKRSGSGVKQTLNFDLLKLAGDVESNPGPSRGHMTEYKPTVRLATRDDVPRAVRTLAAAFADYPATRHTVDPDRHIERVTELQELFLTRVGLDIGKVWVADDGAAVAVWTTPESVEAGAVFAEIGPRMAELSGSRLAAQQQMEGLLAPHRPKEPAWFLATVGVSPDHQGKGLGSAVVLPGVEAAERAGVPAFLETSAPRNLPFYERLGFTVTADVEVPEGPRTWCMTRKPGA

SEQ ID NO: 19300 - protein, 645 aa, Artificial Sequence
  Synthetic Polypeptide
MALPVTALLLPLALLLHAARPQIVLSQSPAILSASPGEKVTMTCRASSSVSYIHWFQQKPGSSPKPWIYATSNLASGVPVRFSGSGSGTSYSLTISRVEAEDAATYYCQQWTSNPPTFGGGTKLEIKLEGQPKANPTVTLFPPSSEELQANKATLVCLISDFYPGAVTVAWKADGSPVKAGVETTKPSKQSNNKYAASSYLSLTPEQWKSHRSYSCQVTHEGSTVEKTVAPTECSPIKTDVITMDPKDNCSKDANDTLLLQLTNTSAYYMYLLLLLKSVVYFAIITCCLLRRTAFCCNGEKSRAKRSGSGATNFSLLKQAGDVEENPGPTSMDWIWRILFLVGAATGAHSFEQVQLQQPGAELVKPGASVKMSCKASGYTFTSYNMHWVKQTPGRGLEWIGAIYPGNGDTSYNQKFKGKATLTADKSSSTAYMQLSSLTSEDSAVYYCARSTYYGGDWYFNVWGAGTTVTVSTRASTKGPSVFPLAPSSKSTSGGTAALGCLVKDYFPEPVTVSWNSGALTSGVHTFPAVLQSSGLYSLSSVVTVPSSSLGTQTYICNVNHKPSNTKVDKRVEPKSCEVKTDSTDHVKPKETENTKQPSKSCHKPKAIVHTEKVNMMSLTVLGLRMLFAKTVAVNFLLTAKLFFL

SEQ ID NO: 19301 - protein, 623 aa, Artificial Sequence
  Synthetic Polypeptide
MALPVTALLLPLALLLHAARPQIVLSQSPAILSASPGEKVTMTCRASSSVSYIHWFQQKPGSSPKPWIYATSNLASGVPVRFSGSGSGTSYSLTISRVEAEDAATYYCQQWTSNPPTFGGGTKLEIKLEGQPKANPTVTLFPPSSEELQANKATLVCLISDFYPGAVTVAWKADGSPVKAGVETTKPSKQSNNKYAASSYLSLTPEQWKSHRSYSCQVTHEGSTVEKTVAPTECSGRADCGITSASYHQGVLSATILYEILLGKATLYAVLVSALVLMAMVKRKDSRGRAKRSGSGATNFSLLKQAGDVEENPGPTSMDWIWRILFLVGAATGAHSFEQVQLQQPGAELVKPGASVKMSCKASGYTFTSYNMHWVKQTPGRGLEWIGAIYPGNGDTSYNQKFKGKATLTADKSSSTAYMQLSSLTSEDSAVYYCARSTYYGGDWYFNVWGAGTTVTVSTRASTKGPSVFPLAPSSKSTSGGTAALGCLVKDYFPEPVTVSWNSGALTSGVHTFPAVLQSSGLYSLSSVVTVPSSSLGTQTYICNVNHKPSNTKVDKRVEPKSCIPEDTFFPSSDVPCDVKLVEKSFETDTNLNFQNLSVIGFRILLLKVAGFNLLMTLRLWSS

SEQ ID NO: 19302 - protein, 623 aa, Artificial Sequence
  Synthetic Polypeptide
MALPVTALLLPLALLLHAARPQIVLSQSPAILSASPGEKVTMTCRASSSVSYIHWFQQKPGSSPKPWIYATSNLASGVPVRFSGSGSGTSYSLTISRVEAEDAATYYCQQWTSNPPTFGGGTKLEIKLEGQPKANPTVTLFPPSSEELQANKATLVCLISDFYPGAVTVAWKADGSPVKAGVETTKPSKQSNNKYAASSYLSLTPEQWKSHRSYSCQVTHEGSTVEKTVAPTECSGRADCGFTSESYQQGVLSATILYEILLGKATLYAVLVSALVLMAMVKRKDSRGRAKRSGSGATNFSLLKQAGDVEENPGPTSMDWIWRILFLVGAATGAHSFEQVQLQQPGAELVKPGASVKMSCKASGYTFTSYNMHWVKQTPGRGLEWIGAIYPGNGDTSYNQKFKGKATLTADKSSSTAYMQLSSLTSEDSAVYYCARSTYYGGDWYFNVWGAGTTVTVSTRASTKGPSVFPLAPSSKSTSGGTAALGCLVKDYFPEPVTVSWNSGALTSGVHTFPAVLQSSGLYSLSSVVTVPSSSLGTQTYICNVNHKPSNTKVDKRVEPKSCIPEDTFFPSPESSCDVKLVEKSFETDTNLNFQNLSVIGFRILLLKVAGFNLLMTLRLWSS

SEQ ID NO: 19303 - protein, 449 aa, Artificial Sequence
  Synthetic Polypeptide
MALPVTALLLPLALLLHAARPQIVLSQSPAILSASPGEKVTMTCRASSSVSYIHWFQQKPGSSPKPWIYATSNLASGVPVRFSGSGSGTSYSLTISRVEAEDAATYYCQQWTSNPPTFGGGTKLEIKGGGGSGGGGSGGGGSQVQLQQPGAELVKPGASVKMSCKASGYTFTSYNMHWVKQTPGRGLEWIGAIYPGNGDTSYNQKFKGKATLTADKSSSTAYMQLSSLTSEDSAVYYCARSTYYGGDWYFNVWGAGTTVTVSTRDGNEEMGGITQTPYKVSISGTTVILTCPQYPGSEILWQHNDKNIGGDEDDKNIGSDEDHLSLKEFSELEQSGYYVCYPRGSKPEDANFYLYLRARVCENCMEMDVMSVATIVIVDICITGGLLLLVYYWSKNRKAKAKPVTRGAGAGGRQRGQNKERPPPVPNPDYEPIRKGQRDLYSGLNQRRI

SEQ ID NO: 19304 - protein, 414 aa, Artificial Sequence
  Synthetic Polypeptide
MALPVTALLLPLALLLHAARPQIVLSQSPAILSASPGEKVTMTCRASSSVSYIHWFQQKPGSSPKPWIYATSNLASGVPVRFSGSGSGTSYSLTISRVEAEDAATYYCQQWTSNPPTFGGGTKLEIKGGGGSGGGGSGGGGSQVQLQQPGAELVKPGASVKMSCKASGYTFTSYNMHWVKQTPGRGLEWIGAIYPGNGDTSYNQKFKGKATLTADKSSSTAYMQLSSLTSEDSAVYYCARSTYYGGDWYFNVWGAGTTVTVSTRFKIPIEELEDRVFVNCNTSITWVEGTVGTLLSDITRLDLGKRILDPRGIYRCNGTDIYKDKESTVQVHYRMCQSCVELDPATVAGIIVTDVIATLLLALGVFCFAGHETGRLSGAADTQALLRNDQVYQPLRDRDDAQYSHLGGNWARNK

SEQ ID NO: 19305 - protein, 424 aa, Artificial Sequence
  Synthetic Polypeptide
MALPVTALLLPLALLLHAARPQIVLSQSPAILSASPGEKVTMTCRASSSVSYIHWFQQKPGSSPKPWIYATSNLASGVPVRFSGSGSGTSYSLTISRVEAEDAATYYCQQWTSNPPTFGGGTKLEIKGGGGSGGGGSGGGGSQVQLQQPGAELVKPGASVKMSCKASGYTFTSYNMHWVKQTPGRGLEWIGAIYPGNGDTSYNQKFKGKATLTADKSSSTAYMQLSSLTSEDSAVYYCARSTYYGGDWYFNVWGAGTTVTVSTRQSIKGNHLVKVYDYQEDGSVLLTCDAEAKNITWFKDGKMIGFLTEDKKKWNLGSNAKDPRGMYQCKGSQNKSKPLQVYYRMCQNCIELNAATISGFLFAEIVSIFVLAVGVYFIAGQDGVRQSRASDKQTLLPNDQLYQPLKDREDDQYSHLQGNQLRRN

SEQ ID NO: 19306 - protein, 407 aa, Artificial Sequence
  Synthetic Polypeptide
MALPVTALLLPLALLLHAARPQIVLSQSPAILSASPGEKVTMTCRASSSVSYIHWFQQKPGSSPKPWIYATSNLASGVPVRFSGSGSGTSYSLTISRVEAEDAATYYCQQWTSNPPTFGGGTKLEIKGGGGSGGGGSGGGGSQVQLQQPGAELVKPGASVKMSCKASGYTFTSYNMHWVKQTPGRGLEWIGAIYPGNGDTSYNQKFKGKATLTADKSSSTAYMQLSSLTSEDSAVYYCARSTYYGGDWYFNVWGAGTTVTVSTRQSFGLLDPKLCYLLDGILFIYGVILTALFLRVKFSRSADAPAYQQGQNQLYNELNLGRREEYDVLDKRRGRDPEMGGKPQRRKNPQEGLYNELQKDKMAEAYSEIGMKGERRRGKGHDGLYQGLSTATKDTYDALHMQALPPR

SEQ ID NO: 19307 - protein, 449 aa, Artificial Sequence
  Synthetic Polypeptide
MALPVTALLLPLALLLHAARPQVQLQQPGAELVKPGASVKMSCKASGYTFTSYNMHWVKQTPGRGLEWIGAIYPGNGDTSYNQKFKGKATLTADKSSSTAYMQLSSLTSEDSAVYYCARSTYYGGDWYFNVWGAGTTVTVSGGGGSGGGGSGGGGSQIVLSQSPAILSASPGEKVTMTCRASSSVSYIHWFQQKPGSSPKPWIYATSNLASGVPVRFSGSGSGTSYSLTISRVEAEDAATYYCQQWTSNPPTFGGGTKLEIKTRDGNEEMGGITQTPYKVSISGTTVILTCPQYPGSEILWQHNDKNIGGDEDDKNIGSDEDHLSLKEFSELEQSGYYVCYPRGSKPEDANFYLYLRARVCENCMEMDVMSVATIVIVDICITGGLLLLVYYWSKNRKAKAKPVTRGAGAGGRQRGQNKERPPPVPNPDYEPIRKGQRDLYSGLNQRRI

SEQ ID NO: 19308 - protein, 414 aa, Artificial Sequence
  Synthetic Polypeptide
MALPVTALLLPLALLLHAARPQVQLQQPGAELVKPGASVKMSCKASGYTFTSYNMHWVKQTPGRGLEWIGAIYPGNGDTSYNQKFKGKATLTADKSSSTAYMQLSSLTSEDSAVYYCARSTYYGGDWYFNVWGAGTTVTVSGGGGSGGGGSGGGGSQIVLSQSPAILSASPGEKVTMTCRASSSVSYIHWFQQKPGSSPKPWIYATSNLASGVPVRFSGSGSGTSYSLTISRVEAEDAATYYCQQWTSNPPTFGGGTKLEIKTRFKIPIEELEDRVFVNCNTSITWVEGTVGTLLSDITRLDLGKRILDPRGIYRCNGTDIYKDKESTVQVHYRMCQSCVELDPATVAGIIVTDVIATLLLALGVFCFAGHETGRLSGAADTQALLRNDQVYQPLRDRDDAQYSHLGGNWARNK

SEQ ID NO: 19309 - protein, 424 aa, Artificial Sequence
  Synthetic Polypeptide
MALPVTALLLPLALLLHAARPQVQLQQPGAELVKPGASVKMSCKASGYTFTSYNMHWVKQTPGRGLEWIGAIYPGNGDTSYNQKFKGKATLTADKSSSTAYMQLSSLTSEDSAVYYCARSTYYGGDWYFNVWGAGTTVTVSGGGGSGGGGSGGGGSQIVLSQSPAILSASPGEKVTMTCRASSSVSYIHWFQQKPGSSPKPWIYATSNLASGVPVRFSGSGSGTSYSLTISRVEAEDAATYYCQQWTSNPPTFGGGTKLEIKTRQSIKGNHLVKVYDYQEDGSVLLTCDAEAKNITWFKDGKMIGFLTEDKKKWNLGSNAKDPRGMYQCKGSQNKSKPLQVYYRMCQNCIELNAATISGFLFAEIVSIFVLAVGVYFIAGQDGVRQSRASDKQTLLPNDQLYQPLKDREDDQYSHLQGNQLRRN

SEQ ID NO: 19310 - protein, 407 aa, Artificial Sequence
  Synthetic Polypeptide
MALPVTALLLPLALLLHAARPQVQLQQPGAELVKPGASVKMSCKASGYTFTSYNMHWVKQTPGRGLEWIGAIYPGNGDTSYNQKFKGKATLTADKSSSTAYMQLSSLTSEDSAVYYCARSTYYGGDWYFNVWGAGTTVTVSGGGGSGGGGSGGGGSQIVLSQSPAILSASPGEKVTMTCRASSSVSYIHWFQQKPGSSPKPWIYATSNLASGVPVRFSGSGSGTSYSLTISRVEAEDAATYYCQQWTSNPPTFGGGTKLEIKTRQSFGLLDPKLCYLLDGILFIYGVILTALFLRVKFSRSADAPAYQQGQNQLYNELNLGRREEYDVLDKRRGRDPEMGGKPQRRKNPQEGLYNELQKDKMAEAYSEIGMKGERRRGKGHDGLYQGLSTATKDTYDALHMQALPPR

SEQ ID NO: 19311 - protein, 640 aa, Artificial Sequence
  Synthetic Polypeptide
MALPVTALLLPLALLLHAARPQIVLSQSPAILSASPGEKVTMTCRASSSVSYIHWFQQKPGSSPKPWIYATSNLASGVPVRFSGSGSGTSYSLTISRVEAEDAATYYCQQWTSNPPTFGGGTKLEIKGGGGSGGGGSGGGGSQVQLQQPGAELVKPGASVKMSCKASGYTFTSYNMHWVKQTPGRGLEWIGAIYPGNGDTSYNQKFKGKATLTADKSSSTAYMQLSSLTSEDSAVYYCARSTYYGGDWYFNVWGAGTTVTVSTRGSGIQNPDPAVYQLRDSKSSDKSVCLFTDFDSQTNVSQSKDSDVYITDKTVLDMRSMDFKSNSAVAWSNKSDFACANAFNNSIIPEDTFFPSPESSCDVKLVEKSFETDTNLNFQNLSVIGFRILLLKVAGFNLLMTLRLWSSRAKRSGSGVKQTLNFDLLKLAGDVESNPGPSRGHMTEYKPTVRLATRDDVPRAVRTLAAAFADYPATRHTVDPDRHIERVTELQELFLTRVGLDIGKVWVADDGAAVAVWTTPESVEAGAVFAEIGPRMAELSGSRLAAQQQMEGLLAPHRPKEPAWFLATVGVSPDHQGKGLGSAVVLPGVEAAERAGVPAFLETSAPRNLPFYERLGFTVTADVEVPEGPRTWCMTRKPGA

SEQ ID NO: 19312 - protein, 672 aa, Artificial Sequence
  Synthetic Polypeptide
MALPVTALLLPLALLLHAARPQIVLSQSPAILSASPGEKVTMTCRASSSVSYIHWFQQKPGSSPKPWIYATSNLASGVPVRFSGSGSGTSYSLTISRVEAEDAATYYCQQWTSNPPTFGGGTKLEIKGGGGSGGGGSGGGGSQVQLQQPGAELVKPGASVKMSCKASGYTFTSYNMHWVKQTPGRGLEWIGAIYPGNGDTSYNQKFKGKATLTADKSSSTAYMQLSSLTSEDSAVYYCARSTYYGGDWYFNVWGAGTTVTVSLEDLKNVFPPEVAVFEPSEAEISHTQKATLVCLATGFYPDHVELSWWVNGKEVHSGVSTDPQPLKEQPALNDSRYCLSSRLRVSATFWQNPRNHFRCQVQFYGLSENDEWTQDRAKPVTQIVSAEAWGRADCGFTSESYQQGVLSATILYEILLGKATLYAVLVSALVLMAMVKRKDSRGRAKRSGSGATNFSLLKQAGDVEENPGPTRGHMTEYKPTVRLATRDDVPRAVRTLAAAFADYPATRHTVDPDRHIERVTELQELFLTRVGLDIGKVWVADDGAAVAVWTTPESVEAGAVFAEIGPRMAELSGSRLAAQQQMEGLLAPHRPKEPAWFLATVGVSPDHQGKGLGSAVVLPGVEAAERAGVPAFLETSAPRNLPFYERLGFTVTADVEVPEGPRTWCMTRKPGA

SEQ ID NO: 19313 - protein, 722 aa, Artificial Sequence
  Synthetic Polypeptide
MALPVTALLLPLALLLHAARPQIVLSQSPAILSASPGEKVTMTCRASSSVSYIHWFQQKPGSSPKPWIYATSNLASGVPVRFSGSGSGTSYSLTISRVEAEDAATYYCQQWTSNPPTFGGGTKLEIKGGGGSGGGGSGGGGSQVQLQQPGAELVKPGASVKMSCKASGYTFTSYNMHWVKQTPGRGLEWIGAIYPGNGDTSYNQKFKGKATLTADKSSSTAYMQLSSLTSEDSAVYYCARSTYYGGDWYFNVWGAGTTVTVSTREQKLISEEDLGSGTPFPSLAPPIMLLVDGKQQMVVVCLVLDVAPPGLDSPIWFSAGNGSALDAFTYGPSPATDGTWTNLAHLSLPSEELASWEPLVCHTGPGAEGHSRSTQPMHLSGEASTARTCPQEPLRGTPGGALWLGVLRLLLFKLLLFDLLLTCSCLCDPAGPLPSPATTTRLRALGSHRLHPATETGGREATSSPRPQPRDRRWGDTPPGRKPGSPVRAKRSGSGVKQTLNFDLLKLAGDVESNPGPSRSRGHMTEYKPTVRLATRDDVPRAVRTLAAAFADYPATRHTVDPDRHIERVTELQELFLTRVGLDIGKVWVADDGAAVAVWTTPESVEAGAVFAEIGPRMAELSGSRLAAQQQMEGLLAPHRPKEPAWFLATVGVSPDHQGKGLGSAVVLPGVEAAERAGVPAFLETSAPRNLPFYERLGFTVTADVEVPEGPRTWCMTRKPGA

SEQ ID NO: 19314 - protein, 537 aa, Artificial Sequence
  Synthetic Polypeptide
MALPVTALLLPLALLLHAARPQIVLSQSPAILSASPGEKVTMTCRASSSVSYIHWFQQKPGSSPKPWIYATSNLASGVPVRFSGSGSGTSYSLTISRVEAEDAATYYCQQWTSNPPTFGGGTKLEIKLEDLKNVFPPEVAVFEPSEAEISHTQKATLVCLATGFYPDHVELSWWVNGKEVHSGVSTDPQPLKEQPALNDSRYCLSSRLRVSATFWQNPRNHFRCQVQFYGLSENDEWTQDRAKPVTQIVSAEAWGRADCGFTSESYQQGVLSATILYEILLGKATLYAVLVSALVLMAMVKRKDSRGRAKRSGSGATNFSLLKQAGDVEENPGPTRGHMTEYKPTVRLATRDDVPRAVRTLAAAFADYPATRHTVDPDRHIERVTELQELFLTRVGLDIGKVWVADDGAAVAVWTTPESVEAGAVFAEIGPRMAELSGSRLAAQQQMEGLLAPHRPKEPAWFLATVGVSPDHQGKGLGSAVVLPGVEAAERAGVPAFLETSAPRNLPFYERLGFTVTADVEVPEGPRTWCMTRKPGA

SEQ ID NO: 19315 - protein, 307 aa, Artificial Sequence
  Synthetic Polypeptide
MALPVTALLLPLALLLHAARPQIVLSQSPAILSASPGEKVTMTCRASSSVSYIHWFQQKPGSSPKPWIYATSNLASGVPVRFSGSGSGTSYSLTISRVEAEDAATYYCQQWTSNPPTFGGGTKLEIKLEDLKNVFPPEVAVFEPSEAEISHTQKATLVCLATGFYPDHVELSWWVNGKEVHSGVSTDPQPLKEQPALNDSRYCLSSRLRVSATFWQNPRNHFRCQVQFYGLSENDEWTQDRAKPVTQIVSAEAWGRADCGFTSESYQQGVLSATILYEILLGKATLYAVLVSALVLMAMVKRKDSRG

SEQ ID NO: 19316 - protein, 449 aa, Artificial Sequence
  Synthetic Polypeptide
MDWIWRILFLVGAATGAHSFEQVQLQQPGAELVKPGASVKMSCKASGYTFTSYNMHWVKQTPGRGLEWIGAIYPGNGDTSYNQKFKGKATLTADKSSSTAYMQLSSLTSEDSAVYYCARSTYYGGDWYFNVWGAGTTVTVSTRIQNPDPAVYQLRDSKSSDKSVCLFTDFDSQTNVSQSKDSDVYITDKTVLDMRSMDFKSNSAVAWSNKSDFACANAFNNSIIPEDTFFPSPESSCDVKLVEKSFETDTNLNFQNLSVIGFRILLLKVAGFNLLMTLRLWSSRAKRSGSGVKQTLNFDLLKLAGDVESNPGPSRGHMAKPLSQEESTLIERATATINSIPISEDYSVASAALSSDGRIFTGVNVYHFTGGPCAELVVLGTAAAAAAGNLTCIVAIGNENRGILSPCGRCRQVLLDLHPGIKAIVKDSDGQPTAVGIRELLPSGYVWEG

SEQ ID NO: 19317 - protein, 283 aa, Artificial Sequence
  Synthetic Polypeptide
MDWIWRILFLVGAATGAHSFEQVQLQQPGAELVKPGASVKMSCKASGYTFTSYNMHWVKQTPGRGLEWIGAIYPGNGDTSYNQKFKGKATLTADKSSSTAYMQLSSLTSEDSAVYYCARSTYYGGDWYFNVWGAGTTVTVSTRIQNPDPAVYQLRDSKSSDKSVCLFTDFDSQTNVSQSKDSDVYITDKTVLDMRSMDFKSNSAVAWSNKSDFACANAFNNSIIPEDTFFPSPESSCDVKLVEKSFETDTNLNFQNLSVIGFRILLLKVAGFNLLMTLRLWSS

SEQ ID NO: 19318 - protein, 555 aa, Artificial Sequence
  Synthetic Polypeptide
MALPVTALLLPLALLLHAARPQIVLSQSPAILSASPGEKVTMTCRASSSVSYIHWFQQKPGSSPKPWIYATSNLASGVPVRFSGSGSGTSYSLTISRVEAEDAATYYCQQWTSNPPTFGGGTKLEIKLEGKPIPNPLLGLDSTGSGEDLKNVFPPEVAVFEPSEAEISHTQKATLVCLATGFYPDHVELSWWVNGKEVHSGVCTDPQPLKEQPALNDSRYCLSSRLRVSATFWQNPRNHFRCQVQFYGLSENDEWTQDRAKPVTQIVSAEAWGRADCGFTSESYQQGVLSATILYEILLGKATLYAVLVSALVLMAMVKRKDSRGRAKRSGSGATNFSLLKQAGDVEENPGPTRGHMTEYKPTVRLATRDDVPRAVRTLAAAFADYPATRHTVDPDRHIERVTELQELFLTRVGLDIGKVWVADDGAAVAVWTTPESVEAGAVFAEIGPRMAELSGSRLAAQQQMEGLLAPHRPKEPAWFLATVGVSPDHQGKGLGSAVVLPGVEAAERAGVPAFLETSAPRNLPFYERLGFTVTADVEVPEGPRTWCMTRKPGA

SEQ ID NO: 19319 - protein, 325 aa, Artificial Sequence
  Synthetic Polypeptide
MALPVTALLLPLALLLHAARPQIVLSQSPAILSASPGEKVTMTCRASSSVSYIHWFQQKPGSSPKPWIYATSNLASGVPVRFSGSGSGTSYSLTISRVEAEDAATYYCQQWTSNPPTFGGGTKLEIKLEGKPIPNPLLGLDSTGSGEDLKNVFPPEVAVFEPSEAEISHTQKATLVCLATGFYPDHVELSWWVNGKEVHSGVCTDPQPLKEQPALNDSRYCLSSRLRVSATFWQNPRNHFRCQVQFYGLSENDEWTQDRAKPVTQIVSAEAWGRADCGFTSESYQQGVLSATILYEILLGKATLYAVLVSALVLMAMVKRKDSRG

SEQ ID NO: 19320 - protein, 461 aa, Artificial Sequence
  Synthetic Polypeptide
MDWIWRILFLVGAATGAHSFEQVQLQQPGAELVKPGASVKMSCKASGYTFTSYNMHWVKQTPGRGLEWIGAIYPGNGDTSYNQKFKGKATLTADKSSSTAYMQLSSLTSEDSAVYYCARSTYYGGDWYFNVWGAGTTVTVSTREQKLISEEDGSGIQNPDPAVYQLRDSKSSDKSVCLFTDFDSQTNVSQSKDSDVYITDKCVLDMRSMDFKSNSAVAWSNKSDFACANAFNNSIIPEDTFFPSPESSCDVKLVEKSFETDTNLNFQNLSVIGFRILLLKVAGFNLLMTLRLWSSRAKRSGSGVKQTLNFDLLKLAGDVESNPGPSRGHMAKPLSQEESTLIERATATINSIPISEDYSVASAALSSDGRIFTGVNVYHFTGGPCAELVVLGTAAAAAAGNLTCIVAIGNENRGILSPCGRCRQVLLDLHPGIKAIVKDSDGQPTAVGIRELLPSGYVWEG

SEQ ID NO: 19321 - protein, 295 aa, Artificial Sequence
  Synthetic Polypeptide
MDWIWRILFLVGAATGAHSFEQVQLQQPGAELVKPGASVKMSCKASGYTFTSYNMHWVKQTPGRGLEWIGAIYPGNGDTSYNQKFKGKATLTADKSSSTAYMQLSSLTSEDSAVYYCARSTYYGGDWYFNVWGAGTTVTVSTREQKLISEEDGSGIQNPDPAVYQLRDSKSSDKSVCLFTDFDSQTNVSQSKDSDVYITDKCVLDMRSMDFKSNSAVAWSNKSDFACANAFNNSIIPEDTFFPSPESSCDVKLVEKSFETDTNLNFQNLSVIGFRILLLKVAGFNLLMTLRLWSS

SEQ ID NO: 19322 - protein, 640 aa, Artificial Sequence
  Synthetic Polypeptide
MALPVTALLLPLALLLHAARPQIVLSQSPAILSASPGEKVTMTCRASSSVSYIHWFQQKPGSSPKPWIYATSNLASGVPVRFSGSGSGTSYSLTISRVEAEDAATYYCQQWTSNPPTFGGGTKLEIKGGGGSGGGGSGGGGSQVQLQQPGAELVKPGASVKMSCKASGYTFTSYNMHWVKQTPGRGLEWIGAIYPGNGDTSYNQKFKGKATLTADKSSSTAYMQLSSLTSEDSAVYYCARSTYYGGDWYFNVWGAGTTVTVSTRGSGIQNPDPAVYQLRDSKSSDKSVCLFTDFDSQTNVSQSKDSDVYITDKTVLDMRSMDFKSNSAVAWSNKSDFACANAFNNSIIPEDTFFPSSDVPCDVKLVEKSFETDTNLNFQNLSVIGFRILLLKVAGFNLLMTLRLWSSRAKRSGSGVKQTLNFDLLKLAGDVESNPGPSRGHMTEYKPTVRLATRDDVPRAVRTLAAAFADYPATRHTVDPDRHIERVTELQELFLTRVGLDIGKVWVADDGAAVAVWTTPESVEAGAVFAEIGPRMAELSGSRLAAQQQMEGLLAPHRPKEPAWFLATVGVSPDHQGKGLGSAVVLPGVEAAERAGVPAFLETSAPRNLPFYERLGFTVTADVEVPEGPRTWCMTRKPGA

SEQ ID NO: 19323 - protein, 672 aa, Artificial Sequence
  Synthetic Polypeptide
MALPVTALLLPLALLLHAARPQIVLSQSPAILSASPGEKVTMTCRASSSVSYIHWFQQKPGSSPKPWIYATSNLASGVPVRFSGSGSGTSYSLTISRVEAEDAATYYCQQWTSNPPTFGGGTKLEIKGGGGSGGGGSGGGGSQVQLQQPGAELVKPGASVKMSCKASGYTFTSYNMHWVKQTPGRGLEWIGAIYPGNGDTSYNQKFKGKATLTADKSSSTAYMQLSSLTSEDSAVYYCARSTYYGGDWYFNVWGAGTTVTVSLEDLKNVFPPEVAVFEPSKAEIAHTQKATLVCLATGFYPDHVELSWWVNGKEVHSGVSTDPQPLKEQPALNDSRYCLSSRLRVSATFWQNPRNHFRCQVQFYGLSENDEWTQDRAKPVTQIVSAEAWGRADCGITSASYHQGVLSATILYEILLGKATLYAVLVSALVLMAMVKRKDSRGRAKRSGSGATNFSLLKQAGDVEENPGPTRGHMTEYKPTVRLATRDDVPRAVRTLAAAFADYPATRHTVDPDRHIERVTELQELFLTRVGLDIGKVWVADDGAAVAVWTTPESVEAGAVFAEIGPRMAELSGSRLAAQQQMEGLLAPHRPKEPAWFLATVGVSPDHQGKGLGSAVVLPGVEAAERAGVPAFLETSAPRNLPFYERLGFTVTADVEVPEGPRTWCMTRKPGA

SEQ ID NO: 19324 - protein, 695 aa, Artificial Sequence
  Synthetic Polypeptide
MALPVTALLLPLALLLHAARPQIVLSQSPAILSASPGEKVTMTCRASSSVSYIHWFQQKPGSSPKPWIYATSNLASGVPVRFSGSGSGTSYSLTISRVEAEDAATYYCQQWTSNPPTFGGGTKLEIKGGGGSGGGGSGGGGSQVQLQQPGAELVKPGASVKMSCKASGYTFTSYNMHWVKQTPGRGLEWIGAIYPGNGDTSYNQKFKGKATLTADKSSSTAYMQLSSLTSEDSAVYYCARSTYYGGDWYFNVWGAGTTVTVSTRGSGGGGSGGGGSGDGNEEMGGITQTPYKVSISGTTVILTCPQYPGSEILWQHNDKNIGGDEDDKNIGSDEDHLSLKEFSELEQSGYYVCYPRGSKPEDANFYLYLRARVCENCMEMDVMSVATIVIVDICITGGLLLLVYYWSKNRKAKAKPVTRGAGAGGRQRGQNKERPPPVPNPDYEPIRKGQRDLYSGLNQRRIRAKRSGSGVKQTLNFDLLKLAGDVESNPGPSRGHMTEYKPTVRLATRDDVPRAVRTLAAAFADYPATRHTVDPDRHIERVTELQELFLTRVGLDIGKVWVADDGAAVAVWTTPESVEAGAVFAEIGPRMAELSGSRLAAQQQMEGLLAPHRPKEPAWFLATVGVSPDHQGKGLGSAVVLPGVEAAERAGVPAFLETSAPRNLPFYERLGFTVTADVEVPEGPRTWCMTRKPGA

SEQ ID NO: 19325 - protein, 660 aa, Artificial Sequence
  Synthetic Polypeptide
MALPVTALLLPLALLLHAARPQIVLSQSPAILSASPGEKVTMTCRASSSVSYIHWFQQKPGSSPKPWIYATSNLASGVPVRFSGSGSGTSYSLTISRVEAEDAATYYCQQWTSNPPTFGGGTKLEIKGGGGSGGGGSGGGGSQVQLQQPGAELVKPGASVKMSCKASGYTFTSYNMHWVKQTPGRGLEWIGAIYPGNGDTSYNQKFKGKATLTADKSSSTAYMQLSSLTSEDSAVYYCARSTYYGGDWYFNVWGAGTTVTVSTRGSGGGGSGGGGSGFKIPIEELEDRVFVNCNTSITWVEGTVGTLLSDITRLDLGKRILDPRGIYRCNGTDIYKDKESTVQVHYRMCQSCVELDPATVAGIIVTDVIATLLLALGVFCFAGHETGRLSGAADTQALLRNDQVYQPLRDRDDAQYSHLGGNWARNKRAKRSGSGVKQTLNFDLLKLAGDVESNPGPSRGHMTEYKPTVRLATRDDVPRAVRTLAAAFADYPATRHTVDPDRHIERVTELQELFLTRVGLDIGKVWVADDGAAVAVWTTPESVEAGAVFAEIGPRMAELSGSRLAAQQQMEGLLAPHRPKEPAWFLATVGVSPDHQGKGLGSAVVLPGVEAAERAGVPAFLETSAPRNLPFYERLGFTVTADVEVPEGPRTWCMTRKPGA

SEQ ID NO: 19326 - protein, 670 aa, Artificial Sequence
  Synthetic Polypeptide
MALPVTALLLPLALLLHAARPQIVLSQSPAILSASPGEKVTMTCRASSSVSYIHWFQQKPGSSPKPWIYATSNLASGVPVRFSGSGSGTSYSLTISRVEAEDAATYYCQQWTSNPPTFGGGTKLEIKGGGGSGGGGSGGGGSQVQLQQPGAELVKPGASVKMSCKASGYTFTSYNMHWVKQTPGRGLEWIGAIYPGNGDTSYNQKFKGKATLTADKSSSTAYMQLSSLTSEDSAVYYCARSTYYGGDWYFNVWGAGTTVTVSTRGSGGGGSGGGGSGQSIKGNHLVKVYDYQEDGSVLLTCDAEAKNITWFKDGKMIGFLTEDKKKWNLGSNAKDPRGMYQCKGSQNKSKPLQVYYRMCQNCIELNAATISGFLFAEIVSIFVLAVGVYFIAGQDGVRQSRASDKQTLLPNDQLYQPLKDREDDQYSHLQGNQLRRNRAKRSGSGVKQTLNFDLLKLAGDVESNPGPSRGHMTEYKPTVRLATRDDVPRAVRTLAAAFADYPATRHTVDPDRHIERVTELQELFLTRVGLDIGKVWVADDGAAVAVWTTPESVEAGAVFAEIGPRMAELSGSRLAAQQQMEGLLAPHRPKEPAWFLATVGVSPDHQGKGLGSAVVLPGVEAAERAGVPAFLETSAPRNLPFYERLGFTVTADVEVPEGPRTWCMTRKPGA

SEQ ID NO: 19327 - protein, 653 aa, Artificial Sequence
  Synthetic Polypeptide
MALPVTALLLPLALLLHAARPQIVLSQSPAILSASPGEKVTMTCRASSSVSYIHWFQQKPGSSPKPWIYATSNLASGVPVRFSGSGSGTSYSLTISRVEAEDAATYYCQQWTSNPPTFGGGTKLEIKGGGGSGGGGSGGGGSQVQLQQPGAELVKPGASVKMSCKASGYTFTSYNMHWVKQTPGRGLEWIGAIYPGNGDTSYNQKFKGKATLTADKSSSTAYMQLSSLTSEDSAVYYCARSTYYGGDWYFNVWGAGTTVTVSTRGSGGGGSGGGGSGQSFGLLDPKLCYLLDGILFIYGVILTALFLRVKFSRSADAPAYQQGQNQLYNELNLGRREEYDVLDKRRGRDPEMGGKPQRRKNPQEGLYNELQKDKMAEAYSEIGMKGERRRGKGHDGLYQGLSTATKDTYDALHMQALPPRRAKRSGSGVKQTLNFDLLKLAGDVESNPGPSRGHMTEYKPTVRLATRDDVPRAVRTLAAAFADYPATRHTVDPDRHIERVTELQELFLTRVGLDIGKVWVADDGAAVAVWTTPESVEAGAVFAEIGPRMAELSGSRLAAQQQMEGLLAPHRPKEPAWFLATVGVSPDHQGKGLGSAVVLPGVEAAERAGVPAFLETSAPRNLPFYERLGFTVTADVEVPEGPRTWCMTRKPGA

SEQ ID NO: 19328 - protein, 754 aa, Artificial Sequence
  Synthetic Polypeptide
MALPVTALLLPLALLLHAARPEVQLVESGGGLVQPGGSLRLSCAASGFSFSDFWMSWVRQAPGKGLEWVATISQAGSEKDYVDSVKGRFTISRDNAKKSLYLQMNSLRAEDTAVYYCASGVYSFDYRGQGTLVTVSSGTGGGGSGGGGSGGGGSEFQIVLSQSPAILSASPGEKVTMTCRASSSVSYIHWFQQKPGSSPKPWIYATSNLASGVPVRFSGSGSGTSYSLTISRVEAEDAATYYCQQWTSNPPTFGGGTKLEIKLEDLKNVFPPEVAVFEPSEAEISHTQKATLVCLATGFYPDHVELSWWVNGKEVHSGVCTDPQPLKEQPALNDSRYCLSSRLRVSATFWQNPRNHFRCQVQFYGLSENDEWTQDRAKPVTQIVSAEAWGRADCGFTSESYQQGVLSATILYEILLGKATLYAVLVSALVLMAMVKRKDSRGRAKRSGSGATNFSLLKQAGDVEENPGPTSMDWIWRILFLVGAATGAHSFEQVQLQQPGAELVKPGASVKMSCKASGYTFTSYNMHWVKQTPGRGLEWIGAIYPGNGDTSYNQKFKGKATLTADKSSSTAYMQLSSLTSEDSAVYYCARSTYYGGDWYFNVWGAGTTVTVSTRIQNPDPAVYQLRDSKSSDKSVCLFTDFDSQTNVSQSKDSDVYITDKCVLDMRSMDFKSNSAVAWSNKSDFACANAFNNSIIPEDTFFPSPESSCDVKLVEKSFETDTNLNFQNLSVIGFRILLLKVAGFNLLMTLRLWSS

SEQ ID NO: 19329 - protein, 758 aa, Artificial Sequence
  Synthetic Polypeptide
MALPVTALLLPLALLLHAARPEVQLVESGGGLVQPGGSLRLSCAASGFSFSDFWMSWVRQAPGKGLEWVATISQAGSEKDYVDSVKGRFTISRDNAKKSLYLQMNSLRAEDTAVYYCASGVYSFDYRGQGTLVTVSSGTGGGGSGGGGSGGGGSEFQIVLSQSPAILSASPGEKVTMTCRASSSVSYIHWFQQKPGSSPKPWIYATSNLASGVPVRFSGSGSGTSYSLTISRVEAEDAATYYCQQWTSNPPTFGGGTKLEIKLEIQNPDPAVYQLRDSKSSDKSVCLFTDFDSQTNVSQSKDSDVYITDKCVLDMRSMDFKSNSAVAWSNKSDFACANAFNNSIIPEDTFFPSPESSCDVKLVEKSFETDTNLNFQNLSVIGFRILLLKVAGFNLLMTLRLWSSRAKRSGSGVKQTLNFDLLKLAGDVESNPGPTSMDWIWRILFLVGAATGAHSFEQVQLQQPGAELVKPGASVKMSCKASGYTFTSYNMHWVKQTPGRGLEWIGAIYPGNGDTSYNQKFKGKATLTADKSSSTAYMQLSSLTSEDSAVYYCARSTYYGGDWYFNVWGAGTTVTVSTREDLKNVFPPEVAVFEPSEAEISHTQKATLVCLATGFYPDHVELSWWVNGKEVHSGVCTDPQPLKEQPALNDSRYCLSSRLRVSATFWQNPRNHFRCQVQFYGLSENDEWTQDRAKPVTQIVSAEAWGRADCGFTSESYQQGVLSATILYEILLGKATLYAVLVSALVLMAMVKRKDSRG

SEQ ID NO: 19330 - protein, 950 aa, Artificial Sequence
  Synthetic Polypeptide
MALPVTALLLPLALLLHAARPEVQLVESGGGLVQPGGSLRLSCAASGFSFSDFWMSWVRQAPGKGLEWVATISQAGSEKDYVDSVKGRFTISRDNAKKSLYLQMNSLRAEDTAVYYCASGVYSFDYRGQGTLVTVSSGTGGGGSGGGGSGGGGSEFQIVLSQSPAILSASPGEKVTMTCRASSSVSYIHWFQQKPGSSPKPWIYATSNLASGVPVRFSGSGSGTSYSLTISRVEAEDAATYYCQQWTSNPPTFGGGTKLEIKLEDLKNVFPPEVAVFEPSEAEISHTQKATLVCLATGFYPDHVELSWWVNGKEVHSGVSTDPQPLKEQPALNDSRYCLSSRLRVSATFWQNPRNHFRCQVQFYGLSENDEWTQDRAKPVTQIVSAEAWGRADCGSQSFGLLDPKLCYLLDGILFIYGVILTALFLRVKFSRSADAPAYQQGQNQLYNELNLGRREEYDVLDKRRGRDPEMGGKPQRRKNPQEGLYNELQKDKMAEAYSEIGMKGERRRGKGHDGLYQGLSTATKDTYDALHMQALPPRRAKRSGSGATNFSLLKQAGDVEENPGPTSMDWIWRILFLVGAATGAHSFEQVQLQQPGAELVKPGASVKMSCKASGYTFTSYNMHWVKQTPGRGLEWIGAIYPGNGDTSYNQKFKGKATLTADKSSSTAYMQLSSLTSEDSAVYYCARSTYYGGDWYFNVWGAGTTVTVSTRIQNPDPAVYQLRDSKSSDKSVCLFTDFDSQTNVSQSKDSDVYITDKTVLDMRSMDFKSNSAVAWSNKSDFACANAFNNSIIPEDTFFPSPESSCGTQSFGLLDPKLCYLLDGILFIYGVILTALFLRVKFSRSADAPAYQQGQNQLYNELNLGRREEYDVLDKRRGRDPEMGGKPQRRKNPQEGLYNELQKDKMAEAYSEIGMKGERRRGKGHDGLYQGLSTATKDTYDALHMQALPPR

SEQ ID NO: 19331 - protein, 780 aa, Artificial Sequence
  Synthetic Polypeptide
MALPVTALLLPLALLLHAARPEVQLVESGGGLVQPGGSLRLSCAASGFSFSDFWMSWVRQAPGKGLEWVATISQAGSEKDYVDSVKGRFTISRDNAKKSLYLQMNSLRAEDTAVYYCASGVYSFDYRGQGTLVTVSSGTGGGGSGGGGSGGGGSEFQIVLSQSPAILSASPGEKVTMTCRASSSVSYIHWFQQKPGSSPKPWIYATSNLASGVPVRFSGSGSGTSYSLTISRVEAEDAATYYCQQWTSNPPTFGGGTKLEIKLEGQPKANPTVTLFPPSSEELQANKATLVCLISDFYPGAVTVAWKADGSPVKAGVETTKPSKQSNNKYAASSYLSLTPEQWKSHRSYSCQVTHEGSTVEKTVAPTECSPIKTDVITMDPKDNCSKDANDTLLLQLTNTSAYYMYLLLLLKSVVYFAIITCCLLRRTAFCCNGEKSRAKRSGSGATNFSLLKQAGDVEENPGPTSMDWIWRILFLVGAATGAHSFEQVQLQQPGAELVKPGASVKMSCKASGYTFTSYNMHWVKQTPGRGLEWIGAIYPGNGDTSYNQKFKGKATLTADKSSSTAYMQLSSLTSEDSAVYYCARSTYYGGDWYFNVWGAGTTVTVSTRASTKGPSVFPLAPSSKSTSGGTAALGCLVKDYFPEPVTVSWNSGALTSGVHTFPAVLQSSGLYSLSSVVTVPSSSLGTQTYICNVNHKPSNTKVDKRVEPKSCEVKTDSTDHVKPKETENTKQPSKSCHKPKAIVHTEKVNMMSLTVLGLRMLFAKTVAVNFLLTAKLFFL

SEQ ID NO: 19332 - protein, 761 aa, Artificial Sequence
  Synthetic Polypeptide
MALPVTALLLPLALLLHAARPEVQLVESGGGLVQPGGSLRLSCAASGFSFSDFWMSWVRQAPGKGLEWVATISQAGSEKDYVDSVKGRFTISRDNAKKSLYLQMNSLRAEDTAVYYCASGVYSFDYRGQGTLVTVSSGTGGGGSGGGGSGGGGSEFQIVLSQSPAILSASPGEKVTMTCRASSSVSYIHWFQQKPGSSPKPWIYATSNLASGVPVRFSGSGSGTSYSLTISRVEAEDAATYYCQQWTSNPPTFGGGTKLEIKLEGQPKANPTVTLFPPSSEELQANKATLVCLISDFYPGAVTVAWKADGSPVKAGVETTKPSKQSNNKYAASSYLSLTPEQWKSHRSYSCQVTHEGSTVEKTVAPTECSGRADCGFTSESYQQGVLSATILYEILLGKATLYAVLVSALVLMAMVKRKDSRGRAKRSGSGVKQTLNFDLLKLAGDVESNPGPTSMDWIWRILFLVGAATGAHSFEQVQLQQPGAELVKPGASVKMSCKASGYTFTSYNMHWVKQTPGRGLEWIGAIYPGNGDTSYNQKFKGKATLTADKSSSTAYMQLSSLTSEDSAVYYCARSTYYGGDWYFNVWGAGTTVTVSTRASTKGPSVFPLAPSSKSTSGGTAALGCLVKDYFPEPVTVSWNSGALTSGVHTFPAVLQSSGLYSLSSVVTVPSSSLGTQTYICNVNHKPSNTKVDKRVEPKSCIPEDTFFPSPESSCDVKLVEKSFETDTNLNFQNLSVIGFRILLLKVAGFNLLMTLRLWSS

SEQ ID NO: 19333 - protein, 895 aa, Artificial Sequence
  Synthetic Polypeptide
MALPVTALLLPLALLLHAARPEVQLVESGGGLVQPGGSLRLSCAASGFSFSDFWMSWVRQAPGKGLEWVATISQAGSEKDYVDSVKGRFTISRDNAKKSLYLQMNSLRAEDTAVYYCASGVYSFDYRGQGTLVTVSSGTGGGGSGGGGSGGGGSEFQIVLSQSPAILSASPGEKVTMTCRASSSVSYIHWFQQKPGSSPKPWIYATSNLASGVPVRFSGSGSGTSYSLTISRVEAEDAATYYCQQWTSNPPTFGGGTKLEIKLEIQNPDPAVYQLRDSKSSDKSVCLFTDFDSQTNVSQSKDSDVYITDKCVLDMRSMDFKSNSAVAWSNKSDFACANAFNNSIIPEDTFFPSPESSCDVKLVEKSFETDTNLNFQNLSVIGFRILLLKVAGFNLLMTLRLWSSRAKRSGSGVKQTLNFDLLKLAGDVESNPGPTSMDWIWRILFLVGAATGAHSGPQLQLQESGPGLVKPSETLSLTCTVSGDSISSGDYYWGWIRQPPGKGLEWIGHIYYSGVTYYNPSLKSRVTISVDTSRNQFSLKLSSVTAADTAVYYCTREDSSNWRSRGQGTLVTVSSGSGGGGSGGGGSGGGGSFEQVQLQQPGAELVKPGASVKMSCKASGYTFTSYNMHWVKQTPGRGLEWIGAIYPGNGDTSYNQKFKGKATLTADKSSSTAYMQLSSLTSEDSAVYYCARSTYYGGDWYFNVWGAGTTVTVSTREDLKNVFPPEVAVFEPSEAEISHTQKATLVCLATGFYPDHVELSWWVNGKEVHSGVCTDPQPLKEQPALNDSRYCLSSRLRVSATFWQNPRNHFRCQVQFYGLSENDEWTQDRAKPVTQIVSAEAWGRADCGFTSESYQQGVLSATILYEILLGKATLYAVLVSALVLMAMVKRKDSRG

SEQ ID NO: 19334 - protein, 1087 aa, Artificial Sequence
  Synthetic Polypeptide
MALPVTALLLPLALLLHAARPEVQLVESGGGLVQPGGSLRLSCAASGFSFSDFWMSWVRQAPGKGLEWVATISQAGSEKDYVDSVKGRFTISRDNAKKSLYLQMNSLRAEDTAVYYCASGVYSFDYRGQGTLVTVSSGTGGGGSGGGGSGGGGSEFQIVLSQSPAILSASPGEKVTMTCRASSSVSYIHWFQQKPGSSPKPWIYATSNLASGVPVRFSGSGSGTSYSLTISRVEAEDAATYYCQQWTSNPPTFGGGTKLEIKLEDLKNVFPPEVAVFEPSEAEISHTQKATLVCLATGFYPDHVELSWWVNGKEVHSGVSTDPQPLKEQPALNDSRYCLSSRLRVSATFWQNPRNHFRCQVQFYGLSENDEWTQDRAKPVTQIVSAEAWGRADCGSQSFGLLDPKLCYLLDGILFIYGVILTALFLRVKFSRSADAPAYQQGQNQLYNELNLGRREEYDVLDKRRGRDPEMGGKPQRRKNPQEGLYNELQKDKMAEAYSEIGMKGERRRGKGHDGLYQGLSTATKDTYDALHMQALPPRRAKRSGSGATNFSLLKQAGDVEENPGPTSMDWIWRILFLVGAATGAHSGPQLQLQESGPGLVKPSETLSLTCTVSGDSISSGDYYWGWIRQPPGKGLEWIGHIYYSGVTYYNPSLKSRVTISVDTSRNQFSLKLSSVTAADTAVYYCTREDSSNWRSRGQGTLVTVSSGSGGGGSGGGGSGGGGSFEQVQLQQPGAELVKPGASVKMSCKASGYTFTSYNMHWVKQTPGRGLEWIGAIYPGNGDTSYNQKFKGKATLTADKSSSTAYMQLSSLTSEDSAVYYCARSTYYGGDWYFNVWGAGTTVTVSTRIQNPDPAVYQLRDSKSSDKSVCLFTDFDSQTNVSQSKDSDVYITDKTVLDMRSMDFKSNSAVAWSNKSDFACANAFNNSIIPEDTFFPSPESSCGTQSFGLLDPKLCYLLDGILFIYGVILTALFLRVKFSRSADAPAYQQGQNQLYNELNLGRREEYDVLDKRRGRDPEMGGKPQRRKNPQEGLYNELQKDKMAEAYSEIGMKGERRRGKGHDGLYQGLSTATKDTYDALHMQALPPR

SEQ ID NO: 19335 - protein, 917 aa, Artificial Sequence
  Synthetic Polypeptide
MALPVTALLLPLALLLHAARPEVQLVESGGGLVQPGGSLRLSCAASGFSFSDFWMSWVRQAPGKGLEWVATISQAGSEKDYVDSVKGRFTISRDNAKKSLYLQMNSLRAEDTAVYYCASGVYSFDYRGQGTLVTVSSGTGGGGSGGGGSGGGGSEFQIVLSQSPAILSASPGEKVTMTCRASSSVSYIHWFQQKPGSSPKPWIYATSNLASGVPVRFSGSGSGTSYSLTISRVEAEDAATYYCQQWTSNPPTFGGGTKLEIKLEGQPKANPTVTLFPPSSEELQANKATLVCLISDFYPGAVTVAWKADGSPVKAGVETTKPSKQSNNKYAASSYLSLTPEQWKSHRSYSCQVTHEGSTVEKTVAPTECSPIKTDVITMDPKDNCSKDANDTLLLQLTNTSAYYMYLLLLLKSVVYFAIITCCLLRRTAFCCNGEKSRAKRSGSGATNFSLLKQAGDVEENPGPTSMDWIWRILFLVGAATGAHSGPQLQLQESGPGLVKPSETLSLTCTVSGDSISSGDYYWGWIRQPPGKGLEWIGHIYYSGVTYYNPSLKSRVTISVDTSRNQFSLKLSSVTAADTAVYYCTREDSSNWRSRGQGTLVTVSSGSGGGGSGGGGSGGGGSFEQVQLQQPGAELVKPGASVKMSCKASGYTFTSYNMHWVKQTPGRGLEWIGAIYPGNGDTSYNQKFKGKATLTADKSSSTAYMQLSSLTSEDSAVYYCARSTYYGGDWYFNVWGAGTTVTVSTRASTKGPSVFPLAPSSKSTSGGTAALGCLVKDYFPEPVTVSWNSGALTSGVHTFPAVLQSSGLYSLSSVVTVPSSSLGTQTYICNVNHKPSNTKVDKRVEPKSCEVKTDSTDHVKPKETENTKQPSKSCHKPKAIVHTEKVNMMSLTVLGLRMLFAKTVAVNFLLTAKLFFL

SEQ ID NO: 19336 - protein, 898 aa, Artificial Sequence
  Synthetic Polypeptide
MALPVTALLLPLALLLHAARPEVQLVESGGGLVQPGGSLRLSCAASGFSFSDFWMSWVRQAPGKGLEWVATISQAGSEKDYVDSVKGRFTISRDNAKKSLYLQMNSLRAEDTAVYYCASGVYSFDYRGQGTLVTVSSGTGGGGSGGGGSGGGGSEFQIVLSQSPAILSASPGEKVTMTCRASSSVSYIHWFQQKPGSSPKPWIYATSNLASGVPVRFSGSGSGTSYSLTISRVEAEDAATYYCQQWTSNPPTFGGGTKLEIKLEGQPKANPTVTLFPPSSEELQANKATLVCLISDFYPGAVTVAWKADGSPVKAGVETTKPSKQSNNKYAASSYLSLTPEQWKSHRSYSCQVTHEGSTVEKTVAPTECSGRADCGFTSESYQQGVLSATILYEILLGKATLYAVLVSALVLMAMVKRKDSRGRAKRSGSGVKQTLNFDLLKLAGDVESNPGPTSMDWIWRILFLVGAATGAHSGPQLQLQESGPGLVKPSETLSLTCTVSGDSISSGDYYWGWIRQPPGKGLEWIGHIYYSGVTYYNPSLKSRVTISVDTSRNQFSLKLSSVTAADTAVYYCTREDSSNWRSRGQGTLVTVSSGSGGGGSGGGGSGGGGSFEQVQLQQPGAELVKPGASVKMSCKASGYTFTSYNMHWVKQTPGRGLEWIGAIYPGNGDTSYNQKFKGKATLTADKSSSTAYMQLSSLTSEDSAVYYCARSTYYGGDWYFNVWGAGTTVTVSTRASTKGPSVFPLAPSSKSTSGGTAALGCLVKDYFPEPVTVSWNSGALTSGVHTFPAVLQSSGLYSLSSVVTVPSSSLGTQTYICNVNHKPSNTKVDKRVEPKSCIPEDTFFPSPESSCDVKLVEKSFETDTNLNFQNLSVIGFRILLLKVAGFNLLMTLRLWSS

SEQ ID NO: 19337 - protein, 755 aa, Artificial Sequence
  Synthetic Polypeptide
MALPVTALLLPLALLLHAARPEVQVLESGGGLVQPGGSLRLSCAASGFTFSNFAMSWVRQAPGKGLEWVSTISGSAGTTDYADSVKGRFTISRDNSKKTLYLQMNSLRVEDTAVYYCADGRGPFFDYRGQGTLVTVSSGTGGGGSGGGGSGGGGSEFQIVLSQSPAILSASPGEKVTMTCRASSSVSYIHWFQQKPGSSPKPWIYATSNLASGVPVRFSGSGSGTSYSLTISRVEAEDAATYYCQQWTSNPPTFGGGTKLEIKLEDLKNVFPPEVAVFEPSEAEISHTQKATLVCLATGFYPDHVELSWWVNGKEVHSGVCTDPQPLKEQPALNDSRYCLSSRLRVSATFWQNPRNHFRCQVQFYGLSENDEWTQDRAKPVTQIVSAEAWGRADCGFTSESYQQGVLSATILYEILLGKATLYAVLVSALVLMAMVKRKDSRGRAKRSGSGATNFSLLKQAGDVEENPGPTSMDWIWRILFLVGAATGAHSFEQVQLQQPGAELVKPGASVKMSCKASGYTFTSYNMHWVKQTPGRGLEWIGAIYPGNGDTSYNQKFKGKATLTADKSSSTAYMQLSSLTSEDSAVYYCARSTYYGGDWYFNVWGAGTTVTVSTRIQNPDPAVYQLRDSKSSDKSVCLFTDFDSQTNVSQSKDSDVYITDKCVLDMRSMDFKSNSAVAWSNKSDFACANAFNNSIIPEDTFFPSPESSCDVKLVEKSFETDTNLNFQNLSVIGFRILLLKVAGFNLLMTLRLWSS

SEQ ID NO: 19338 - protein, 756 aa, Artificial Sequence
  Synthetic Polypeptide
MALPVTALLLPLALLLHAARPQIVLSQSPAILSASPGEKVTMTCRASSSVSYIHWFQQKPGSSPKPWIYATSNLASGVPVRFSGSGSGTSYSLTISRVEAEDAATYYCQQWTSNPPTFGGGTKLEIKLEDLKNVFPPEVAVFEPSEAEISHTQKATLVCLATGFYPDHVELSWWVNGKEVHSGVCTDPQPLKEQPALNDSRYCLSSRLRVSATFWQNPRNHFRCQVQFYGLSENDEWTQDRAKPVTQIVSAEAWGRADCGFTSESYQQGVLSATILYEILLGKATLYAVLVSALVLMAMVKRKDSRGRAKRSGSGATNFSLLKQAGDVEENPGPTSMDWIWRILFLVGAATGAHSGPEVQLVESGGGLVQAGGSLRLSCAASGRTFSMGWFRQAPGKEREFVAAITYSGGSPYYADSVKGRFTISRDNAKNTVYLQMNSLKPEDTAVYYCAANPTYGSDWNAENWGQGTQVTVSSGSGGGGSGGGGSGGGGSFEQVQLQQPGAELVKPGASVKMSCKASGYTFTSYNMHWVKQTPGRGLEWIGAIYPGNGDTSYNQKFKGKATLTADKSSSTAYMQLSSLTSEDSAVYYCARSTYYGGDWYFNVWGAGTTVTVSTRIQNPDPAVYQLRDSKSSDKSVCLFTDFDSQTNVSQSKDSDVYITDKCVLDMRSMDFKSNSAVAWSNKSDFACANAFNNSIIPEDTFFPSPESSCDVKLVEKSFETDTNLNFQNLSVIGFRILLLKVAGFNLLMTLRLWSS

SEQ ID NO: 19339 - protein, 883 aa, Artificial Sequence
  Synthetic Polypeptide
MALPVTALLLPLALLLHAARPQIVLSQSPAILSASPGEKVTMTCRASSSVSYIHWFQQKPGSSPKPWIYATSNLASGVPVRFSGSGSGTSYSLTISRVEAEDAATYYCQQWTSNPPTFGGGTKLEIKLEDLKNVFPPEVAVFEPSEAEISHTQKATLVCLATGFYPDHVELSWWVNGKEVHSGVCTDPQPLKEQPALNDSRYCLSSRLRVSATFWQNPRNHFRCQVQFYGLSENDEWTQDRAKPVTQIVSAEAWGRADCGFTSESYQQGVLSATILYEILLGKATLYAVLVSALVLMAMVKRKDSRGRAKRSGSGATNFSLLKQAGDVEENPGPTSMDWIWRILFLVGAATGAHSQLQLQESGPGLVKPSETLSLTCTVSGGSISSGDYYWGWIRQPPGKGLEWIGSISYSGSTYYNPSLKSRVTISVDTSRNQFSLKLSSVTAADTAVYYCTREDSSNWRSRGQGTLVTVSSSGGGGSGGGGSEVQLVESGGGLVQAGGSLRLSCAASGRTFSMGWFRQAPGKEREFVAAITYSGGSPYYADSVKGRFTISRDNAKNTVYLQMNSLKPEDTAVYYCAANPTYGSDWNAENWGQGTQVTVSSGSGGGGSGGGGSGGGGSFEQVQLQQPGAELVKPGASVKMSCKASGYTFTSYNMHWVKQTPGRGLEWIGAIYPGNGDTSYNQKFKGKATLTADKSSSTAYMQLSSLTSEDSAVYYCARSTYYGGDWYFNVWGAGTTVTVSTRIQNPDPAVYQLRDSKSSDKSVCLFTDFDSQTNVSQSKDSDVYITDKCVLDMRSMDFKSNSAVAWSNKSDFACANAFNNSIIPEDTFFPSPESSCDVKLVEKSFETDTNLNFQNLSVIGFRILLLKVAGFNLLMTLRLWSS

SEQ ID NO: 19340 - protein, 892 aa, Artificial Sequence
  Synthetic Polypeptide
MALPVTALLLPLALLLHAARPEVQVLESGGGLVQPGGSLRLSCAASGFTFSNFAMSWVRQAPGKGLEWVSTISGSAGTTDYADSVKGRFTISRDNSKKTLYLQMNSLRVEDTAVYYCADGRGPFFDYRGQGTLVTVSSGTGGGGSGGGGSGGGGSEFQIVLSQSPAILSASPGEKVTMTCRASSSVSYIHWFQQKPGSSPKPWIYATSNLASGVPVRFSGSGSGTSYSLTISRVEAEDAATYYCQQWTSNPPTFGGGTKLEIKLEDLKNVFPPEVAVFEPSEAEISHTQKATLVCLATGFYPDHVELSWWVNGKEVHSGVCTDPQPLKEQPALNDSRYCLSSRLRVSATFWQNPRNHFRCQVQFYGLSENDEWTQDRAKPVTQIVSAEAWGRADCGFTSESYQQGVLSATILYEILLGKATLYAVLVSALVLMAMVKRKDSRGRAKRSGSGATNFSLLKQAGDVEENPGPTSMDWIWRILFLVGAATGAHSGPEVQLVESGGGLVQAGGSLRLSCAASGRTFSMGWFRQAPGKEREFVAAITYSGGSPYYASSVRGRFTISRDNAKNTVYLQMNSLKPEDTAVYYCAANPTYGSDWNAENWGQGTQVTVSSGSGGGGSGGGGSGGGGSFEQVQLQQPGAELVKPGASVKMSCKASGYTFTSYNMHWVKQTPGRGLEWIGAIYPGNGDTSYNQKFKGKATLTADKSSSTAYMQLSSLTSEDSAVYYCARSTYYGGDWYFNVWGAGTTVTVSTRIQNPDPAVYQLRDSKSSDKSVCLFTDFDSQTNVSQSKDSDVYITDKCVLDMRSMDFKSNSAVAWSNKSDFACANAFNNSIIPEDTFFPSPESSCDVKLVEKSFETDTNLNFQNLSVIGFRILLLKVAGFNLLMTLRLWSS

SEQ ID NO: 19341 - protein, 723 aa, Artificial Sequence
  Synthetic Polypeptide
MALPVTALLLPLALLLHAARPDIQLTQSHKFLSTSVGDRVSITCKASQDVYNAVAWYQQKPGQSPKLLIYSASSRYTGVPSRFTGSGSGPDFTFTISSVQAEDLAVYFCQQHFRTPFTFGSGTKLEIKGGGGSGGGGSGGGGSQVQLQQSGPELKKPGETVKISCKASGYPFTNYGMNWVKQAPGQGLKWMGWINTSTGESTFADDFKGRFDFSLETSANTAYLQINNLKSEDMATYFCARWEVYHGYVPYWGQGTTVTVSSTREQKLISEEDLAKPTTTPAPRPPTPAPTIASQPLSLRPEACRPAAGGAVHTRGLDFACDIYIWAPLAGTCGVLLLSLVITLYCKRGRKKLLYIFKQPFMRPVQTTQEEDGCSCRFPEEEEGGCELRVKFSRSADAPAYQQGQNQLYNELNLGRREEYDVLDKRRGRDPEMGGKPRRKNPQEGLYNELQKDKMAEAYSEIGMKGERRRGKGHDGLYQGLSTATKDTYDALHMQALPPRSSGSGEGRGSLLTCGDVEENPGPHMTEYKPTVRLATRDDVPRAVRTLAAAFADYPATRHTVDPDRHIERVTELQELFLTRVGLDIGKVWVADDGAAVAVWTTPESVEAGAVFAEIGPRMAELSGSRLAAQQQMEGLLAPHRPKEPAWFLATVGVSPDHQGKGLGSAVVLPGVEAAERAGVPAFLETSAPRNLPFYERLGFTVTADVEVPEGPRTWCMTRKPGA

SEQ ID NO: 19342 - protein, 717 aa, Artificial Sequence
  Synthetic Polypeptide
MALPVTALLLPLALLLHAARPDIQLTQSHKFLSTSVGDRVSITCKASQDVYNAVAWYQQKPGQSPKLLIYSASSRYTGVPSRFTGSGSGPDFTFTISSVQAEDLAVYFCQQHFRTPFTFGSGTKLEIKGGGGSGGGGSGGGGSQVQLQQSGPELKKPGETVKISCKASGYPFTNYGMNWVKQAPGQGLKWMGWINTSTGESTFADDFKGRFDFSLETSANTAYLQINNLKSEDMATYFCARWEVYHGYVPYWGQGTTVTVSSTREQKLISEEDLKIEVMYPPPYLDNEKSNGTIIHVKGKHLCPSPLFPGPSKPFWVLVVVGGVLACYSLLVTVAFIIFWVRSKRSRLLHSDYMNMTPRRPGPTRKHYQPYAPPRDFAAYRSRVKFSRSADAPAYQQGQNQLYNELNLGRREEYDVLDKRRGRDPEMGGKPRRKNPQEGLYNELQKDKMAEAYSEIGMKGERRRGKGHDGLYQGLSTATKDTYDALHMQALPPRSSGSGEGRGSLLTCGDVEENPGPHMTEYKPTVRLATRDDVPRAVRTLAAAFADYPATRHTVDPDRHIERVTELQELFLTRVGLDIGKVWVADDGAAVAVWTTPESVEAGAVFAEIGPRMAELSGSRLAAQQQMEGLLAPHRPKEPAWFLATVGVSPDHQGKGLGSAVVLPGVEAAERAGVPAFLETSAPRNLPFYERLGFTVTADVEVPEGPRTWCMTRKPGA

SEQ ID NO: 19343 - protein, 494 aa, Artificial Sequence
  Synthetic Polypeptide
MALPVTALLLPLALLLHAARPDIQLTQSHKFLSTSVGDRVSITCKASQDVYNAVAWYQQKPGQSPKLLIYSASSRYTGVPSRFTGSGSGPDFTFTISSVQAEDLAVYFCQQHFRTPFTFGSGTKLEIKGGGGSGGGGSGGGGSQVQLQQSGPELKKPGETVKISCKASGYPFTNYGMNWVKQAPGQGLKWMGWINTSTGESTFADDFKGRFDFSLETSANTAYLQINNLKSEDMATYFCARWEVYHGYVPYWGQGTTVTVSSTREQKLISEEDLKIEVMYPPPYLDNEKSNGTIIHVKGKHLCPSPLFPGPSKPFWVLVVVGGVLACYSLLVTVAFIIFWVRSKRSRLLHSDYMNMTPRRPGPTRKHYQPYAPPRDFAAYRSRVKFSRSADAPAYQQGQNQLYNELNLGRREEYDVLDKRRGRDPEMGGKPRRKNPQEGLYNELQKDKMAEAYSEIGMKGERRRGKGHDGLYQGLSTATKDTYDALHMQALPPR

SEQ ID NO: 19344 - protein, 500 aa, Artificial Sequence
  Synthetic Polypeptide
MALPVTALLLPLALLLHAARPDIQLTQSHKFLSTSVGDRVSITCKASQDVYNAVAWYQQKPGQSPKLLIYSASSRYTGVPSRFTGSGSGPDFTFTISSVQAEDLAVYFCQQHFRTPFTFGSGTKLEIKGGGGSGGGGSGGGGSQVQLQQSGPELKKPGETVKISCKASGYPFTNYGMNWVKQAPGQGLKWMGWINTSTGESTFADDFKGRFDFSLETSANTAYLQINNLKSEDMATYFCARWEVYHGYVPYWGQGTTVTVSSTREQKLISEEDLAKPTTTPAPRPPTPAPTIASQPLSLRPEACRPAAGGAVHTRGLDFACDIYIWAPLAGTCGVLLLSLVITLYCKRGRKKLLYIFKQPFMRPVQTTQEEDGCSCRFPEEEEGGCELRVKFSRSADAPAYQQGQNQLYNELNLGRREEYDVLDKRRGRDPEMGGKPRRKNPQEGLYNELQKDKMAEAYSEIGMKGERRRGKGHDGLYQGLSTATKDTYDALHMQALPPR

SEQ ID NO: 19345 - protein, 500 aa, Artificial Sequence
  Synthetic Polypeptide
MALPVTALLLPLALLLHAARPQVQLQQSGPELKKPGETVKISCKASGYPFTNYGMNWVKQAPGQGLKWMGWINTSTGESTFADDFKGRFDFSLETSANTAYLQINNLKSEDMATYFCARWEVYHGYVPYWGQGTTVTVSSGGGGSGGGGSGGGGSDIQLTQSHKFLSTSVGDRVSITCKASQDVYNAVAWYQQKPGQSPKLLIYSASSRYTGVPSRFTGSGSGPDFTFTISSVQAEDLAVYFCQQHFRTPFTFGSGTKLEIKTREQKLISEEDLAKPTTTPAPRPPTPAPTIASQPLSLRPEACRPAAGGAVHTRGLDFACDIYIWAPLAGTCGVLLLSLVITLYCKRGRKKLLYIFKQPFMRPVQTTQEEDGCSCRFPEEEEGGCELRVKFSRSADAPAYQQGQNQLYNELNLGRREEYDVLDKRRGRDPEMGGKPRRKNPQEGLYNELQKDKMAEAYSEIGMKGERRRGKGHDGLYQGLSTATKDTYDALHMQALPPR

SEQ ID NO: 19346 - protein, 913 aa, Artificial Sequence
  Synthetic Polypeptide
MALPVTALLLPLALLLHAARPDIQLTQSHKFLSTSVGDRVSITCKASQDVYNAVAWYQQKPGQSPKLLIYSASSRYTGVPSRFTGSGSGPDFTFTISSVQAEDLAVYFCQQHFRTPFTFGSGTKLEIKGGGGSGGGGSGGGGSQVQLQQSGPELKKPGETVKISCKASGYPFTNYGMNWVKQAPGQGLKWMGWINTSTGESTFADDFKGRFDFSLETSANTAYLQINNLKSEDMATYFCARWEVYHGYVPYWGQGTTVTVSSTREQKLISEEDLAKPTTTPAPRPPTPAPTIASQPLSLRPEACRPAAGGAVHTRGLDFACDIYIWAPLAGTCGVLLLSLVITLYCGRARVKFSRSADAPAYQQGQNQLYNELNLGRREEYDVLDKRRGRDPEMGGKPRRKNPQEGLYNELQKDKMAEAYSEIGMKGERRRGKGHDGLYQGLSTATKDTYDALHMQALPPRSRGSGATNFSLLKQAGDVEENPGPGIHMATYEVLCEVARKLGTDDREVVLFLLNVFIPQPTLAQLIGALRALKEEGRLTFPLLAECLFRAGRRDLLRDLLHLDPRFLERHLAGTMSYFSPYQLTVLHVDGELCARDIRSLIFLSKDTIGSRSTPQTFLHWVYCMENLDLLGPTDVDALMSMLRSLSRVDLQRQVQTLMGLHLSGPSHSQHYRHTPLETDFYDYKDDDDKTSGSGEGRGSLLTCGDVEENPGPHMTEYKPTVRLATRDDVPRAVRTLAAAFADYPATRHTVDPDRHIERVTELQELFLTRVGLDIGKVWVADDGAAVAVWTTPESVEAGAVFAEIGPRMAELSGSRLAAQQQMEGLLAPHRPKEPAWFLATVGVSPDHQGKGLGSAVVLPGVEAAERAGVPAFLETSAPRNLPFYERLGFTVTADVEVPEGPRTWCMTRKPGA

SEQ ID NO: 19347 - protein, 853 aa, Artificial Sequence
  Synthetic Polypeptide
MALPVTALLLPLALLLHAARPDIQLTQSHKFLSTSVGDRVSITCKASQDVYNAVAWYQQKPGQSPKLLIYSASSRYTGVPSRFTGSGSGPDFTFTISSVQAEDLAVYFCQQHFRTPFTFGSGTKLEIKLEIQNPDPAVYQLRDSKSSDKSVCLFTDFDSQTNVSQSKDSDVYITDKCVLDMRSMDFKSNSAVAWSNKSDFACANAFNNSIIPEDTFFPSSDVPCDVKLVEKSFETDTNLNFQNLSVIGFRILLLKVAGFNLLMTLRLWSSRAKRSGSGVKQTLNFDLLKLAGDVESNPGPTSMDWIWRILFLVGAATGAHSFEQVQLQQSGPELKKPGETVKISCKASGYPFTNYGMNWVKQAPGQGLKWMGWINTSTGESTFADDFKGRFDFSLETSANTAYLQINNLKSEDMATYFCARWEVYHGYVPYWGQGTTVTVSSTREDLKNVFPPEVAVFEPSKAEIAHTQKATLVCLATGFYPDHVELSWWVNGKEVHSGVCTDPQPLKEQPALNDSRYCLSSRLRVSATFWQNPRNHFRCQVQFYGLSENDEWTQDRAKPVTQIVSAEAWGRADCGITSASYHQGVLSATILYEILLGKATLYAVLVSALVLMAMVKRKDSRGRAKRSGSGATNFSLLKQAGDVEENPGPSRGHMTEYKPTVRLATRDDVPRAVRTLAAAFADYPATRHTVDPDRHIERVTELQELFLTRVGLDIGKVWVADDGAAVAVWTTPESVEAGAVFAEIGPRMAELSGSRLAAQQQMEGLLAPHRPKEPAWFLATVGVSPDHQGKGLGSAVVLPGVEAAERAGVPAFLETSAPRNLPFYERLGFTVTADVEVPEGPRTWCMTRKPGA

SEQ ID NO: 19348 - protein, 852 aa, Artificial Sequence
  Synthetic Polypeptide
MALPVTALLLPLALLLHAARPDIQLTQSHKFLSTSVGDRVSITCKASQDVYNAVAWYQQKPGQSPKLLIYSASSRYTGVPSRFTGSGSGPDFTFTISSVQAEDLAVYFCQQHFRTPFTFGSGTKLEIKLEDLKNVFPPEVAVFEPSKAEIAHTQKATLVCLATGFYPDHVELSWWVNGKEVHSGVCTDPQPLKEQPALNDSRYCLSSRLRVSATFWQNPRNHFRCQVQFYGLSENDEWTQDRAKPVTQIVSAEAWGRADCGITSASYHQGVLSATILYEILLGKATLYAVLVSALVLMAMVKRKDSRGRAKRSGSGATNFSLLKQAGDVEENPGPTSMDWIWRILFLVGAATGAHSFEQVQLQQSGPELKKPGETVKISCKASGYPFTNYGMNWVKQAPGQGLKWMGWINTSTGESTFADDFKGRFDFSLETSANTAYLQINNLKSEDMATYFCARWEVYHGYVPYWGQGTTVTVSSTRIQNPDPAVYQLRDSKSSDKSVCLFTDFDSQTNVSQSKDSDVYITDKCVLDMRSMDFKSNSAVAWSNKSDFACANAFNNSIIPEDTFFPSSDVPCDVKLVEKSFETDTNLNFQNLSVIGFRILLLKVAGFNLLMTLRLWSSRAKRSGSGVKQTLNFDLLKLAGDVESNPGPSRGHMTEYKPTVRLATRDDVPRAVRTLAAAFADYPATRHTVDPDRHIERVTELQELFLTRVGLDIGKVWVADDGAAVAVWTTPESVEAGAVFAEIGPRMAELSGSRLAAQQQMEGLLAPHRPKEPAWFLATVGVSPDHQGKGLGSAVVLPGVEAAERAGVPAFLETSAPRNLPFYERLGFTVTADVEVPEGPRTWCMTRKPGA

SEQ ID NO: 19349 - protein, 619 aa, Artificial Sequence
  Synthetic Polypeptide
MALPVTALLLPLALLLHAARPDIQLTQSHKFLSTSVGDRVSITCKASQDVYNAVAWYQQKPGQSPKLLIYSASSRYTGVPSRFTGSGSGPDFTFTISSVQAEDLAVYFCQQHFRTPFTFGSGTKLEIKLEDLKNVFPPEVAVFEPSEAEISHTQKATLVCLATGFYPDHVELSWWVNGKEVHSGVCTDPQPLKEQPALNDSRYCLSSRLRVSATFWQNPRNHFRCQVQFYGLSENDEWTQDRAKPVTQIVSAEAWGRADCGFTSESYQQGVLSATILYEILLGKATLYAVLVSALVLMAMVKRKDSRGRAKRSGSGATNFSLLKQAGDVEENPGPTSMDWIWRILFLVGAATGAHSFEQVQLQQSGPELKKPGETVKISCKASGYPFTNYGMNWVKQAPGQGLKWMGWINTSTGESTFADDFKGRFDFSLETSANTAYLQINNLKSEDMATYFCARWEVYHGYVPYWGQGTTVTVSSTRIQNPDPAVYQLRDSKSSDKSVCLFTDFDSQTNVSQSKDSDVYITDKCVLDMRSMDFKSNSAVAWSNKSDFACANAFNNSIIPEDTFFPSPESSCDVKLVEKSFETDTNLNFQNLSVIGFRILLLKVAGFNLLMTLRLWSS

SEQ ID NO: 19350 - protein, 844 aa, Artificial Sequence
  Synthetic Polypeptide
MALPVTALLLPLALLLHAARPDIQLTQSHKFLSTSVGDRVSITCKASQDVYNAVAWYQQKPGQSPKLLIYSASSRYTGVPSRFTGSGSGPDFTFTISSVQAEDLAVYFCQQHFRTPFTFGSGTKLEIKLEDLKNVFPPEVAVFEPSEAEISHTQKATLVCLATGFYPDHVELSWWVNGKEVHSGVCTDPQPLKEQPALNDSRYCLSSRLRVSATFWQNPRNHFRCQVQFYGLSENDEWTQDRAKPVTQIVSAEAWGRADCGFTSESYQQGVLSATILYEILLGKATLYAVLVSALVLMAMVKRKDSRGRAKRSGSGATNFSLLKQAGDVEENPGPTSMDWIWRILFLVGAATGAHSFEQVQLQQSGPELKKPGETVKISCKASGYPFTNYGMNWVKQAPGQGLKWMGWINTSTGESTFADDFKGRFDFSLETSANTAYLQINNLKSEDMATYFCARWEVYHGYVPYWGQGTTVTVSSTRIQNPDPAVYQLRDSKSSDKSVCLFTDFDSQTNVSQSKDSDVYITDKCVLDMRSMDFKSNSAVAWSNKSDFACANAFNNSIIPEDTFFPSPESSCDVKLVEKSFETDTNLNFQNLSVIGFRILLLKVAGFNLLMTLRLWSSRAKRSGSGVKQTLNFDLLKLAGDVESNPGPSRGGIHTMATYEVLCEVARKLGTDDREVVLFLLNVFIPQPTLAQLIGALRALKEEGRLTFPLLAECLFRAGRRDLLRDLLHLDPRFLERHLAGTMSYFSPYQLTVLHVDGELCARDIRSLIFLSKDTIGSRSTPQTFLHWVYCMENLDLLGPTDVDALMSMLRSLSRVDLQRQVQTLMGLHLSGPSHSQHYRHTP

SEQ ID NO: 19351 - protein, 623 aa, Artificial Sequence
  Synthetic Polypeptide
MALPVTALLLPLALLLHAARPDIQLTQSHKFLSTSVGDRVSITCKASQDVYNAVAWYQQKPGQSPKLLIYSASSRYTGVPSRFTGSGSGPDFTFTISSVQAEDLAVYFCQQHFRTPFTFGSGTKLEIKLEIQNPDPAVYQLRDSKSSDKSVCLFTDFDSQTNVSQSKDSDVYITDKCVLDMRSMDFKSNSAVAWSNKSDFACANAFNNSIIPEDTFFPSPESSCDVKLVEKSFETDTNLNFQNLSVIGFRILLLKVAGFNLLMTLRLWSSRAKRSGSGVKQTLNFDLLKLAGDVESNPGPTSMDWIWRILFLVGAATGAHSFEQVQLQQSGPELKKPGETVKISCKASGYPFTNYGMNWVKQAPGQGLKWMGWINTSTGESTFADDFKGRFDFSLETSANTAYLQINNLKSEDMATYFCARWEVYHGYVPYWGQGTTVTVSSTREDLKNVFPPEVAVFEPSEAEISHTQKATLVCLATGFYPDHVELSWWVNGKEVHSGVCTDPQPLKEQPALNDSRYCLSSRLRVSATFWQNPRNHFRCQVQFYGLSENDEWTQDRAKPVTQIVSAEAWGRADCGFTSESYQQGVLSATILYEILLGKATLYAVLVSALVLMAMVKRKDSRG

SEQ ID NO: 19352 - protein, 845 aa, Artificial Sequence
  Synthetic Polypeptide
MALPVTALLLPLALLLHAARPDIQLTQSHKFLSTSVGDRVSITCKASQDVYNAVAWYQQKPGQSPKLLIYSASSRYTGVPSRFTGSGSGPDFTFTISSVQAEDLAVYFCQQHFRTPFTFGSGTKLEIKLEIQNPDPAVYQLRDSKSSDKSVCLFTDFDSQTNVSQSKDSDVYITDKCVLDMRSMDFKSNSAVAWSNKSDFACANAFNNSIIPEDTFFPSPESSCDVKLVEKSFETDTNLNFQNLSVIGFRILLLKVAGFNLLMTLRLWSSRAKRSGSGVKQTLNFDLLKLAGDVESNPGPTSMDWIWRILFLVGAATGAHSFEQVQLQQSGPELKKPGETVKISCKASGYPFTNYGMNWVKQAPGQGLKWMGWINTSTGESTFADDFKGRFDFSLETSANTAYLQINNLKSEDMATYFCARWEVYHGYVPYWGQGTTVTVSSTREDLKNVFPPEVAVFEPSEAEISHTQKATLVCLATGFYPDHVELSWWVNGKEVHSGVCTDPQPLKEQPALNDSRYCLSSRLRVSATFWQNPRNHFRCQVQFYGLSENDEWTQDRAKPVTQIVSAEAWGRADCGFTSESYQQGVLSATILYEILLGKATLYAVLVSALVLMAMVKRKDSRGRAKRSGSGATNFSLLKQAGDVEENPGPSRGGIHTMATYEVLCEVARKLGTDDREVVLFLLNVFIPQPTLAQLIGALRALKEEGRLTFPLLAECLFRAGRRDLLRDLLHLDPRFLERHLAGTMSYFSPYQLTVLHVDGELCARDIRSLIFLSKDTIGSRSTPQTFLHWVYCMENLDLLGPTDVDALMSMLRSLSRVDLQRQVQTLMGLHLSGPSHSQHYRHTP

SEQ ID NO: 19353 - protein, 897 aa, Artificial Sequence
  Synthetic Polypeptide
MALPVTALLLPLALLLHAARPLEGKPIPNPLLGLDSTGSGEDLKNVFPPEVAVFEPSKAEIAHTQKATLVCLATGFYPDHVELSWWVNGKEVHSGVCTDPQPLKEQPALNDSRYCLSSRLRVSATFWQNPRNHFRCQVQFYGLSENDEWTQDRAKPVTQIVSAEAWGRADCGITSASYHQGVLSATILYEILLGKATLYAVLVSALVLMAMVKRKDSRGRAKRSGSGATNFSLLKQAGDVEENPGPTSMALPVTALLLPLALLLHAARPDIQLTQSHKFLSTSVGDRVSITCKASQDVYNAVAWYQQKPGQSPKLLIYSASSRYTGVPSRFTGSGSGPDFTFTISSVQAEDLAVYFCQQHFRTPFTFGSGTKLEIKGGGGSGGGGSGGGGSQVQLQQSGPELKKPGETVKISCKASGYPFTNYGMNWVKQAPGQGLKWMGWINTSTGESTFADDFKGRFDFSLETSANTAYLQINNLKSEDMATYFCARWEVYHGYVPYWGQGTTVTVSSTREQKLISEEDGSGIQNPDPAVYQLRDSKSSDKSVCLFTDFDSQTNVSQSKDSDVYITDKCVLDMRSMDFKSNSAVAWSNKSDFACANAFNNSIIPEDTFFPSSDVPCDVKLVEKSFETDTNLNFQNLSVIGFRILLLKVAGFNLLMTLRLWSSRAKRSGSGVKQTLNFDLLKLAGDVESNPGPSRGHMTEYKPTVRLATRDDVPRAVRTLAAAFADYPATRHTVDPDRHIERVTELQELFLTRVGLDIGKVWVADDGAAVAVWTTPESVEAGAVFAEIGPRMAELSGSRLAAQQQMEGLLAPHRPKEPAWFLATVGVSPDHQGKGLGSAVVLPGVEAAERAGVPAFLETSAPRNLPFYERLGFTVTADVEVPEGPRTWCMTRKPGA

SEQ ID NO: 19354 - protein, 898 aa, Artificial Sequence
  Synthetic Polypeptide
MALPVTALLLPLALLLHAARPLEQKLISEEDLGSGDRPDPAVYQLRDSKSSDKSVCLFTDFDSQTNVSQSKDSDVYITDKCVLDMRSMDFKSNSAVAWSNKSDFACANAFNNSIIPEDTFFPSPESSCDVKLVEKSFETDTNLNFQNLSVIGFRILLLKVAGFNLLMTLRLWSSSSRAKRSGSGVKQTLNFDLLKLAGDVESNPGPTSMALPVTALLLPLALLLHAARPDIQLTQSHKFLSTSVGDRVSITCKASQDVYNAVAWYQQKPGQSPKLLIYSASSRYTGVPSRFTGSGSGPDFTFTISSVQAEDLAVYFCQQHFRTPFTFGSGTKLEIKGGGGSGGGGSGGGGSQVQLQQSGPELKKPGETVKISCKASGYPFTNYGMNWVKQAPGQGLKWMGWINTSTGESTFADDFKGRFDFSLETSANTAYLQINNLKSEDMATYFCARWEVYHGYVPYWGQGTTVTVSSTRGKPIPNPLLGLDSTGSGEDLKNVFPPEVAVFEPSEAEISHTQKATLVCLATGFYPDHVELSWWVNGKEVHSGVCTDPQPLKEQPALNDSRYCLSSRLRVSATFWQNPRNHFRCQVQFYGLSENDEWTQDRAKPVTQIVSAEAWGRADCGFTSESYQQGVLSATILYEILLGKATLYAVLVSALVLMAMVKRKDSRGRAKRSGSGATNFSLLKQAGDVEENPGPSRGHMTEYKPTVRLATRDDVPRAVRTLAAAFADYPATRHTVDPDRHIERVTELQELFLTRVGLDIGKVWVADDGAAVAVWTTPESVEAGAVFAEIGPRMAELSGSRLAAQQQMEGLLAPHRPKEPAWFLATVGVSPDHQGKGLGSAVVLPGVEAAERAGVPAFLETSAPRNLPFYERLGFTVTADVEVPEGPRTWCMTRKPGA

SEQ ID NO: 19355 - protein, 852 aa, Artificial Sequence
  Synthetic Polypeptide
MALPVTALLLPLALLLHAARPDIQLTQSHKFLSTSVGDRVSITCKASQDVYNAVAWYQQKPGQSPKLLIYSASSRYTGVPSRFTGSGSGPDFTFTISSVQAEDLAVYFCQQHFRTPFTFGSGTKLEIKLEDLKNVFPPEVAVFEPSEAEISHTQKATLVCLATGFYPDHVELSWWVNGKEVHSGVSTDPQPLKEQPALNDSRYCLSSRLRVSATFWQNPRNHFRCQVQFYGLSENDEWTQDRAKPVTQIVSAEAWGRADCGFTSESYQQGVLSATILYEILLGKATLYAVLVSALVLMAMVKRKDSRGRAKRSGSGATNFSLLKQAGDVEENPGPTSMDWIWRILFLVGAATGAHSFEQVQLQQSGPELKKPGETVKISCKASGYPFTNYGMNWVKQAPGQGLKWMGWINTSTGESTFADDFKGRFDFSLETSANTAYLQINNLKSEDMATYFCARWEVYHGYVPYWGQGTTVTVSSTRIQNPDPAVYQLRDSKSSDKSVCLFTDFDSQTNVSQSKDSDVYITDKTVLDMRSMDFKSNSAVAWSNKSDFACANAFNNSIIPEDTFFPSPESSCDVKLVEKSFETDTNLNFQNLSVIGFRILLLKVAGFNLLMTLRLWSSRAKRSGSGVKQTLNFDLLKLAGDVESNPGPSRGHMTEYKPTVRLATRDDVPRAVRTLAAAFADYPATRHTVDPDRHIERVTELQELFLTRVGLDIGKVWVADDGAAVAVWTTPESVEAGAVFAEIGPRMAELSGSRLAAQQQMEGLLAPHRPKEPAWFLATVGVSPDHQGKGLGSAVVLPGVEAAERAGVPAFLETSAPRNLPFYERLGFTVTADVEVPEGPRTWCMTRKPGA

SEQ ID NO: 19356 - protein, 934 aa, Artificial Sequence
  Synthetic Polypeptide
MALPVTALLLPLALLLHAARPDIQLTQSHKFLSTSVGDRVSITCKASQDVYNAVAWYQQKPGQSPKLLIYSASSRYTGVPSRFTGSGSGPDFTFTISSVQAEDLAVYFCQQHFRTPFTFGSGTKLEIKLEDLKNVFPPEVAVFEPSEAEISHTQKATLVCLATGFYPDHVELSWWVNGKEVHSGVSTDPQPLKEQPALNDSRYCLSSRLRVSATFWQNPRNHFRCQVQFYGLSENDEWTQDRAKPVTQIVSAEAWGRADCGFTSESYQQGVLSATILYEILLGKATLYAVLVSALVLMAMVKRKDSRGRAKRSGSGATNFSLLKQAGDVEENPGPTSMDWIWRILFLVGAATGAHSFEQVQLQQSGPELKKPGETVKISCKASGYPFTNYGMNWVKQAPGQGLKWMGWINTSTGESTFADDFKGRFDFSLETSANTAYLQINNLKSEDMATYFCARWEVYHGYVPYWGQGTTVTVSSTREQKLISEEDGSGTPFPSLAPPIMLLVDGKQQMVVVCLVLDVAPPGLDSPIWFSAGNGSALDAFTYGPSPATDGTWTNLAHLSLPSEELASWEPLVCHTGPGAEGHSRSTQPMHLSGEASTARTCPQEPLRGTPGGALWLGVLRLLLFKLLLFDLLLTCSCLCDPAGPLPSPATTTRLRALGSHRLHPATETGGREATSSPRPQPRDRRWGDTPPGRKPGSPVRAKRSGSGVKQTLNFDLLKLAGDVESNPGPSRGHMTEYKPTVRLATRDDVPRAVRTLAAAFADYPATRHTVDPDRHIERVTELQELFLTRVGLDIGKVWVADDGAAVAVWTTPESVEAGAVFAEIGPRMAELSGSRLAAQQQMEGLLAPHRPKEPAWFLATVGVSPDHQGKGLGSAVVLPGVEAAERAGVPAFLETSAPRNLPFYERLGFTVTADVEVPEGPRTWCMTRKPGA

SEQ ID NO: 19357 - protein, 952 aa, Artificial Sequence
  Synthetic Polypeptide
MALPVTALLLPLALLLHAARPLEDLKNVFPPEVAVFEPSEAEISHTQKATLVCLATGFYPDHVELSWWVNGKEVHSGVSTDPQPLKEQPALNDSRYCLSSRLRVSATFWQNPRNHFRCQVQFYGLSENDEWTQDRAKPVTQIVSAEAWGRADCGFTSESYQQGVLSATILYEILLGKATLYAVLVSALVLMAMVKRKDSRGRAKRSGSGATNFSLLKQAGDVEENPGPTSMALPVTALLLPLALLLHAARPDIQLTQSHKFLSTSVGDRVSITCKASQDVYNAVAWYQQKPGQSPKLLIYSASSRYTGVPSRFTGSGSGPDFTFTISSVQAEDLAVYFCQQHFRTPFTFGSGTKLEIKGGGGSGGGGSGGGGSQVQLQQSGPELKKPGETVKISCKASGYPFTNYGMNWVKQAPGQGLKWMGWINTSTGESTFADDFKGRFDFSLETSANTAYLQINNLKSEDMATYFCARWEVYHGYVPYWGQGTTVTVSSTREQKLISEEDLGSGTPFPSLAPPIMLLVDGKQQMVVVCLVLDVAPPGLDSPIWFSAGNGSALDAFTYGPSPATDGTWTNLAHLSLPSEELASWEPLVCHTGPGAEGHSRSTQPMHLSGEASTARTCPQEPLRGTPGGALWLGVLRLLLFKLLLFDLLLTCSCLCDPAGPLPSPATTTRLRALGSHRLHPATETGGREATSSPRPQPRDRRWGDTPPGRKPGSPVRAKRSGSGVKQTLNFDLLKLAGDVESNPGPSRSRGHMTEYKPTVRLATRDDVPRAVRTLAAAFADYPATRHTVDPDRHIERVTELQELFLTRVGLDIGKVWVADDGAAVAVWTTPESVEAGAVFAEIGPRMAELSGSRLAAQQQMEGLLAPHRPKEPAWFLATVGVSPDHQGKGLGSAVVLPGVEAAERAGVPAFLETSAPRNLPFYERLGFTVTADVEVPEGPRTWCMTRKPGA

SEQ ID NO: 19358 - protein, 889 aa, Artificial Sequence
  Synthetic Polypeptide
MALPVTALLLPLALLLHAARPDIQLTQSHKFLSTSVGDRVSITCKASQDVYNAVAWYQQKPGQSPKLLIYSASSRYTGVPSRFTGSGSGPDFTFTISSVQAEDLAVYFCQQHFRTPFTFGSGTKLEIKLEGKPIPNPLLGLDSTGSGDKQLDADVSPKPTIFLPSIAETKLQKAGTYLCLLEKFFPDVIKIHWQEKKSNTILGSQEGNTMKTNDTYMKFSWLTVPEKSLDKEHRCIVRHENNKNGVDQEIIFPPIKTDVITMDPKDNCSKDANDTLLLQLTNTSAYYMYLLLLLKSVVYFAIITCCLLRRTAFCCNGEKSRAKRSGSGATNFSLLKQAGDVEENPGPTSMDWIWRILFLVGAATGAHSFEQVQLQQSGPELKKPGETVKISCKASGYPFTNYGMNWVKQAPGQGLKWMGWINTSTGESTFADDFKGRFDFSLETSANTAYLQINNLKSEDMATYFCARWEVYHGYVPYWGQGTTVTVSSTREQKLISEEDGSGSQPHTKPSVFVMKNGTNVACLVKEFYPKDIRINLVSSKKITEFDPAIVISPSGKYNAVKLGKYEDSNSVTCSVQHDNKTVHSTDFEVKTDSTDHVKPKETENTKQPSKSCHKPKAIVHTEKVNMMSLTVLGLRMLFAKTVAVNFLLTAKLFFLRAKRSGSGVKQTLNFDLLKLAGDVESNPGPSRGHMTEYKPTVRLATRDDVPRAVRTLAAAFADYPATRHTVDPDRHIERVTELQELFLTRVGLDIGKVWVADDGAAVAVWTTPESVEAGAVFAEIGPRMAELSGSRLAAQQQMEGLLAPHRPKEPAWFLATVGVSPDHQGKGLGSAVVLPGVEAAERAGVPAFLETSAPRNLPFYERLGFTVTADVEVPEGPRTWCMTRKPGA

SEQ ID NO: 19359 - protein, 627 aa, Artificial Sequence
  Synthetic Polypeptide
MALPVTALLLPLALLLHAARPDIQLTQSHKFLSTSVGDRVSITCKASQDVYNAVAWYQQKPGQSPKLLIYSASSRYTGVPSRFTGSGSGPDFTFTISSVQAEDLAVYFCQQHFRTPFTFGSGTKLEIKLESQPHTKPSVFVMKNGTNVACLVKEFYPKDIRINLVSSKKITEFDPAIVISPSGKYNAVKLGKYEDSNSVTCSVQHDNKTVHSTDFEVKTDSTDHVKPKETENTKQPSKSCHKPKAIVHTEKVNMMSLTVLGLRMLFAKTVAVNFLLTAKLFFLRAKRSGSGATNFSLLKQAGDVEENPGPTSMDWIWRILFLVGAATGAHSFEQVQLQQSGPELKKPGETVKISCKASGYPFTNYGMNWVKQAPGQGLKWMGWINTSTGESTFADDFKGRFDFSLETSANTAYLQINNLKSEDMATYFCARWEVYHGYVPYWGQGTTVTVSSTRDKQLDADVSPKPTIFLPSIAETKLQKAGTYLCLLEKFFPDVIKIHWQEKKSNTILGSQEGNTMKTNDTYMKFSWLTVPEKSLDKEHRCIVRHENNKNGVDQEIIFPPIKTDVITMDPKDNCSKDANDTLLLQLTNTSAYYMYLLLLLKSVVYFAIITCCLLRRTAFCCNGEKS

SEQ ID NO: 19360 - protein, 904 aa, Artificial Sequence
  Synthetic Polypeptide
MALPVTALLLPLALLLHAARPLEGKPIPNPLLGLDSTGSGDKQLDADVSPKPTIFLPSIAETKLQKAGTYLCLLEKFFPDVIKIHWQEKKSNTILGSQEGNTMKTNDTYMKFSWLTVPEKSLDKEHRCIVRHENNKNGVDQEIIFPPIKTDVITMDPKDNCSKDANDTLLLQLTNTSAYYMYLLLLLKSVVYFAIITCCLLRRTAFCCNGEKSRAKRSGSGATNFSLLKQAGDVEENPGPTSMALPVTALLLPLALLLHAARPDIQLTQSHKFLSTSVGDRVSITCKASQDVYNAVAWYQQKPGQSPKLLIYSASSRYTGVPSRFTGSGSGPDFTFTISSVQAEDLAVYFCQQHFRTPFTFGSGTKLEIKGGGGSGGGGSGGGGSQVQLQQSGPELKKPGETVKISCKASGYPFTNYGMNWVKQAPGQGLKWMGWINTSTGESTFADDFKGRFDFSLETSANTAYLQINNLKSEDMATYFCARWEVYHGYVPYWGQGTTVTVSSTREQKLISEEDGSGSQPHTKPSVFVMKNGTNVACLVKEFYPKDIRINLVSSKKITEFDPAIVISPSGKYNAVKLGKYEDSNSVTCSVQHDNKTVHSTDFEVKTDSTDHVKPKETENTKQPSKSCHKPKAIVHTEKVNMMSLTVLGLRMLFAKTVAVNFLLTAKLFFLRAKRSGSGVKQTLNFDLLKLAGDVESNPGPSRGHMTEYKPTVRLATRDDVPRAVRTLAAAFADYPATRHTVDPDRHIERVTELQELFLTRVGLDIGKVWVADDGAAVAVWTTPESVEAGAVFAEIGPRMAELSGSRLAAQQQMEGLLAPHRPKEPAWFLATVGVSPDHQGKGLGSAVVLPGVEAAERAGVPAFLETSAPRNLPFYERLGFTVTADVEVPEGPRTWCMTRKPGA

SEQ ID NO: 19361 - protein, 1029 aa, Artificial Sequence
  Synthetic Polypeptide
MALPVTALLLPLALLLHAARPDIQLTQSHKFLSTSVGDRVSITCKASQDVYNAVAWYQQKPGQSPKLLIYSASSRYTGVPSRFTGSGSGPDFTFTISSVQAEDLAVYFCQQHFRTPFTFGSGTKLEIKGQPKANPTVTLFPPSSEELQANKATLVCLISDFYPGAVTVAWKADGSPVKAGVETTKPSKQSNNKYAASSYLSLTPEQWKSHRSYSCQVTHEGSTVEKTVAPTECSGSQSFGLLDPKLCYLLDGILFIYGVILTALFLRVKFSRSADAPAYQQGQNQLYNELNLGRREEYDVLDKRRGRDPEMGGKPQRRKNPQEGLYNELQKDKMAEAYSEIGMKGERRRGKGHDGLYQGLSTATKDTYDALHMQALPPRRAKRSGSGATNFSLLKQAGDVEENPGPTSMDWIWRILFLVGAATGAHSFEQVQLQQSGPELKKPGETVKISCKASGYPFTNYGMNWVKQAPGQGLKWMGWINTSTGESTFADDFKGRFDFSLETSANTAYLQINNLKSEDMATYFCARWEVYHGYVPYWGQGTTVTVSSASTKGPSVFPLAPSSKSTSGGTAALGCLVKDYFPEPVTVSWNSGALTSGVHTFPAVLQSSGLYSLSSVVTVPSSSLGTQTYICNVNHKPSNTKVDKRVEPKSCGTQSFGLLDPKLCYLLDGILFIYGVILTALFLRVKFSRSADAPAYQQGQNQLYNELNLGRREEYDVLDKRRGRDPEMGGKPQRRKNPQEGLYNELQKDKMAEAYSEIGMKGERRRGKGHDGLYQGLSTATKDTYDALHMQALPPRRAKRSGSGVKQTLNFDLLKLAGDVESNPGPSRGHMTEYKPTVRLATRDDVPRAVRTLAAAFADYPATRHTVDPDRHIERVTELQELFLTRVGLDIGKVWVADDGAAVAVWTTPESVEAGAVFAEIGPRMAELSGSRLAAQQQMEGLLAPHRPKEPAWFLATVGVSPDHQGKGLGSAVVLPGVEAAERAGVPAFLETSAPRNLPFYERLGFTVTADVEVPEGPRTWCMTRKPGA

SEQ ID NO: 19362 - protein, 815 aa, Artificial Sequence
  Synthetic Polypeptide
MALPVTALLLPLALLLHAARPDIQLTQSHKFLSTSVGDRVSITCKASQDVYNAVAWYQQKPGQSPKLLIYSASSRYTGVPSRFTGSGSGPDFTFTISSVQAEDLAVYFCQQHFRTPFTFGSGTKLEIKLEDLKNVFPPEVAVFEPSEAEISHTQKATLVCLATGFYPDHVELSWWVNGKEVHSGVSTDPQPLKEQPALNDSRYCLSSRLRVSATFWQNPRNHFRCQVQFYGLSENDEWTQDRAKPVTQIVSAEAWGRADCGSQSFGLLDPKLCYLLDGILFIYGVILTALFLRVKFSRSADAPAYQQGQNQLYNELNLGRREEYDVLDKRRGRDPEMGGKPQRRKNPQEGLYNELQKDKMAEAYSEIGMKGERRRGKGHDGLYQGLSTATKDTYDALHMQALPPRRAKRSGSGATNFSLLKQAGDVEENPGPTSMDWIWRILFLVGAATGAHSFEQVQLQQSGPELKKPGETVKISCKASGYPFTNYGMNWVKQAPGQGLKWMGWINTSTGESTFADDFKGRFDFSLETSANTAYLQINNLKSEDMATYFCARWEVYHGYVPYWGQGTTVTVSSTRIQNPDPAVYQLRDSKSSDKSVCLFTDFDSQTNVSQSKDSDVYITDKTVLDMRSMDFKSNSAVAWSNKSDFACANAFNNSIIPEDTFFPSPESSCGTQSFGLLDPKLCYLLDGILFIYGVILTALFLRVKFSRSADAPAYQQGQNQLYNELNLGRREEYDVLDKRRGRDPEMGGKPQRRKNPQEGLYNELQKDKMAEAYSEIGMKGERRRGKGHDGLYQGLSTATKDTYDALHMQALPPR

SEQ ID NO: 19363 - protein, 815 aa, Artificial Sequence
  Synthetic Polypeptide
MALPVTALLLPLALLLHAARPDIQLTQSHKFLSTSVGDRVSITCKASQDVYNAVAWYQQKPGQSPKLLIYSASSRYTGVPSRFTGSGSGPDFTFTISSVQAEDLAVYFCQQHFRTPFTFGSGTKLEIKLEDLKNVFPPEVAVFEPSKAEIAHTQKATLVCLATGFYPDHVELSWWVNGKEVHSGVCTDPQPLKEQPALNDSRYCLSSRLRVSATFWQNPRNHFRCQVQFYGLSENDEWTQDRAKPVTQIVSAEAWGRADCGSQSFGLLDPKLCYLLDGILFIYGVILTALFLRVKFSRSADAPAYQQGQNQLYNELNLGRREEYDVLDKRRGRDPEMGGKPQRRKNPQEGLYNELQKDKMAEAYSEIGMKGERRRGKGHDGLYQGLSTATKDTYDALHMQALPPRRAKRSGSGATNFSLLKQAGDVEENPGPTSMDWIWRILFLVGAATGAHSFEQVQLQQSGPELKKPGETVKISCKASGYPFTNYGMNWVKQAPGQGLKWMGWINTSTGESTFADDFKGRFDFSLETSANTAYLQINNLKSEDMATYFCARWEVYHGYVPYWGQGTTVTVSSTRIQNPDPAVYQLRDSKSSDKSVCLFTDFDSQTNVSQSKDSDVYITDKCVLDMRSMDFKSNSAVAWSNKSDFACANAFNNSIIPEDTFFPSSDVPCGTQSFGLLDPKLCYLLDGILFIYGVILTALFLRVKFSRSADAPAYQQGQNQLYNELNLGRREEYDVLDKRRGRDPEMGGKPQRRKNPQEGLYNELQKDKMAEAYSEIGMKGERRRGKGHDGLYQGLSTATKDTYDALHMQALPPR

SEQ ID NO: 19364 - protein, 886 aa, Artificial Sequence
  Synthetic Polypeptide
MALPVTALLLPLALLLHAARPDIQLTQSHKFLSTSVGDRVSITCKASQDVYNAVAWYQQKPGQSPKLLIYSASSRYTGVPSRFTGSGSGPDFTFTISSVQAEDLAVYFCQQHFRTPFTFGSGTKLEIKLEGKPIPNPLLGLDSTGSGEDLKNVFPPEVAVFEPSEAEISHTQKATLVCLATGFYPDHVELSWWVNGKEVHSGVSTDPQPLKEQPALNDSRYCLSSRLRVSATFWQNPRNHFRCQVQFYGLSENDEWTQDRAKPVTQIVSAEAWGRADCGSQSFGLLDPKLCYLLDGILFIYGVILTALFLRVKFSRSADAPAYQQGQNQLYNELNLGRREEYDVLDKRRGRDPEMGGKPQRRKNPQEGLYNELQKDKMAEAYSEIGMKGERRRGKGHDGLYQGLSTATKDTYDALHMQALPPRRAKRSGSGATNFSLLKQAGDVEENPGPTSMDWIWRILFLVGAATGAHSFEQVQLQQSGPELKKPGETVKISCKASGYPFTNYGMNWVKQAPGQGLKWMGWINTSTGESTFADDFKGRFDFSLETSANTAYLQINNLKSEDMATYFCARWEVYHGYVPYWGQGTTVTVSSTREQKLISEEDGSGIQNPDPAVYQLRDSKSSDKSVCLFTDFDSQTNVSQSKDSDVYITDKTVLDMRSMDFKSNSAVAWSNKSDFACANAFNNSIIPEDTFFPSPESSCGTQSFGLLDPKLCYLLDGILFIYGVILTALFLRSKRSRLLHSDYMNMTPRRPGPTRKHYQPYAPPRDFAAYRSRVKFSRSADAPAYQQGQNQLYNELNLGRREEYDVLDKRRGRDPEMGGKPQRRKNPQEGLYNELQKDKMAEAYSEIGMKGERRRGKGHDGLYQGLSTATKDTYDALHMQALPPR

SEQ ID NO: 19365 - protein, 927 aa, Artificial Sequence
  Synthetic Polypeptide
MALPVTALLLPLALLLHAARPDIQLTQSHKFLSTSVGDRVSITCKASQDVYNAVAWYQQKPGQSPKLLIYSASSRYTGVPSRFTGSGSGPDFTFTISSVQAEDLAVYFCQQHFRTPFTFGSGTKLEIKLEGKPIPNPLLGLDSTGSGEDLKNVFPPEVAVFEPSEAEISHTQKATLVCLATGFYPDHVELSWWVNGKEVHSGVSTDPQPLKEQPALNDSRYCLSSRLRVSATFWQNPRNHFRCQVQFYGLSENDEWTQDRAKPVTQIVSAEAWGRADCGSQSFGLLDPKLCYLLDGILFIYGVILTALFLRSKRSRLLHSDYMNMTPRRPGPTRKHYQPYAPPRDFAAYRSRVKFSRSADAPAYQQGQNQLYNELNLGRREEYDVLDKRRGRDPEMGGKPQRRKNPQEGLYNELQKDKMAEAYSEIGMKGERRRGKGHDGLYQGLSTATKDTYDALHMQALPPRRAKRSGSGATNFSLLKQAGDVEENPGPTSMDWIWRILFLVGAATGAHSFEQVQLQQSGPELKKPGETVKISCKASGYPFTNYGMNWVKQAPGQGLKWMGWINTSTGESTFADDFKGRFDFSLETSANTAYLQINNLKSEDMATYFCARWEVYHGYVPYWGQGTTVTVSSTREQKLISEEDGSGIQNPDPAVYQLRDSKSSDKSVCLFTDFDSQTNVSQSKDSDVYITDKTVLDMRSMDFKSNSAVAWSNKSDFACANAFNNSIIPEDTFFPSPESSCGTQSFGLLDPKLCYLLDGILFIYGVILTALFLRSKRSRLLHSDYMNMTPRRPGPTRKHYQPYAPPRDFAAYRSRVKFSRSADAPAYQQGQNQLYNELNLGRREEYDVLDKRRGRDPEMGGKPQRRKNPQEGLYNELQKDKMAEAYSEIGMKGERRRGKGHDGLYQGLSTATKDTYDALHMQALPPR

SEQ ID NO: 19366 - protein, 888 aa, Artificial Sequence
  Synthetic Polypeptide
MALPVTALLLPLALLLHAARPDIQLTQSHKFLSTSVGDRVSITCKASQDVYNAVAWYQQKPGQSPKLLIYSASSRYTGVPSRFTGSGSGPDFTFTISSVQAEDLAVYFCQQHFRTPFTFGSGTKLEIKLEGKPIPNPLLGLDSTGSGEDLKNVFPPEVAVFEPSEAEISHTQKATLVCLATGFYPDHVELSWWVNGKEVHSGVSTDPQPLKEQPALNDSRYCLSSRLRVSATFWQNPRNHFRCQVQFYGLSENDEWTQDRAKPVTQIVSAEAWGRADCGSQSFGLLDPKLCYLLDGILFIYGVILTALFLRVKFSRSADAPAYQQGQNQLYNELNLGRREEYDVLDKRRGRDPEMGGKPQRRKNPQEGLYNELQKDKMAEAYSEIGMKGERRRGKGHDGLYQGLSTATKDTYDALHMQALPPRRAKRSGSGATNFSLLKQAGDVEENPGPTSMDWIWRILFLVGAATGAHSFEQVQLQQSGPELKKPGETVKISCKASGYPFTNYGMNWVKQAPGQGLKWMGWINTSTGESTFADDFKGRFDFSLETSANTAYLQINNLKSEDMATYFCARWEVYHGYVPYWGQGTTVTVSSTREQKLISEEDLGSGIQNPDPAVYQLRDSKSSDKSVCLFTDFDSQTNVSQSKDSDVYITDKTVLDMRSMDFKSNSAVAWSNKSDFACANAFNNSIIPEDTFFPSPESSCGTQSFGLLDPKLCYLLDGILFIYGVILTALFLKRGRKKLLYIFKQPFMRPVQTTQEEDGCSCRFPEEEEGGCELRVKFSRSADAPAYQQGQNQLYNELNLGRREEYDVLDKRRGRDPEMGGKPQRRKNPQEGLYNELQKDKMAEAYSEIGMKGERRRGKGHDGLYQGLSTATKDTYDALHMQALPPR

SEQ ID NO: 19367 - protein, 930 aa, Artificial Sequence
  Synthetic Polypeptide
MALPVTALLLPLALLLHAARPDIQLTQSHKFLSTSVGDRVSITCKASQDVYNAVAWYQQKPGQSPKLLIYSASSRYTGVPSRFTGSGSGPDFTFTISSVQAEDLAVYFCQQHFRTPFTFGSGTKLEIKLEGKPIPNPLLGLDSTGSGEDLKNVFPPEVAVFEPSEAEISHTQKATLVCLATGFYPDHVELSWWVNGKEVHSGVSTDPQPLKEQPALNDSRYCLSSRLRVSATFWQNPRNHFRCQVQFYGLSENDEWTQDRAKPVTQIVSAEAWGRADCGSQSFGLLDPKLCYLLDGILFIYGVILTALFLKRGRKKLLYIFKQPFMRPVQTTQEEDGCSCRFPEEEEGGCELRVKFSRSADAPAYQQGQNQLYNELNLGRREEYDVLDKRRGRDPEMGGKPQRRKNPQEGLYNELQKDKMAEAYSEIGMKGERRRGKGHDGLYQGLSTATKDTYDALHMQALPPRRAKRSGSGATNFSLLKQAGDVEENPGPTSMDWIWRILFLVGAATGAHSFEQVQLQQSGPELKKPGETVKISCKASGYPFTNYGMNWVKQAPGQGLKWMGWINTSTGESTFADDFKGRFDFSLETSANTAYLQINNLKSEDMATYFCARWEVYHGYVPYWGQGTTVTVSSTREQKLISEEDLGSGIQNPDPAVYQLRDSKSSDKSVCLFTDFDSQTNVSQSKDSDVYITDKTVLDMRSMDFKSNSAVAWSNKSDFACANAFNNSIIPEDTFFPSPESSCGTQSFGLLDPKLCYLLDGILFIYGVILTALFLKRGRKKLLYIFKQPFMRPVQTTQEEDGCSCRFPEEEEGGCELRVKFSRSADAPAYQQGQNQLYNELNLGRREEYDVLDKRRGRDPEMGGKPQRRKNPQEGLYNELQKDKMAEAYSEIGMKGERRRGKGHDGLYQGLSTATKDTYDALHMQALPPR

SEQ ID NO: 19368 - protein, 820 aa, Artificial Sequence
  Synthetic Polypeptide
MALPVTALLLPLALLLHAARPDIQLTQSHKFLSTSVGDRVSITCKASQDVYNAVAWYQQKPGQSPKLLIYSASSRYTGVPSRFTGSGSGPDFTFTISSVQAEDLAVYFCQQHFRTPFTFGSGTKLEIKLEQSFGLLDPKLCYLLDGILFIYGVILTALFLRVKFSRSADAPAYQQGQNQLYNELNLGRREEYDVLDKRRGRDPEMGGKPQRRKNPQEGLYNELQKDKMAEAYSEIGMKGERRRGKGHDGLYQGLSTATKDTYDALHMQALPPRRAKRSGSGATNFSLLKQAGDVEENPGPTSMDWIWRILFLVGAATGAHSFEQVQLQQSGPELKKPGETVKISCKASGYPFTNYGMNWVKQAPGQGLKWMGWINTSTGESTFADDFKGRFDFSLETSANTAYLQINNLKSEDMATYFCARWEVYHGYVPYWGQGTTVTVSSTRQSFGLLDPKLCYLLDGILFIYGVILTALFLRVKFSRSADAPAYQQGQNQLYNELNLGRREEYDVLDKRRGRDPEMGGKPQRRKNPQEGLYNELQKDKMAEAYSEIGMKGERRRGKGHDGLYQGLSTATKDTYDALHMQALPPRRAKRSGSGVKQTLNFDLLKLAGDVESNPGPSRGHMTEYKPTVRLATRDDVPRAVRTLAAAFADYPATRHTVDPDRHIERVTELQELFLTRVGLDIGKVWVADDGAAVAVWTTPESVEAGAVFAEIGPRMAELSGSRLAAQQQMEGLLAPHRPKEPAWFLATVGVSPDHQGKGLGSAVVLPGVEAAERAGVPAFLETSAPRNLPFYERLGFTVTADVEVPEGPRTWCMTRKPGA

SEQ ID NO: 19369 - protein, 645 aa, Artificial Sequence
  Synthetic Polypeptide
MALPVTALLLPLALLLHAARPDIQLTQSHKFLSTSVGDRVSITCKASQDVYNAVAWYQQKPGQSPKLLIYSASSRYTGVPSRFTGSGSGPDFTFTISSVQAEDLAVYFCQQHFRTPFTFGSGTKLEIKLEGQPKANPTVTLFPPSSEELQANKATLVCLISDFYPGAVTVAWKADGSPVKAGVETTKPSKQSNNKYAASSYLSLTPEQWKSHRSYSCQVTHEGSTVEKTVAPTECSPIKTDVITMDPKDNCSKDANDTLLLQLTNTSAYYMYLLLLLKSVVYFAIITCCLLRRTAFCCNGEKSRAKRSGSGATNFSLLKQAGDVEENPGPTSMDWIWRILFLVGAATGAHSFEQVQLQQSGPELKKPGETVKISCKASGYPFTNYGMNWVKQAPGQGLKWMGWINTSTGESTFADDFKGRFDFSLETSANTAYLQINNLKSEDMATYFCARWEVYHGYVPYWGQGTTVTVSSTRASTKGPSVFPLAPSSKSTSGGTAALGCLVKDYFPEPVTVSWNSGALTSGVHTFPAVLQSSGLYSLSSVVTVPSSSLGTQTYICNVNHKPSNTKVDKRVEPKSCEVKTDSTDHVKPKETENTKQPSKSCHKPKAIVHTEKVNMMSLTVLGLRMLFAKTVAVNFLLTAKLFFL

SEQ ID NO: 19370 - protein, 623 aa, Artificial Sequence
  Synthetic Polypeptide
MALPVTALLLPLALLLHAARPDIQLTQSHKFLSTSVGDRVSITCKASQDVYNAVAWYQQKPGQSPKLLIYSASSRYTGVPSRFTGSGSGPDFTFTISSVQAEDLAVYFCQQHFRTPFTFGSGTKLEIKLEGQPKANPTVTLFPPSSEELQANKATLVCLISDFYPGAVTVAWKADGSPVKAGVETTKPSKQSNNKYAASSYLSLTPEQWKSHRSYSCQVTHEGSTVEKTVAPTECSGRADCGITSASYHQGVLSATILYEILLGKATLYAVLVSALVLMAMVKRKDSRGRAKRSGSGATNFSLLKQAGDVEENPGPTSMDWIWRILFLVGAATGAHSFEQVQLQQSGPELKKPGETVKISCKASGYPFTNYGMNWVKQAPGQGLKWMGWINTSTGESTFADDFKGRFDFSLETSANTAYLQINNLKSEDMATYFCARWEVYHGYVPYWGQGTTVTVSSTRASTKGPSVFPLAPSSKSTSGGTAALGCLVKDYFPEPVTVSWNSGALTSGVHTFPAVLQSSGLYSLSSVVTVPSSSLGTQTYICNVNHKPSNTKVDKRVEPKSCIPEDTFFPSSDVPCDVKLVEKSFETDTNLNFQNLSVIGFRILLLKVAGFNLLMTLRLWSS

SEQ ID NO: 19371 - protein, 623 aa, Artificial Sequence
  Synthetic Polypeptide
MALPVTALLLPLALLLHAARPDIQLTQSHKFLSTSVGDRVSITCKASQDVYNAVAWYQQKPGQSPKLLIYSASSRYTGVPSRFTGSGSGPDFTFTISSVQAEDLAVYFCQQHFRTPFTFGSGTKLEIKLEGQPKANPTVTLFPPSSEELQANKATLVCLISDFYPGAVTVAWKADGSPVKAGVETTKPSKQSNNKYAASSYLSLTPEQWKSHRSYSCQVTHEGSTVEKTVAPTECSGRADCGFTSESYQQGVLSATILYEILLGKATLYAVLVSALVLMAMVKRKDSRGRAKRSGSGATNFSLLKQAGDVEENPGPTSMDWIWRILFLVGAATGAHSFEQVQLQQSGPELKKPGETVKISCKASGYPFTNYGMNWVKQAPGQGLKWMGWINTSTGESTFADDFKGRFDFSLETSANTAYLQINNLKSEDMATYFCARWEVYHGYVPYWGQGTTVTVSSTRASTKGPSVFPLAPSSKSTSGGTAALGCLVKDYFPEPVTVSWNSGALTSGVHTFPAVLQSSGLYSLSSVVTVPSSSLGTQTYICNVNHKPSNTKVDKRVEPKSCIPEDTFFPSPESSCDVKLVEKSFETDTNLNFQNLSVIGFRILLLKVAGFNLLMTLRLWSS

SEQ ID NO: 19372 - protein, 449 aa, Artificial Sequence
  Synthetic Polypeptide
MALPVTALLLPLALLLHAARPDIQLTQSHKFLSTSVGDRVSITCKASQDVYNAVAWYQQKPGQSPKLLIYSASSRYTGVPSRFTGSGSGPDFTFTISSVQAEDLAVYFCQQHFRTPFTFGSGTKLEIKGGGGSGGGGSGGGGSQVQLQQSGPELKKPGETVKISCKASGYPFTNYGMNWVKQAPGQGLKWMGWINTSTGESTFADDFKGRFDFSLETSANTAYLQINNLKSEDMATYFCARWEVYHGYVPYWGQGTTVTVSSTRDGNEEMGGITQTPYKVSISGTTVILTCPQYPGSEILWQHNDKNIGGDEDDKNIGSDEDHLSLKEFSELEQSGYYVCYPRGSKPEDANFYLYLRARVCENCMEMDVMSVATIVIVDICITGGLLLLVYYWSKNRKAKAKPVTRGAGAGGRQRGQNKERPPPVPNPDYEPIRKGQRDLYSGLNQRRI

SEQ ID NO: 19373 - protein, 414 aa, Artificial Sequence
  Synthetic Polypeptide
MALPVTALLLPLALLLHAARPDIQLTQSHKFLSTSVGDRVSITCKASQDVYNAVAWYQQKPGQSPKLLIYSASSRYTGVPSRFTGSGSGPDFTFTISSVQAEDLAVYFCQQHFRTPFTFGSGTKLEIKGGGGSGGGGSGGGGSQVQLQQSGPELKKPGETVKISCKASGYPFTNYGMNWVKQAPGQGLKWMGWINTSTGESTFADDFKGRFDFSLETSANTAYLQINNLKSEDMATYFCARWEVYHGYVPYWGQGTTVTVSSTRFKIPIEELEDRVFVNCNTSITWVEGTVGTLLSDITRLDLGKRILDPRGIYRCNGTDIYKDKESTVQVHYRMCQSCVELDPATVAGIIVTDVIATLLLALGVFCFAGHETGRLSGAADTQALLRNDQVYQPLRDRDDAQYSHLGGNWARNK

SEQ ID NO: 19374 - protein, 424 aa, Artificial Sequence
  Synthetic Polypeptide
MALPVTALLLPLALLLHAARPDIQLTQSHKFLSTSVGDRVSITCKASQDVYNAVAWYQQKPGQSPKLLIYSASSRYTGVPSRFTGSGSGPDFTFTISSVQAEDLAVYFCQQHFRTPFTFGSGTKLEIKGGGGSGGGGSGGGGSQVQLQQSGPELKKPGETVKISCKASGYPFTNYGMNWVKQAPGQGLKWMGWINTSTGESTFADDFKGRFDFSLETSANTAYLQINNLKSEDMATYFCARWEVYHGYVPYWGQGTTVTVSSTRQSIKGNHLVKVYDYQEDGSVLLTCDAEAKNITWFKDGKMIGFLTEDKKKWNLGSNAKDPRGMYQCKGSQNKSKPLQVYYRMCQNCIELNAATISGFLFAEIVSIFVLAVGVYFIAGQDGVRQSRASDKQTLLPNDQLYQPLKDREDDQYSHLQGNQLRRN

SEQ ID NO: 19375 - protein, 407 aa, Artificial Sequence
  Synthetic Polypeptide
MALPVTALLLPLALLLHAARPDIQLTQSHKFLSTSVGDRVSITCKASQDVYNAVAWYQQKPGQSPKLLIYSASSRYTGVPSRFTGSGSGPDFTFTISSVQAEDLAVYFCQQHFRTPFTFGSGTKLEIKGGGGSGGGGSGGGGSQVQLQQSGPELKKPGETVKISCKASGYPFTNYGMNWVKQAPGQGLKWMGWINTSTGESTFADDFKGRFDFSLETSANTAYLQINNLKSEDMATYFCARWEVYHGYVPYWGQGTTVTVSSTRQSFGLLDPKLCYLLDGILFIYGVILTALFLRVKFSRSADAPAYQQGQNQLYNELNLGRREEYDVLDKRRGRDPEMGGKPQRRKNPQEGLYNELQKDKMAEAYSEIGMKGERRRGKGHDGLYQGLSTATKDTYDALHMQALPPR

SEQ ID NO: 19376 - protein, 449 aa, Artificial Sequence
  Synthetic Polypeptide
MALPVTALLLPLALLLHAARPQVQLQQSGPELKKPGETVKISCKASGYPFTNYGMNWVKQAPGQGLKWMGWINTSTGESTFADDFKGRFDFSLETSANTAYLQINNLKSEDMATYFCARWEVYHGYVPYWGQGTTVTVSSGGGGSGGGGSGGGGSDIQLTQSHKFLSTSVGDRVSITCKASQDVYNAVAWYQQKPGQSPKLLIYSASSRYTGVPSRFTGSGSGPDFTFTISSVQAEDLAVYFCQQHFRTPFTFGSGTKLEIKTRDGNEEMGGITQTPYKVSISGTTVILTCPQYPGSEILWQHNDKNIGGDEDDKNIGSDEDHLSLKEFSELEQSGYYVCYPRGSKPEDANFYLYLRARVCENCMEMDVMSVATIVIVDICITGGLLLLVYYWSKNRKAKAKPVTRGAGAGGRQRGQNKERPPPVPNPDYEPIRKGQRDLYSGLNQRRI

SEQ ID NO: 19377 - protein, 414 aa, Artificial Sequence
  Synthetic Polypeptide
MALPVTALLLPLALLLHAARPQVQLQQSGPELKKPGETVKISCKASGYPFTNYGMNWVKQAPGQGLKWMGWINTSTGESTFADDFKGRFDFSLETSANTAYLQINNLKSEDMATYFCARWEVYHGYVPYWGQGTTVTVSSGGGGSGGGGSGGGGSDIQLTQSHKFLSTSVGDRVSITCKASQDVYNAVAWYQQKPGQSPKLLIYSASSRYTGVPSRFTGSGSGPDFTFTISSVQAEDLAVYFCQQHFRTPFTFGSGTKLEIKTRFKIPIEELEDRVFVNCNTSITWVEGTVGTLLSDITRLDLGKRILDPRGIYRCNGTDIYKDKESTVQVHYRMCQSCVELDPATVAGIIVTDVIATLLLALGVFCFAGHETGRLSGAADTQALLRNDQVYQPLRDRDDAQYSHLGGNWARNK

SEQ ID NO: 19378 - protein, 424 aa, Artificial Sequence
  Synthetic Polypeptide
MALPVTALLLPLALLLHAARPQVQLQQSGPELKKPGETVKISCKASGYPFTNYGMNWVKQAPGQGLKWMGWINTSTGESTFADDFKGRFDFSLETSANTAYLQINNLKSEDMATYFCARWEVYHGYVPYWGQGTTVTVSSGGGGSGGGGSGGGGSDIQLTQSHKFLSTSVGDRVSITCKASQDVYNAVAWYQQKPGQSPKLLIYSASSRYTGVPSRFTGSGSGPDFTFTISSVQAEDLAVYFCQQHFRTPFTFGSGTKLEIKTRQSIKGNHLVKVYDYQEDGSVLLTCDAEAKNITWFKDGKMIGFLTEDKKKWNLGSNAKDPRGMYQCKGSQNKSKPLQVYYRMCQNCIELNAATISGFLFAEIVSIFVLAVGVYFIAGQDGVRQSRASDKQTLLPNDQLYQPLKDREDDQYSHLQGNQLRRN

SEQ ID NO: 19379 - protein, 407 aa, Artificial Sequence
  Synthetic Polypeptide
MALPVTALLLPLALLLHAARPQVQLQQSGPELKKPGETVKISCKASGYPFTNYGMNWVKQAPGQGLKWMGWINTSTGESTFADDFKGRFDFSLETSANTAYLQINNLKSEDMATYFCARWEVYHGYVPYWGQGTTVTVSSGGGGSGGGGSGGGGSDIQLTQSHKFLSTSVGDRVSITCKASQDVYNAVAWYQQKPGQSPKLLIYSASSRYTGVPSRFTGSGSGPDFTFTISSVQAEDLAVYFCQQHFRTPFTFGSGTKLEIKTRQSFGLLDPKLCYLLDGILFIYGVILTALFLRVKFSRSADAPAYQQGQNQLYNELNLGRREEYDVLDKRRGRDPEMGGKPQRRKNPQEGLYNELQKDKMAEAYSEIGMKGERRRGKGHDGLYQGLSTATKDTYDALHMQALPPR

SEQ ID NO: 19380 - protein, 640 aa, Artificial Sequence
  Synthetic Polypeptide
MALPVTALLLPLALLLHAARPDIQLTQSHKFLSTSVGDRVSITCKASQDVYNAVAWYQQKPGQSPKLLIYSASSRYTGVPSRFTGSGSGPDFTFTISSVQAEDLAVYFCQQHFRTPFTFGSGTKLEIKGGGGSGGGGSGGGGSQVQLQQSGPELKKPGETVKISCKASGYPFTNYGMNWVKQAPGQGLKWMGWINTSTGESTFADDFKGRFDFSLETSANTAYLQINNLKSEDMATYFCARWEVYHGYVPYWGQGTTVTVSSTRGSGIQNPDPAVYQLRDSKSSDKSVCLFTDFDSQTNVSQSKDSDVYITDKTVLDMRSMDFKSNSAVAWSNKSDFACANAFNNSIIPEDTFFPSPESSCDVKLVEKSFETDTNLNFQNLSVIGFRILLLKVAGFNLLMTLRLWSSRAKRSGSGVKQTLNFDLLKLAGDVESNPGPSRGHMTEYKPTVRLATRDDVPRAVRTLAAAFADYPATRHTVDPDRHIERVTELQELFLTRVGLDIGKVWVADDGAAVAVWTTPESVEAGAVFAEIGPRMAELSGSRLAAQQQMEGLLAPHRPKEPAWFLATVGVSPDHQGKGLGSAVVLPGVEAAERAGVPAFLETSAPRNLPFYERLGFTVTADVEVPEGPRTWCMTRKPGA

SEQ ID NO: 19381 - protein, 672 aa, Artificial Sequence
  Synthetic Polypeptide
MALPVTALLLPLALLLHAARPDIQLTQSHKFLSTSVGDRVSITCKASQDVYNAVAWYQQKPGQSPKLLIYSASSRYTGVPSRFTGSGSGPDFTFTISSVQAEDLAVYFCQQHFRTPFTFGSGTKLEIKGGGGSGGGGSGGGGSQVQLQQSGPELKKPGETVKISCKASGYPFTNYGMNWVKQAPGQGLKWMGWINTSTGESTFADDFKGRFDFSLETSANTAYLQINNLKSEDMATYFCARWEVYHGYVPYWGQGTTVTVSSLEDLKNVFPPEVAVFEPSEAEISHTQKATLVCLATGFYPDHVELSWWVNGKEVHSGVSTDPQPLKEQPALNDSRYCLSSRLRVSATFWQNPRNHFRCQVQFYGLSENDEWTQDRAKPVTQIVSAEAWGRADCGFTSESYQQGVLSATILYEILLGKATLYAVLVSALVLMAMVKRKDSRGRAKRSGSGATNFSLLKQAGDVEENPGPTRGHMTEYKPTVRLATRDDVPRAVRTLAAAFADYPATRHTVDPDRHIERVTELQELFLTRVGLDIGKVWVADDGAAVAVWTTPESVEAGAVFAEIGPRMAELSGSRLAAQQQMEGLLAPHRPKEPAWFLATVGVSPDHQGKGLGSAVVLPGVEAAERAGVPAFLETSAPRNLPFYERLGFTVTADVEVPEGPRTWCMTRKPGA

SEQ ID NO: 19382 - protein, 722 aa, Artificial Sequence
  Synthetic Polypeptide
MALPVTALLLPLALLLHAARPDIQLTQSHKFLSTSVGDRVSITCKASQDVYNAVAWYQQKPGQSPKLLIYSASSRYTGVPSRFTGSGSGPDFTFTISSVQAEDLAVYFCQQHFRTPFTFGSGTKLEIKGGGGSGGGGSGGGGSQVQLQQSGPELKKPGETVKISCKASGYPFTNYGMNWVKQAPGQGLKWMGWINTSTGESTFADDFKGRFDFSLETSANTAYLQINNLKSEDMATYFCARWEVYHGYVPYWGQGTTVTVSSTREQKLISEEDLGSGTPFPSLAPPIMLLVDGKQQMVVVCLVLDVAPPGLDSPIWFSAGNGSALDAFTYGPSPATDGTWTNLAHLSLPSEELASWEPLVCHTGPGAEGHSRSTQPMHLSGEASTARTCPQEPLRGTPGGALWLGVLRLLLFKLLLFDLLLTCSCLCDPAGPLPSPATTTRLRALGSHRLHPATETGGREATSSPRPQPRDRRWGDTPPGRKPGSPVRAKRSGSGVKQTLNFDLLKLAGDVESNPGPSRSRGHMTEYKPTVRLATRDDVPRAVRTLAAAFADYPATRHTVDPDRHIERVTELQELFLTRVGLDIGKVWVADDGAAVAVWTTPESVEAGAVFAEIGPRMAELSGSRLAAQQQMEGLLAPHRPKEPAWFLATVGVSPDHQGKGLGSAVVLPGVEAAERAGVPAFLETSAPRNLPFYERLGFTVTADVEVPEGPRTWCMTRKPGA

SEQ ID NO: 19383 - protein, 538 aa, Artificial Sequence
  Synthetic Polypeptide
MALPVTALLLPLALLLHAARPDIQLTQSHKFLSTSVGDRVSITCKASQDVYNAVAWYQQKPGQSPKLLIYSASSRYTGVPSRFTGSGSGPDFTFTISSVQAEDLAVYFCQQHFRTPFTFGSGTKLEIKLEDLKNVFPPEVAVFEPSEAEISHTQKATLVCLATGFYPDHVELSWWVNGKEVHSGVSTDPQPLKEQPALNDSRYCLSSRLRVSATFWQNPRNHFRCQVQFYGLSENDEWTQDRAKPVTQIVSAEAWGRADCGFTSESYQQGVLSATILYEILLGKATLYAVLVSALVLMAMVKRKDSRGRAKRSGSGATNFSLLKQAGDVEENPGPTRGHMTEYKPTVRLATRDDVPRAVRTLAAAFADYPATRHTVDPDRHIERVTELQELFLTRVGLDIGKVWVADDGAAVAVWTTPESVEAGAVFAEIGPRMAELSGSRLAAQQQMEGLLAPHRPKEPAWFLATVGVSPDHQGKGLGSAVVLPGVEAAERAGVPAFLETSAPRNLPFYERLGFTVTADVEVPEGPRTWCMTRKPGA

SEQ ID NO: 19384 - protein, 308 aa, Artificial Sequence
  Synthetic Polypeptide
MALPVTALLLPLALLLHAARPDIQLTQSHKFLSTSVGDRVSITCKASQDVYNAVAWYQQKPGQSPKLLIYSASSRYTGVPSRFTGSGSGPDFTFTISSVQAEDLAVYFCQQHFRTPFTFGSGTKLEIKLEDLKNVFPPEVAVFEPSEAEISHTQKATLVCLATGFYPDHVELSWWVNGKEVHSGVSTDPQPLKEQPALNDSRYCLSSRLRVSATFWQNPRNHFRCQVQFYGLSENDEWTQDRAKPVTQIVSAEAWGRADCGFTSESYQQGVLSATILYEILLGKATLYAVLVSALVLMAMVKRKDSRG

SEQ ID NO: 19385 - protein, 448 aa, Artificial Sequence
  Synthetic Polypeptide
MDWIWRILFLVGAATGAHSFEQVQLQQSGPELKKPGETVKISCKASGYPFTNYGMNWVKQAPGQGLKWMGWINTSTGESTFADDFKGRFDFSLETSANTAYLQINNLKSEDMATYFCARWEVYHGYVPYWGQGTTVTVSSTRIQNPDPAVYQLRDSKSSDKSVCLFTDFDSQTNVSQSKDSDVYITDKTVLDMRSMDFKSNSAVAWSNKSDFACANAFNNSIIPEDTFFPSPESSCDVKLVEKSFETDTNLNFQNLSVIGFRILLLKVAGFNLLMTLRLWSSRAKRSGSGVKQTLNFDLLKLAGDVESNPGPSRGHMAKPLSQEESTLIERATATINSIPISEDYSVASAALSSDGRIFTGVNVYHFTGGPCAELVVLGTAAAAAAGNLTCIVAIGNENRGILSPCGRCRQVLLDLHPGIKAIVKDSDGQPTAVGIRELLPSGYVWEG

SEQ ID NO: 19386 - protein, 282 aa, Artificial Sequence
  Synthetic Polypeptide
MDWIWRILFLVGAATGAHSFEQVQLQQSGPELKKPGETVKISCKASGYPFTNYGMNWVKQAPGQGLKWMGWINTSTGESTFADDFKGRFDFSLETSANTAYLQINNLKSEDMATYFCARWEVYHGYVPYWGQGTTVTVSSTRIQNPDPAVYQLRDSKSSDKSVCLFTDFDSQTNVSQSKDSDVYITDKTVLDMRSMDFKSNSAVAWSNKSDFACANAFNNSIIPEDTFFPSPESSCDVKLVEKSFETDTNLNFQNLSVIGFRILLLKVAGFNLLMTLRLWSS

SEQ ID NO: 19387 - protein, 556 aa, Artificial Sequence
  Synthetic Polypeptide
MALPVTALLLPLALLLHAARPDIQLTQSHKFLSTSVGDRVSITCKASQDVYNAVAWYQQKPGQSPKLLIYSASSRYTGVPSRFTGSGSGPDFTFTISSVQAEDLAVYFCQQHFRTPFTFGSGTKLEIKLEGKPIPNPLLGLDSTGSGEDLKNVFPPEVAVFEPSEAEISHTQKATLVCLATGFYPDHVELSWWVNGKEVHSGVCTDPQPLKEQPALNDSRYCLSSRLRVSATFWQNPRNHFRCQVQFYGLSENDEWTQDRAKPVTQIVSAEAWGRADCGFTSESYQQGVLSATILYEILLGKATLYAVLVSALVLMAMVKRKDSRGRAKRSGSGATNFSLLKQAGDVEENPGPTRGHMTEYKPTVRLATRDDVPRAVRTLAAAFADYPATRHTVDPDRHIERVTELQELFLTRVGLDIGKVWVADDGAAVAVWTTPESVEAGAVFAEIGPRMAELSGSRLAAQQQMEGLLAPHRPKEPAWFLATVGVSPDHQGKGLGSAVVLPGVEAAERAGVPAFLETSAPRNLPFYERLGFTVTADVEVPEGPRTWCMTRKPGA

SEQ ID NO: 19388 - protein, 326 aa, Artificial Sequence
  Synthetic Polypeptide
MALPVTALLLPLALLLHAARPDIQLTQSHKFLSTSVGDRVSITCKASQDVYNAVAWYQQKPGQSPKLLIYSASSRYTGVPSRFTGSGSGPDFTFTISSVQAEDLAVYFCQQHFRTPFTFGSGTKLEIKLEGKPIPNPLLGLDSTGSGEDLKNVFPPEVAVFEPSEAEISHTQKATLVCLATGFYPDHVELSWWVNGKEVHSGVCTDPQPLKEQPALNDSRYCLSSRLRVSATFWQNPRNHFRCQVQFYGLSENDEWTQDRAKPVTQIVSAEAWGRADCGFTSESYQQGVLSATILYEILLGKATLYAVLVSALVLMAMVKRKDSRG

SEQ ID NO: 19389 - protein, 460 aa, Artificial Sequence
  Synthetic Polypeptide
MDWIWRILFLVGAATGAHSFEQVQLQQSGPELKKPGETVKISCKASGYPFTNYGMNWVKQAPGQGLKWMGWINTSTGESTFADDFKGRFDFSLETSANTAYLQINNLKSEDMATYFCARWEVYHGYVPYWGQGTTVTVSSTREQKLISEEDGSGIQNPDPAVYQLRDSKSSDKSVCLFTDFDSQTNVSQSKDSDVYITDKCVLDMRSMDFKSNSAVAWSNKSDFACANAFNNSIIPEDTFFPSPESSCDVKLVEKSFETDTNLNFQNLSVIGFRILLLKVAGFNLLMTLRLWSSRAKRSGSGVKQTLNFDLLKLAGDVESNPGPSRGHMAKPLSQEESTLIERATATINSIPISEDYSVASAALSSDGRIFTGVNVYHFTGGPCAELVVLGTAAAAAAGNLTCIVAIGNENRGILSPCGRCRQVLLDLHPGIKAIVKDSDGQPTAVGIRELLPSGYVWEG

SEQ ID NO: 19390 - protein, 294 aa, Artificial Sequence
  Synthetic Polypeptide
MDWIWRILFLVGAATGAHSFEQVQLQQSGPELKKPGETVKISCKASGYPFTNYGMNWVKQAPGQGLKWMGWINTSTGESTFADDFKGRFDFSLETSANTAYLQINNLKSEDMATYFCARWEVYHGYVPYWGQGTTVTVSSTREQKLISEEDGSGIQNPDPAVYQLRDSKSSDKSVCLFTDFDSQTNVSQSKDSDVYITDKCVLDMRSMDFKSNSAVAWSNKSDFACANAFNNSIIPEDTFFPSPESSCDVKLVEKSFETDTNLNFQNLSVIGFRILLLKVAGFNLLMTLRLWSS

SEQ ID NO: 19391 - protein, 640 aa, Artificial Sequence
  Synthetic Polypeptide
MALPVTALLLPLALLLHAARPDIQLTQSHKFLSTSVGDRVSITCKASQDVYNAVAWYQQKPGQSPKLLIYSASSRYTGVPSRFTGSGSGPDFTFTISSVQAEDLAVYFCQQHFRTPFTFGSGTKLEIKGGGGSGGGGSGGGGSQVQLQQSGPELKKPGETVKISCKASGYPFTNYGMNWVKQAPGQGLKWMGWINTSTGESTFADDFKGRFDFSLETSANTAYLQINNLKSEDMATYFCARWEVYHGYVPYWGQGTTVTVSSTRGSGIQNPDPAVYQLRDSKSSDKSVCLFTDFDSQTNVSQSKDSDVYITDKTVLDMRSMDFKSNSAVAWSNKSDFACANAFNNSIIPEDTFFPSSDVPCDVKLVEKSFETDTNLNFQNLSVIGFRILLLKVAGFNLLMTLRLWSSRAKRSGSGVKQTLNFDLLKLAGDVESNPGPSRGHMTEYKPTVRLATRDDVPRAVRTLAAAFADYPATRHTVDPDRHIERVTELQELFLTRVGLDIGKVWVADDGAAVAVWTTPESVEAGAVFAEIGPRMAELSGSRLAAQQQMEGLLAPHRPKEPAWFLATVGVSPDHQGKGLGSAVVLPGVEAAERAGVPAFLETSAPRNLPFYERLGFTVTADVEVPEGPRTWCMTRKPGA

SEQ ID NO: 19392 - protein, 672 aa, Artificial Sequence
  Synthetic Polypeptide
MALPVTALLLPLALLLHAARPDIQLTQSHKFLSTSVGDRVSITCKASQDVYNAVAWYQQKPGQSPKLLIYSASSRYTGVPSRFTGSGSGPDFTFTISSVQAEDLAVYFCQQHFRTPFTFGSGTKLEIKGGGGSGGGGSGGGGSQVQLQQSGPELKKPGETVKISCKASGYPFTNYGMNWVKQAPGQGLKWMGWINTSTGESTFADDFKGRFDFSLETSANTAYLQINNLKSEDMATYFCARWEVYHGYVPYWGQGTTVTVSSLEDLKNVFPPEVAVFEPSKAEIAHTQKATLVCLATGFYPDHVELSWWVNGKEVHSGVSTDPQPLKEQPALNDSRYCLSSRLRVSATFWQNPRNHFRCQVQFYGLSENDEWTQDRAKPVTQIVSAEAWGRADCGITSASYHQGVLSATILYEILLGKATLYAVLVSALVLMAMVKRKDSRGRAKRSGSGATNFSLLKQAGDVEENPGPTRGHMTEYKPTVRLATRDDVPRAVRTLAAAFADYPATRHTVDPDRHIERVTELQELFLTRVGLDIGKVWVADDGAAVAVWTTPESVEAGAVFAEIGPRMAELSGSRLAAQQQMEGLLAPHRPKEPAWFLATVGVSPDHQGKGLGSAVVLPGVEAAERAGVPAFLETSAPRNLPFYERLGFTVTADVEVPEGPRTWCMTRKPGA

SEQ ID NO: 19393 - protein, 695 aa, Artificial Sequence
  Synthetic Polypeptide
MALPVTALLLPLALLLHAARPDIQLTQSHKFLSTSVGDRVSITCKASQDVYNAVAWYQQKPGQSPKLLIYSASSRYTGVPSRFTGSGSGPDFTFTISSVQAEDLAVYFCQQHFRTPFTFGSGTKLEIKGGGGSGGGGSGGGGSQVQLQQSGPELKKPGETVKISCKASGYPFTNYGMNWVKQAPGQGLKWMGWINTSTGESTFADDFKGRFDFSLETSANTAYLQINNLKSEDMATYFCARWEVYHGYVPYWGQGTTVTVSSTRGSGGGGSGGGGSGDGNEEMGGITQTPYKVSISGTTVILTCPQYPGSEILWQHNDKNIGGDEDDKNIGSDEDHLSLKEFSELEQSGYYVCYPRGSKPEDANFYLYLRARVCENCMEMDVMSVATIVIVDICITGGLLLLVYYWSKNRKAKAKPVTRGAGAGGRQRGQNKERPPPVPNPDYEPIRKGQRDLYSGLNQRRIRAKRSGSGVKQTLNFDLLKLAGDVESNPGPSRGHMTEYKPTVRLATRDDVPRAVRTLAAAFADYPATRHTVDPDRHIERVTELQELFLTRVGLDIGKVWVADDGAAVAVWTTPESVEAGAVFAEIGPRMAELSGSRLAAQQQMEGLLAPHRPKEPAWFLATVGVSPDHQGKGLGSAVVLPGVEAAERAGVPAFLETSAPRNLPFYERLGFTVTADVEVPEGPRTWCMTRKPGA

SEQ ID NO: 19394 - protein, 660 aa, Artificial Sequence
  Synthetic Polypeptide
MALPVTALLLPLALLLHAARPDIQLTQSHKFLSTSVGDRVSITCKASQDVYNAVAWYQQKPGQSPKLLIYSASSRYTGVPSRFTGSGSGPDFTFTISSVQAEDLAVYFCQQHFRTPFTFGSGTKLEIKGGGGSGGGGSGGGGSQVQLQQSGPELKKPGETVKISCKASGYPFTNYGMNWVKQAPGQGLKWMGWINTSTGESTFADDFKGRFDFSLETSANTAYLQINNLKSEDMATYFCARWEVYHGYVPYWGQGTTVTVSSTRGSGGGGSGGGGSGFKIPIEELEDRVFVNCNTSITWVEGTVGTLLSDITRLDLGKRILDPRGIYRCNGTDIYKDKESTVQVHYRMCQSCVELDPATVAGIIVTDVIATLLLALGVFCFAGHETGRLSGAADTQALLRNDQVYQPLRDRDDAQYSHLGGNWARNKRAKRSGSGVKQTLNFDLLKLAGDVESNPGPSRGHMTEYKPTVRLATRDDVPRAVRTLAAAFADYPATRHTVDPDRHIERVTELQELFLTRVGLDIGKVWVADDGAAVAVWTTPESVEAGAVFAEIGPRMAELSGSRLAAQQQMEGLLAPHRPKEPAWFLATVGVSPDHQGKGLGSAVVLPGVEAAERAGVPAFLETSAPRNLPFYERLGFTVTADVEVPEGPRTWCMTRKPGA

SEQ ID NO: 19395 - protein, 670 aa, Artificial Sequence
  Synthetic Polypeptide
MALPVTALLLPLALLLHAARPDIQLTQSHKFLSTSVGDRVSITCKASQDVYNAVAWYQQKPGQSPKLLIYSASSRYTGVPSRFTGSGSGPDFTFTISSVQAEDLAVYFCQQHFRTPFTFGSGTKLEIKGGGGSGGGGSGGGGSQVQLQQSGPELKKPGETVKISCKASGYPFTNYGMNWVKQAPGQGLKWMGWINTSTGESTFADDFKGRFDFSLETSANTAYLQINNLKSEDMATYFCARWEVYHGYVPYWGQGTTVTVSSTRGSGGGGSGGGGSGQSIKGNHLVKVYDYQEDGSVLLTCDAEAKNITWFKDGKMIGFLTEDKKKWNLGSNAKDPRGMYQCKGSQNKSKPLQVYYRMCQNCIELNAATISGFLFAEIVSIFVLAVGVYFIAGQDGVRQSRASDKQTLLPNDQLYQPLKDREDDQYSHLQGNQLRRNRAKRSGSGVKQTLNFDLLKLAGDVESNPGPSRGHMTEYKPTVRLATRDDVPRAVRTLAAAFADYPATRHTVDPDRHIERVTELQELFLTRVGLDIGKVWVADDGAAVAVWTTPESVEAGAVFAEIGPRMAELSGSRLAAQQQMEGLLAPHRPKEPAWFLATVGVSPDHQGKGLGSAVVLPGVEAAERAGVPAFLETSAPRNLPFYERLGFTVTADVEVPEGPRTWCMTRKPGA

SEQ ID NO: 19396 - protein, 653 aa, Artificial Sequence
  Synthetic Polypeptide
MALPVTALLLPLALLLHAARPDIQLTQSHKFLSTSVGDRVSITCKASQDVYNAVAWYQQKPGQSPKLLIYSASSRYTGVPSRFTGSGSGPDFTFTISSVQAEDLAVYFCQQHFRTPFTFGSGTKLEIKGGGGSGGGGSGGGGSQVQLQQSGPELKKPGETVKISCKASGYPFTNYGMNWVKQAPGQGLKWMGWINTSTGESTFADDFKGRFDFSLETSANTAYLQINNLKSEDMATYFCARWEVYHGYVPYWGQGTTVTVSSTRGSGGGGSGGGGSGQSFGLLDPKLCYLLDGILFIYGVILTALFLRVKFSRSADAPAYQQGQNQLYNELNLGRREEYDVLDKRRGRDPEMGGKPQRRKNPQEGLYNELQKDKMAEAYSEIGMKGERRRGKGHDGLYQGLSTATKDTYDALHMQALPPRRAKRSGSGVKQTLNFDLLKLAGDVESNPGPSRGHMTEYKPTVRLATRDDVPRAVRTLAAAFADYPATRHTVDPDRHIERVTELQELFLTRVGLDIGKVWVADDGAAVAVWTTPESVEAGAVFAEIGPRMAELSGSRLAAQQQMEGLLAPHRPKEPAWFLATVGVSPDHQGKGLGSAVVLPGVEAAERAGVPAFLETSAPRNLPFYERLGFTVTADVEVPEGPRTWCMTRKPGA

SEQ ID NO: 19397 - protein, 754 aa, Artificial Sequence
  Synthetic Polypeptide
MALPVTALLLPLALLLHAARPEVQLVESGGGLVQPGGSLRLSCAASGFSFSDFWMSWVRQAPGKGLEWVATISQAGSEKDYVDSVKGRFTISRDNAKKSLYLQMNSLRAEDTAVYYCASGVYSFDYRGQGTLVTVSSGTGGGGSGGGGSGGGGSEFDIQLTQSHKFLSTSVGDRVSITCKASQDVYNAVAWYQQKPGQSPKLLIYSASSRYTGVPSRFTGSGSGPDFTFTISSVQAEDLAVYFCQQHFRTPFTFGSGTKLEIKLEDLKNVFPPEVAVFEPSEAEISHTQKATLVCLATGFYPDHVELSWWVNGKEVHSGVCTDPQPLKEQPALNDSRYCLSSRLRVSATFWQNPRNHFRCQVQFYGLSENDEWTQDRAKPVTQIVSAEAWGRADCGFTSESYQQGVLSATILYEILLGKATLYAVLVSALVLMAMVKRKDSRGRAKRSGSGATNFSLLKQAGDVEENPGPTSMDWIWRILFLVGAATGAHSFEQVQLQQSGPELKKPGETVKISCKASGYPFTNYGMNWVKQAPGQGLKWMGWINTSTGESTFADDFKGRFDFSLETSANTAYLQINNLKSEDMATYFCARWEVYHGYVPYWGQGTTVTVSSTRIQNPDPAVYQLRDSKSSDKSVCLFTDFDSQTNVSQSKDSDVYITDKCVLDMRSMDFKSNSAVAWSNKSDFACANAFNNSIIPEDTFFPSPESSCDVKLVEKSFETDTNLNFQNLSVIGFRILLLKVAGFNLLMTLRLWSS

SEQ ID NO: 19398 - protein, 758 aa, Artificial Sequence
  Synthetic Polypeptide
MALPVTALLLPLALLLHAARPEVQLVESGGGLVQPGGSLRLSCAASGFSFSDFWMSWVRQAPGKGLEWVATISQAGSEKDYVDSVKGRFTISRDNAKKSLYLQMNSLRAEDTAVYYCASGVYSFDYRGQGTLVTVSSGTGGGGSGGGGSGGGGSEFDIQLTQSHKFLSTSVGDRVSITCKASQDVYNAVAWYQQKPGQSPKLLIYSASSRYTGVPSRFTGSGSGPDFTFTISSVQAEDLAVYFCQQHFRTPFTFGSGTKLEIKLEIQNPDPAVYQLRDSKSSDKSVCLFTDFDSQTNVSQSKDSDVYITDKCVLDMRSMDFKSNSAVAWSNKSDFACANAFNNSIIPEDTFFPSPESSCDVKLVEKSFETDTNLNFQNLSVIGFRILLLKVAGFNLLMTLRLWSSRAKRSGSGVKQTLNFDLLKLAGDVESNPGPTSMDWIWRILFLVGAATGAHSFEQVQLQQSGPELKKPGETVKISCKASGYPFTNYGMNWVKQAPGQGLKWMGWINTSTGESTFADDFKGRFDFSLETSANTAYLQINNLKSEDMATYFCARWEVYHGYVPYWGQGTTVTVSSTREDLKNVFPPEVAVFEPSEAEISHTQKATLVCLATGFYPDHVELSWWVNGKEVHSGVCTDPQPLKEQPALNDSRYCLSSRLRVSATFWQNPRNHFRCQVQFYGLSENDEWTQDRAKPVTQIVSAEAWGRADCGFTSESYQQGVLSATILYEILLGKATLYAVLVSALVLMAMVKRKDSRG

SEQ ID NO: 19399 - protein, 950 aa, Artificial Sequence
  Synthetic Polypeptide
MALPVTALLLPLALLLHAARPEVQLVESGGGLVQPGGSLRLSCAASGFSFSDFWMSWVRQAPGKGLEWVATISQAGSEKDYVDSVKGRFTISRDNAKKSLYLQMNSLRAEDTAVYYCASGVYSFDYRGQGTLVTVSSGTGGGGSGGGGSGGGGSEFDIQLTQSHKFLSTSVGDRVSITCKASQDVYNAVAWYQQKPGQSPKLLIYSASSRYTGVPSRFTGSGSGPDFTFTISSVQAEDLAVYFCQQHFRTPFTFGSGTKLEIKLEDLKNVFPPEVAVFEPSEAEISHTQKATLVCLATGFYPDHVELSWWVNGKEVHSGVSTDPQPLKEQPALNDSRYCLSSRLRVSATFWQNPRNHFRCQVQFYGLSENDEWTQDRAKPVTQIVSAEAWGRADCGSQSFGLLDPKLCYLLDGILFIYGVILTALFLRVKFSRSADAPAYQQGQNQLYNELNLGRREEYDVLDKRRGRDPEMGGKPQRRKNPQEGLYNELQKDKMAEAYSEIGMKGERRRGKGHDGLYQGLSTATKDTYDALHMQALPPRRAKRSGSGATNFSLLKQAGDVEENPGPTSMDWIWRILFLVGAATGAHSFEQVQLQQSGPELKKPGETVKISCKASGYPFTNYGMNWVKQAPGQGLKWMGWINTSTGESTFADDFKGRFDFSLETSANTAYLQINNLKSEDMATYFCARWEVYHGYVPYWGQGTTVTVSSTRIQNPDPAVYQLRDSKSSDKSVCLFTDFDSQTNVSQSKDSDVYITDKTVLDMRSMDFKSNSAVAWSNKSDFACANAFNNSIIPEDTFFPSPESSCGTQSFGLLDPKLCYLLDGILFIYGVILTALFLRVKFSRSADAPAYQQGQNQLYNELNLGRREEYDVLDKRRGRDPEMGGKPQRRKNPQEGLYNELQKDKMAEAYSEIGMKGERRRGKGHDGLYQGLSTATKDTYDALHMQALPPR

SEQ ID NO: 19400 - protein, 780 aa, Artificial Sequence
  Synthetic Polypeptide
MALPVTALLLPLALLLHAARPEVQLVESGGGLVQPGGSLRLSCAASGFSFSDFWMSWVRQAPGKGLEWVATISQAGSEKDYVDSVKGRFTISRDNAKKSLYLQMNSLRAEDTAVYYCASGVYSFDYRGQGTLVTVSSGTGGGGSGGGGSGGGGSEFDIQLTQSHKFLSTSVGDRVSITCKASQDVYNAVAWYQQKPGQSPKLLIYSASSRYTGVPSRFTGSGSGPDFTFTISSVQAEDLAVYFCQQHFRTPFTFGSGTKLEIKLEGQPKANPTVTLFPPSSEELQANKATLVCLISDFYPGAVTVAWKADGSPVKAGVETTKPSKQSNNKYAASSYLSLTPEQWKSHRSYSCQVTHEGSTVEKTVAPTECSPIKTDVITMDPKDNCSKDANDTLLLQLTNTSAYYMYLLLLLKSVVYFAIITCCLLRRTAFCCNGEKSRAKRSGSGATNFSLLKQAGDVEENPGPTSMDWIWRILFLVGAATGAHSFEQVQLQQSGPELKKPGETVKISCKASGYPFTNYGMNWVKQAPGQGLKWMGWINTSTGESTFADDFKGRFDFSLETSANTAYLQINNLKSEDMATYFCARWEVYHGYVPYWGQGTTVTVSSTRASTKGPSVFPLAPSSKSTSGGTAALGCLVKDYFPEPVTVSWNSGALTSGVHTFPAVLQSSGLYSLSSVVTVPSSSLGTQTYICNVNHKPSNTKVDKRVEPKSCEVKTDSTDHVKPKETENTKQPSKSCHKPKAIVHTEKVNMMSLTVLGLRMLFAKTVAVNFLLTAKLFFL

SEQ ID NO: 19401 - protein, 761 aa, Artificial Sequence
  Synthetic Polypeptide
MALPVTALLLPLALLLHAARPEVQLVESGGGLVQPGGSLRLSCAASGFSFSDFWMSWVRQAPGKGLEWVATISQAGSEKDYVDSVKGRFTISRDNAKKSLYLQMNSLRAEDTAVYYCASGVYSFDYRGQGTLVTVSSGTGGGGSGGGGSGGGGSEFDIQLTQSHKFLSTSVGDRVSITCKASQDVYNAVAWYQQKPGQSPKLLIYSASSRYTGVPSRFTGSGSGPDFTFTISSVQAEDLAVYFCQQHFRTPFTFGSGTKLEIKLEGQPKANPTVTLFPPSSEELQANKATLVCLISDFYPGAVTVAWKADGSPVKAGVETTKPSKQSNNKYAASSYLSLTPEQWKSHRSYSCQVTHEGSTVEKTVAPTECSGRADCGFTSESYQQGVLSATILYEILLGKATLYAVLVSALVLMAMVKRKDSRGRAKRSGSGVKQTLNFDLLKLAGDVESNPGPTSMDWIWRILFLVGAATGAHSFEQVQLQQSGPELKKPGETVKISCKASGYPFTNYGMNWVKQAPGQGLKWMGWINTSTGESTFADDFKGRFDFSLETSANTAYLQINNLKSEDMATYFCARWEVYHGYVPYWGQGTTVTVSSTRASTKGPSVFPLAPSSKSTSGGTAALGCLVKDYFPEPVTVSWNSGALTSGVHTFPAVLQSSGLYSLSSVVTVPSSSLGTQTYICNVNHKPSNTKVDKRVEPKSCIPEDTFFPSPESSCDVKLVEKSFETDTNLNFQNLSVIGFRILLLKVAGFNLLMTLRLWSS

SEQ ID NO: 19402 - protein, 895 aa, Artificial Sequence
  Synthetic Polypeptide
MALPVTALLLPLALLLHAARPEVQLVESGGGLVQPGGSLRLSCAASGFSFSDFWMSWVRQAPGKGLEWVATISQAGSEKDYVDSVKGRFTISRDNAKKSLYLQMNSLRAEDTAVYYCASGVYSFDYRGQGTLVTVSSGTGGGGSGGGGSGGGGSEFDIQLTQSHKFLSTSVGDRVSITCKASQDVYNAVAWYQQKPGQSPKLLIYSASSRYTGVPSRFTGSGSGPDFTFTISSVQAEDLAVYFCQQHFRTPFTFGSGTKLEIKLEIQNPDPAVYQLRDSKSSDKSVCLFTDFDSQTNVSQSKDSDVYITDKCVLDMRSMDFKSNSAVAWSNKSDFACANAFNNSIIPEDTFFPSPESSCDVKLVEKSFETDTNLNFQNLSVIGFRILLLKVAGFNLLMTLRLWSSRAKRSGSGVKQTLNFDLLKLAGDVESNPGPTSMDWIWRILFLVGAATGAHSGPQLQLQESGPGLVKPSETLSLTCTVSGDSISSGDYYWGWIRQPPGKGLEWIGHIYYSGVTYYNPSLKSRVTISVDTSRNQFSLKLSSVTAADTAVYYCTREDSSNWRSRGQGTLVTVSSGSGGGGSGGGGSGGGGSFEQVQLQQSGPELKKPGETVKISCKASGYPFTNYGMNWVKQAPGQGLKWMGWINTSTGESTFADDFKGRFDFSLETSANTAYLQINNLKSEDMATYFCARWEVYHGYVPYWGQGTTVTVSSTREDLKNVFPPEVAVFEPSEAEISHTQKATLVCLATGFYPDHVELSWWVNGKEVHSGVCTDPQPLKEQPALNDSRYCLSSRLRVSATFWQNPRNHFRCQVQFYGLSENDEWTQDRAKPVTQIVSAEAWGRADCGFTSESYQQGVLSATILYEILLGKATLYAVLVSALVLMAMVKRKDSRG

SEQ ID NO: 19403 - protein, 1087 aa, Artificial Sequence
  Synthetic Polypeptide
MALPVTALLLPLALLLHAARPEVQLVESGGGLVQPGGSLRLSCAASGFSFSDFWMSWVRQAPGKGLEWVATISQAGSEKDYVDSVKGRFTISRDNAKKSLYLQMNSLRAEDTAVYYCASGVYSFDYRGQGTLVTVSSGTGGGGSGGGGSGGGGSEFDIQLTQSHKFLSTSVGDRVSITCKASQDVYNAVAWYQQKPGQSPKLLIYSASSRYTGVPSRFTGSGSGPDFTFTISSVQAEDLAVYFCQQHFRTPFTFGSGTKLEIKLEDLKNVFPPEVAVFEPSEAEISHTQKATLVCLATGFYPDHVELSWWVNGKEVHSGVSTDPQPLKEQPALNDSRYCLSSRLRVSATFWQNPRNHFRCQVQFYGLSENDEWTQDRAKPVTQIVSAEAWGRADCGSQSFGLLDPKLCYLLDGILFIYGVILTALFLRVKFSRSADAPAYQQGQNQLYNELNLGRREEYDVLDKRRGRDPEMGGKPQRRKNPQEGLYNELQKDKMAEAYSEIGMKGERRRGKGHDGLYQGLSTATKDTYDALHMQALPPRRAKRSGSGATNFSLLKQAGDVEENPGPTSMDWIWRILFLVGAATGAHSGPQLQLQESGPGLVKPSETLSLTCTVSGDSISSGDYYWGWIRQPPGKGLEWIGHIYYSGVTYYNPSLKSRVTISVDTSRNQFSLKLSSVTAADTAVYYCTREDSSNWRSRGQGTLVTVSSGSGGGGSGGGGSGGGGSFEQVQLQQSGPELKKPGETVKISCKASGYPFTNYGMNWVKQAPGQGLKWMGWINTSTGESTFADDFKGRFDFSLETSANTAYLQINNLKSEDMATYFCARWEVYHGYVPYWGQGTTVTVSSTRIQNPDPAVYQLRDSKSSDKSVCLFTDFDSQTNVSQSKDSDVYITDKTVLDMRSMDFKSNSAVAWSNKSDFACANAFNNSIIPEDTFFPSPESSCGTQSFGLLDPKLCYLLDGILFIYGVILTALFLRVKFSRSADAPAYQQGQNQLYNELNLGRREEYDVLDKRRGRDPEMGGKPQRRKNPQEGLYNELQKDKMAEAYSEIGMKGERRRGKGHDGLYQGLSTATKDTYDALHMQALPPR

SEQ ID NO: 19404 - protein, 917 aa, Artificial Sequence
  Synthetic Polypeptide
MALPVTALLLPLALLLHAARPEVQLVESGGGLVQPGGSLRLSCAASGFSFSDFWMSWVRQAPGKGLEWVATISQAGSEKDYVDSVKGRFTISRDNAKKSLYLQMNSLRAEDTAVYYCASGVYSFDYRGQGTLVTVSSGTGGGGSGGGGSGGGGSEFDIQLTQSHKFLSTSVGDRVSITCKASQDVYNAVAWYQQKPGQSPKLLIYSASSRYTGVPSRFTGSGSGPDFTFTISSVQAEDLAVYFCQQHFRTPFTFGSGTKLEIKLEGQPKANPTVTLFPPSSEELQANKATLVCLISDFYPGAVTVAWKADGSPVKAGVETTKPSKQSNNKYAASSYLSLTPEQWKSHRSYSCQVTHEGSTVEKTVAPTECSPIKTDVITMDPKDNCSKDANDTLLLQLTNTSAYYMYLLLLLKSVVYFAIITCCLLRRTAFCCNGEKSRAKRSGSGATNFSLLKQAGDVEENPGPTSMDWIWRILFLVGAATGAHSGPQLQLQESGPGLVKPSETLSLTCTVSGDSISSGDYYWGWIRQPPGKGLEWIGHIYYSGVTYYNPSLKSRVTISVDTSRNQFSLKLSSVTAADTAVYYCTREDSSNWRSRGQGTLVTVSSGSGGGGSGGGGSGGGGSFEQVQLQQSGPELKKPGETVKISCKASGYPFTNYGMNWVKQAPGQGLKWMGWINTSTGESTFADDFKGRFDFSLETSANTAYLQINNLKSEDMATYFCARWEVYHGYVPYWGQGTTVTVSSTRASTKGPSVFPLAPSSKSTSGGTAALGCLVKDYFPEPVTVSWNSGALTSGVHTFPAVLQSSGLYSLSSVVTVPSSSLGTQTYICNVNHKPSNTKVDKRVEPKSCEVKTDSTDHVKPKETENTKQPSKSCHKPKAIVHTEKVNMMSLTVLGLRMLFAKTVAVNFLLTAKLFFL

SEQ ID NO: 19405 - protein, 898 aa, Artificial Sequence
  Synthetic Polypeptide
MALPVTALLLPLALLLHAARPEVQLVESGGGLVQPGGSLRLSCAASGFSFSDFWMSWVRQAPGKGLEWVATISQAGSEKDYVDSVKGRFTISRDNAKKSLYLQMNSLRAEDTAVYYCASGVYSFDYRGQGTLVTVSSGTGGGGSGGGGSGGGGSEFDIQLTQSHKFLSTSVGDRVSITCKASQDVYNAVAWYQQKPGQSPKLLIYSASSRYTGVPSRFTGSGSGPDFTFTISSVQAEDLAVYFCQQHFRTPFTFGSGTKLEIKLEGQPKANPTVTLFPPSSEELQANKATLVCLISDFYPGAVTVAWKADGSPVKAGVETTKPSKQSNNKYAASSYLSLTPEQWKSHRSYSCQVTHEGSTVEKTVAPTECSGRADCGFTSESYQQGVLSATILYEILLGKATLYAVLVSALVLMAMVKRKDSRGRAKRSGSGVKQTLNFDLLKLAGDVESNPGPTSMDWIWRILFLVGAATGAHSGPQLQLQESGPGLVKPSETLSLTCTVSGDSISSGDYYWGWIRQPPGKGLEWIGHIYYSGVTYYNPSLKSRVTISVDTSRNQFSLKLSSVTAADTAVYYCTREDSSNWRSRGQGTLVTVSSGSGGGGSGGGGSGGGGSFEQVQLQQSGPELKKPGETVKISCKASGYPFTNYGMNWVKQAPGQGLKWMGWINTSTGESTFADDFKGRFDFSLETSANTAYLQINNLKSEDMATYFCARWEVYHGYVPYWGQGTTVTVSSTRASTKGPSVFPLAPSSKSTSGGTAALGCLVKDYFPEPVTVSWNSGALTSGVHTFPAVLQSSGLYSLSSVVTVPSSSLGTQTYICNVNHKPSNTKVDKRVEPKSCIPEDTFFPSPESSCDVKLVEKSFETDTNLNFQNLSVIGFRILLLKVAGFNLLMTLRLWSS

SEQ ID NO: 19406 - protein, 755 aa, Artificial Sequence
  Synthetic Polypeptide
MALPVTALLLPLALLLHAARPEVQVLESGGGLVQPGGSLRLSCAASGFTFSNFAMSWVRQAPGKGLEWVSTISGSAGTTDYADSVKGRFTISRDNSKKTLYLQMNSLRVEDTAVYYCADGRGPFFDYRGQGTLVTVSSGTGGGGSGGGGSGGGGSEFDIQLTQSHKFLSTSVGDRVSITCKASQDVYNAVAWYQQKPGQSPKLLIYSASSRYTGVPSRFTGSGSGPDFTFTISSVQAEDLAVYFCQQHFRTPFTFGSGTKLEIKLEDLKNVFPPEVAVFEPSEAEISHTQKATLVCLATGFYPDHVELSWWVNGKEVHSGVCTDPQPLKEQPALNDSRYCLSSRLRVSATFWQNPRNHFRCQVQFYGLSENDEWTQDRAKPVTQIVSAEAWGRADCGFTSESYQQGVLSATILYEILLGKATLYAVLVSALVLMAMVKRKDSRGRAKRSGSGATNFSLLKQAGDVEENPGPTSMDWIWRILFLVGAATGAHSFEQVQLQQSGPELKKPGETVKISCKASGYPFTNYGMNWVKQAPGQGLKWMGWINTSTGESTFADDFKGRFDFSLETSANTAYLQINNLKSEDMATYFCARWEVYHGYVPYWGQGTTVTVSSTRIQNPDPAVYQLRDSKSSDKSVCLFTDFDSQTNVSQSKDSDVYITDKCVLDMRSMDFKSNSAVAWSNKSDFACANAFNNSIIPEDTFFPSPESSCDVKLVEKSFETDTNLNFQNLSVIGFRILLLKVAGFNLLMTLRLWSS

SEQ ID NO: 19407 - protein, 756 aa, Artificial Sequence
  Synthetic Polypeptide
MALPVTALLLPLALLLHAARPDIQLTQSHKFLSTSVGDRVSITCKASQDVYNAVAWYQQKPGQSPKLLIYSASSRYTGVPSRFTGSGSGPDFTFTISSVQAEDLAVYFCQQHFRTPFTFGSGTKLEIKLEDLKNVFPPEVAVFEPSEAEISHTQKATLVCLATGFYPDHVELSWWVNGKEVHSGVCTDPQPLKEQPALNDSRYCLSSRLRVSATFWQNPRNHFRCQVQFYGLSENDEWTQDRAKPVTQIVSAEAWGRADCGFTSESYQQGVLSATILYEILLGKATLYAVLVSALVLMAMVKRKDSRGRAKRSGSGATNFSLLKQAGDVEENPGPTSMDWIWRILFLVGAATGAHSGPEVQLVESGGGLVQAGGSLRLSCAASGRTFSMGWFRQAPGKEREFVAAITYSGGSPYYADSVKGRFTISRDNAKNTVYLQMNSLKPEDTAVYYCAANPTYGSDWNAENWGQGTQVTVSSGSGGGGSGGGGSGGGGSFEQVQLQQSGPELKKPGETVKISCKASGYPFTNYGMNWVKQAPGQGLKWMGWINTSTGESTFADDFKGRFDFSLETSANTAYLQINNLKSEDMATYFCARWEVYHGYVPYWGQGTTVTVSSTRIQNPDPAVYQLRDSKSSDKSVCLFTDFDSQTNVSQSKDSDVYITDKCVLDMRSMDFKSNSAVAWSNKSDFACANAFNNSIIPEDTFFPSPESSCDVKLVEKSFETDTNLNFQNLSVIGFRILLLKVAGFNLLMTLRLWSS

SEQ ID NO: 19408 - protein, 883 aa, Artificial Sequence
  Synthetic Polypeptide
MALPVTALLLPLALLLHAARPDIQLTQSHKFLSTSVGDRVSITCKASQDVYNAVAWYQQKPGQSPKLLIYSASSRYTGVPSRFTGSGSGPDFTFTISSVQAEDLAVYFCQQHFRTPFTFGSGTKLEIKLEDLKNVFPPEVAVFEPSEAEISHTQKATLVCLATGFYPDHVELSWWVNGKEVHSGVCTDPQPLKEQPALNDSRYCLSSRLRVSATFWQNPRNHFRCQVQFYGLSENDEWTQDRAKPVTQIVSAEAWGRADCGFTSESYQQGVLSATILYEILLGKATLYAVLVSALVLMAMVKRKDSRGRAKRSGSGATNFSLLKQAGDVEENPGPTSMDWIWRILFLVGAATGAHSQLQLQESGPGLVKPSETLSLTCTVSGGSISSGDYYWGWIRQPPGKGLEWIGSISYSGSTYYNPSLKSRVTISVDTSRNQFSLKLSSVTAADTAVYYCTREDSSNWRSRGQGTLVTVSSSGGGGSGGGGSEVQLVESGGGLVQAGGSLRLSCAASGRTFSMGWFRQAPGKEREFVAAITYSGGSPYYADSVKGRFTISRDNAKNTVYLQMNSLKPEDTAVYYCAANPTYGSDWNAENWGQGTQVTVSSGSGGGGSGGGGSGGGGSFEQVQLQQSGPELKKPGETVKISCKASGYPFTNYGMNWVKQAPGQGLKWMGWINTSTGESTFADDFKGRFDFSLETSANTAYLQINNLKSEDMATYFCARWEVYHGYVPYWGQGTTVTVSSTRIQNPDPAVYQLRDSKSSDKSVCLFTDFDSQTNVSQSKDSDVYITDKCVLDMRSMDFKSNSAVAWSNKSDFACANAFNNSIIPEDTFFPSPESSCDVKLVEKSFETDTNLNFQNLSVIGFRILLLKVAGFNLLMTLRLWSS

SEQ ID NO: 19409 - protein, 892 aa, Artificial Sequence
  Synthetic Polypeptide
MALPVTALLLPLALLLHAARPEVQVLESGGGLVQPGGSLRLSCAASGFTFSNFAMSWVRQAPGKGLEWVSTISGSAGTTDYADSVKGRFTISRDNSKKTLYLQMNSLRVEDTAVYYCADGRGPFFDYRGQGTLVTVSSGTGGGGSGGGGSGGGGSEFDIQLTQSHKFLSTSVGDRVSITCKASQDVYNAVAWYQQKPGQSPKLLIYSASSRYTGVPSRFTGSGSGPDFTFTISSVQAEDLAVYFCQQHFRTPFTFGSGTKLEIKLEDLKNVFPPEVAVFEPSEAEISHTQKATLVCLATGFYPDHVELSWWVNGKEVHSGVCTDPQPLKEQPALNDSRYCLSSRLRVSATFWQNPRNHFRCQVQFYGLSENDEWTQDRAKPVTQIVSAEAWGRADCGFTSESYQQGVLSATILYEILLGKATLYAVLVSALVLMAMVKRKDSRGRAKRSGSGATNFSLLKQAGDVEENPGPTSMDWIWRILFLVGAATGAHSGPEVQLVESGGGLVQAGGSLRLSCAASGRTFSMGWFRQAPGKEREFVAAITYSGGSPYYASSVRGRFTISRDNAKNTVYLQMNSLKPEDTAVYYCAANPTYGSDWNAENWGQGTQVTVSSGSGGGGSGGGGSGGGGSFEQVQLQQSGPELKKPGETVKISCKASGYPFTNYGMNWVKQAPGQGLKWMGWINTSTGESTFADDFKGRFDFSLETSANTAYLQINNLKSEDMATYFCARWEVYHGYVPYWGQGTTVTVSSTRIQNPDPAVYQLRDSKSSDKSVCLFTDFDSQTNVSQSKDSDVYITDKCVLDMRSMDFKSNSAVAWSNKSDFACANAFNNSIIPEDTFFPSPESSCDVKLVEKSFETDTNLNFQNLSVIGFRILLLKVAGFNLLMTLRLWSS

SEQ ID NO: 19410 - protein, 722 aa, Artificial Sequence
  Synthetic Polypeptide
MALPVTALLLPLALLLHAARPDIQLTQSPSSLSASVGDRVTITCKASQDVGTSVAWYQQKPGKAPKLLIYWTSTRHTGVPSRFSGSGSGTDFTFTISSLQPEDIATYYCQQYSLYRSFGQGTKVEIKGGGGSGGGGSGGGGSEVQLVESGGGVVQPGRSLRLSCSASGFDFTTYWMSWVRQAPGKGLEWIGEIHPDSSTINYAPSLKDRFTISRDNAKNTLFLQMDSLRPEDTGVYFCASLYFGFPWFAYWGQGTPVTVSSTREQKLISEEDLAKPTTTPAPRPPTPAPTIASQPLSLRPEACRPAAGGAVHTRGLDFACDIYIWAPLAGTCGVLLLSLVITLYCKRGRKKLLYIFKQPFMRPVQTTQEEDGCSCRFPEEEEGGCELRVKFSRSADAPAYQQGQNQLYNELNLGRREEYDVLDKRRGRDPEMGGKPRRKNPQEGLYNELQKDKMAEAYSEIGMKGERRRGKGHDGLYQGLSTATKDTYDALHMQALPPRSSGSGEGRGSLLTCGDVEENPGPHMTEYKPTVRLATRDDVPRAVRTLAAAFADYPATRHTVDPDRHIERVTELQELFLTRVGLDIGKVWVADDGAAVAVWTTPESVEAGAVFAEIGPRMAELSGSRLAAQQQMEGLLAPHRPKEPAWFLATVGVSPDHQGKGLGSAVVLPGVEAAERAGVPAFLETSAPRNLPFYERLGFTVTADVEVPEGPRTWCMTRKPGA

SEQ ID NO: 19411 - protein, 716 aa, Artificial Sequence
  Synthetic Polypeptide
MALPVTALLLPLALLLHAARPDIQLTQSPSSLSASVGDRVTITCKASQDVGTSVAWYQQKPGKAPKLLIYWTSTRHTGVPSRFSGSGSGTDFTFTISSLQPEDIATYYCQQYSLYRSFGQGTKVEIKGGGGSGGGGSGGGGSEVQLVESGGGVVQPGRSLRLSCSASGFDFTTYWMSWVRQAPGKGLEWIGEIHPDSSTINYAPSLKDRFTISRDNAKNTLFLQMDSLRPEDTGVYFCASLYFGFPWFAYWGQGTPVTVSSTREQKLISEEDLKIEVMYPPPYLDNEKSNGTIIHVKGKHLCPSPLFPGPSKPFWVLVVVGGVLACYSLLVTVAFIIFWVRSKRSRLLHSDYMNMTPRRPGPTRKHYQPYAPPRDFAAYRSRVKFSRSADAPAYQQGQNQLYNELNLGRREEYDVLDKRRGRDPEMGGKPRRKNPQEGLYNELQKDKMAEAYSEIGMKGERRRGKGHDGLYQGLSTATKDTYDALHMQALPPRSSGSGEGRGSLLTCGDVEENPGPHMTEYKPTVRLATRDDVPRAVRTLAAAFADYPATRHTVDPDRHIERVTELQELFLTRVGLDIGKVWVADDGAAVAVWTTPESVEAGAVFAEIGPRMAELSGSRLAAQQQMEGLLAPHRPKEPAWFLATVGVSPDHQGKGLGSAVVLPGVEAAERAGVPAFLETSAPRNLPFYERLGFTVTADVEVPEGPRTWCMTRKPGA

SEQ ID NO: 19412 - protein, 493 aa, Artificial Sequence
  Synthetic Polypeptide
MALPVTALLLPLALLLHAARPDIQLTQSPSSLSASVGDRVTITCKASQDVGTSVAWYQQKPGKAPKLLIYWTSTRHTGVPSRFSGSGSGTDFTFTISSLQPEDIATYYCQQYSLYRSFGQGTKVEIKGGGGSGGGGSGGGGSEVQLVESGGGVVQPGRSLRLSCSASGFDFTTYWMSWVRQAPGKGLEWIGEIHPDSSTINYAPSLKDRFTISRDNAKNTLFLQMDSLRPEDTGVYFCASLYFGFPWFAYWGQGTPVTVSSTREQKLISEEDLKIEVMYPPPYLDNEKSNGTIIHVKGKHLCPSPLFPGPSKPFWVLVVVGGVLACYSLLVTVAFIIFWVRSKRSRLLHSDYMNMTPRRPGPTRKHYQPYAPPRDFAAYRSRVKFSRSADAPAYQQGQNQLYNELNLGRREEYDVLDKRRGRDPEMGGKPRRKNPQEGLYNELQKDKMAEAYSEIGMKGERRRGKGHDGLYQGLSTATKDTYDALHMQALPPR

SEQ ID NO: 19413 - protein, 499 aa, Artificial Sequence
  Synthetic Polypeptide
MALPVTALLLPLALLLHAARPDIQLTQSPSSLSASVGDRVTITCKASQDVGTSVAWYQQKPGKAPKLLIYWTSTRHTGVPSRFSGSGSGTDFTFTISSLQPEDIATYYCQQYSLYRSFGQGTKVEIKGGGGSGGGGSGGGGSEVQLVESGGGVVQPGRSLRLSCSASGFDFTTYWMSWVRQAPGKGLEWIGEIHPDSSTINYAPSLKDRFTISRDNAKNTLFLQMDSLRPEDTGVYFCASLYFGFPWFAYWGQGTPVTVSSTREQKLISEEDLAKPTTTPAPRPPTPAPTIASQPLSLRPEACRPAAGGAVHTRGLDFACDIYIWAPLAGTCGVLLLSLVITLYCKRGRKKLLYIFKQPFMRPVQTTQEEDGCSCRFPEEEEGGCELRVKFSRSADAPAYQQGQNQLYNELNLGRREEYDVLDKRRGRDPEMGGKPRRKNPQEGLYNELQKDKMAEAYSEIGMKGERRRGKGHDGLYQGLSTATKDTYDALHMQALPPR

SEQ ID NO: 19414 - protein, 499 aa, Artificial Sequence
  Synthetic Polypeptide
MALPVTALLLPLALLLHAARPEVQLVESGGGVVQPGRSLRLSCSASGFDFTTYWMSWVRQAPGKGLEWIGEIHPDSSTINYAPSLKDRFTISRDNAKNTLFLQMDSLRPEDTGVYFCASLYFGFPWFAYWGQGTPVTVSSGGGGSGGGGSGGGGSDIQLTQSPSSLSASVGDRVTITCKASQDVGTSVAWYQQKPGKAPKLLIYWTSTRHTGVPSRFSGSGSGTDFTFTISSLQPEDIATYYCQQYSLYRSFGQGTKVEIKTREQKLISEEDLAKPTTTPAPRPPTPAPTIASQPLSLRPEACRPAAGGAVHTRGLDFACDIYIWAPLAGTCGVLLLSLVITLYCKRGRKKLLYIFKQPFMRPVQTTQEEDGCSCRFPEEEEGGCELRVKFSRSADAPAYQQGQNQLYNELNLGRREEYDVLDKRRGRDPEMGGKPRRKNPQEGLYNELQKDKMAEAYSEIGMKGERRRGKGHDGLYQGLSTATKDTYDALHMQALPPR

SEQ ID NO: 19415 - protein, 912 aa, Artificial Sequence
  Synthetic Polypeptide
MALPVTALLLPLALLLHAARPDIQLTQSPSSLSASVGDRVTITCKASQDVGTSVAWYQQKPGKAPKLLIYWTSTRHTGVPSRFSGSGSGTDFTFTISSLQPEDIATYYCQQYSLYRSFGQGTKVEIKGGGGSGGGGSGGGGSEVQLVESGGGVVQPGRSLRLSCSASGFDFTTYWMSWVRQAPGKGLEWIGEIHPDSSTINYAPSLKDRFTISRDNAKNTLFLQMDSLRPEDTGVYFCASLYFGFPWFAYWGQGTPVTVSSTREQKLISEEDLAKPTTTPAPRPPTPAPTIASQPLSLRPEACRPAAGGAVHTRGLDFACDIYIWAPLAGTCGVLLLSLVITLYCGRARVKFSRSADAPAYQQGQNQLYNELNLGRREEYDVLDKRRGRDPEMGGKPRRKNPQEGLYNELQKDKMAEAYSEIGMKGERRRGKGHDGLYQGLSTATKDTYDALHMQALPPRSRGSGATNFSLLKQAGDVEENPGPGIHMATYEVLCEVARKLGTDDREVVLFLLNVFIPQPTLAQLIGALRALKEEGRLTFPLLAECLFRAGRRDLLRDLLHLDPRFLERHLAGTMSYFSPYQLTVLHVDGELCARDIRSLIFLSKDTIGSRSTPQTFLHWVYCMENLDLLGPTDVDALMSMLRSLSRVDLQRQVQTLMGLHLSGPSHSQHYRHTPLETDFYDYKDDDDKTSGSGEGRGSLLTCGDVEENPGPHMTEYKPTVRLATRDDVPRAVRTLAAAFADYPATRHTVDPDRHIERVTELQELFLTRVGLDIGKVWVADDGAAVAVWTTPESVEAGAVFAEIGPRMAELSGSRLAAQQQMEGLLAPHRPKEPAWFLATVGVSPDHQGKGLGSAVVLPGVEAAERAGVPAFLETSAPRNLPFYERLGFTVTADVEVPEGPRTWCMTRKPGA

SEQ ID NO: 19416 - protein, 852 aa, Artificial Sequence
  Synthetic Polypeptide
MALPVTALLLPLALLLHAARPDIQLTQSPSSLSASVGDRVTITCKASQDVGTSVAWYQQKPGKAPKLLIYWTSTRHTGVPSRFSGSGSGTDFTFTISSLQPEDIATYYCQQYSLYRSFGQGTKVEIKLEIQNPDPAVYQLRDSKSSDKSVCLFTDFDSQTNVSQSKDSDVYITDKCVLDMRSMDFKSNSAVAWSNKSDFACANAFNNSIIPEDTFFPSSDVPCDVKLVEKSFETDTNLNFQNLSVIGFRILLLKVAGFNLLMTLRLWSSRAKRSGSGVKQTLNFDLLKLAGDVESNPGPTSMDWIWRILFLVGAATGAHSFEEVQLVESGGGVVQPGRSLRLSCSASGFDFTTYWMSWVRQAPGKGLEWIGEIHPDSSTINYAPSLKDRFTISRDNAKNTLFLQMDSLRPEDTGVYFCASLYFGFPWFAYWGQGTPVTVSSTREDLKNVFPPEVAVFEPSKAEIAHTQKATLVCLATGFYPDHVELSWWVNGKEVHSGVCTDPQPLKEQPALNDSRYCLSSRLRVSATFWQNPRNHFRCQVQFYGLSENDEWTQDRAKPVTQIVSAEAWGRADCGITSASYHQGVLSATILYEILLGKATLYAVLVSALVLMAMVKRKDSRGRAKRSGSGATNFSLLKQAGDVEENPGPSRGHMTEYKPTVRLATRDDVPRAVRTLAAAFADYPATRHTVDPDRHIERVTELQELFLTRVGLDIGKVWVADDGAAVAVWTTPESVEAGAVFAEIGPRMAELSGSRLAAQQQMEGLLAPHRPKEPAWFLATVGVSPDHQGKGLGSAVVLPGVEAAERAGVPAFLETSAPRNLPFYERLGFTVTADVEVPEGPRTWCMTRKPGA

SEQ ID NO: 19417 - protein, 851 aa, Artificial Sequence
  Synthetic Polypeptide
MALPVTALLLPLALLLHAARPDIQLTQSPSSLSASVGDRVTITCKASQDVGTSVAWYQQKPGKAPKLLIYWTSTRHTGVPSRFSGSGSGTDFTFTISSLQPEDIATYYCQQYSLYRSFGQGTKVEIKLEDLKNVFPPEVAVFEPSKAEIAHTQKATLVCLATGFYPDHVELSWWVNGKEVHSGVCTDPQPLKEQPALNDSRYCLSSRLRVSATFWQNPRNHFRCQVQFYGLSENDEWTQDRAKPVTQIVSAEAWGRADCGITSASYHQGVLSATILYEILLGKATLYAVLVSALVLMAMVKRKDSRGRAKRSGSGATNFSLLKQAGDVEENPGPTSMDWIWRILFLVGAATGAHSFEEVQLVESGGGVVQPGRSLRLSCSASGFDFTTYWMSWVRQAPGKGLEWIGEIHPDSSTINYAPSLKDRFTISRDNAKNTLFLQMDSLRPEDTGVYFCASLYFGFPWFAYWGQGTPVTVSSTRIQNPDPAVYQLRDSKSSDKSVCLFTDFDSQTNVSQSKDSDVYITDKCVLDMRSMDFKSNSAVAWSNKSDFACANAFNNSIIPEDTFFPSSDVPCDVKLVEKSFETDTNLNFQNLSVIGFRILLLKVAGFNLLMTLRLWSSRAKRSGSGVKQTLNFDLLKLAGDVESNPGPSRGHMTEYKPTVRLATRDDVPRAVRTLAAAFADYPATRHTVDPDRHIERVTELQELFLTRVGLDIGKVWVADDGAAVAVWTTPESVEAGAVFAEIGPRMAELSGSRLAAQQQMEGLLAPHRPKEPAWFLATVGVSPDHQGKGLGSAVVLPGVEAAERAGVPAFLETSAPRNLPFYERLGFTVTADVEVPEGPRTWCMTRKPGA

SEQ ID NO: 19418 - protein, 618 aa, Artificial Sequence
  Synthetic Polypeptide
MALPVTALLLPLALLLHAARPDIQLTQSPSSLSASVGDRVTITCKASQDVGTSVAWYQQKPGKAPKLLIYWTSTRHTGVPSRFSGSGSGTDFTFTISSLQPEDIATYYCQQYSLYRSFGQGTKVEIKLEDLKNVFPPEVAVFEPSEAEISHTQKATLVCLATGFYPDHVELSWWVNGKEVHSGVCTDPQPLKEQPALNDSRYCLSSRLRVSATFWQNPRNHFRCQVQFYGLSENDEWTQDRAKPVTQIVSAEAWGRADCGFTSESYQQGVLSATILYEILLGKATLYAVLVSALVLMAMVKRKDSRGRAKRSGSGATNFSLLKQAGDVEENPGPTSMDWIWRILFLVGAATGAHSFEEVQLVESGGGVVQPGRSLRLSCSASGFDFTTYWMSWVRQAPGKGLEWIGEIHPDSSTINYAPSLKDRFTISRDNAKNTLFLQMDSLRPEDTGVYFCASLYFGFPWFAYWGQGTPVTVSSTRIQNPDPAVYQLRDSKSSDKSVCLFTDFDSQTNVSQSKDSDVYITDKCVLDMRSMDFKSNSAVAWSNKSDFACANAFNNSIIPEDTFFPSPESSCDVKLVEKSFETDTNLNFQNLSVIGFRILLLKVAGFNLLMTLRLWSS

SEQ ID NO: 19419 - protein, 843 aa, Artificial Sequence
  Synthetic Polypeptide
MALPVTALLLPLALLLHAARPDIQLTQSPSSLSASVGDRVTITCKASQDVGTSVAWYQQKPGKAPKLLIYWTSTRHTGVPSRFSGSGSGTDFTFTISSLQPEDIATYYCQQYSLYRSFGQGTKVEIKLEDLKNVFPPEVAVFEPSEAEISHTQKATLVCLATGFYPDHVELSWWVNGKEVHSGVCTDPQPLKEQPALNDSRYCLSSRLRVSATFWQNPRNHFRCQVQFYGLSENDEWTQDRAKPVTQIVSAEAWGRADCGFTSESYQQGVLSATILYEILLGKATLYAVLVSALVLMAMVKRKDSRGRAKRSGSGATNFSLLKQAGDVEENPGPTSMDWIWRILFLVGAATGAHSFEEVQLVESGGGVVQPGRSLRLSCSASGFDFTTYWMSWVRQAPGKGLEWIGEIHPDSSTINYAPSLKDRFTISRDNAKNTLFLQMDSLRPEDTGVYFCASLYFGFPWFAYWGQGTPVTVSSTRIQNPDPAVYQLRDSKSSDKSVCLFTDFDSQTNVSQSKDSDVYITDKCVLDMRSMDFKSNSAVAWSNKSDFACANAFNNSIIPEDTFFPSPESSCDVKLVEKSFETDTNLNFQNLSVIGFRILLLKVAGFNLLMTLRLWSSRAKRSGSGVKQTLNFDLLKLAGDVESNPGPSRGGIHTMATYEVLCEVARKLGTDDREVVLFLLNVFIPQPTLAQLIGALRALKEEGRLTFPLLAECLFRAGRRDLLRDLLHLDPRFLERHLAGTMSYFSPYQLTVLHVDGELCARDIRSLIFLSKDTIGSRSTPQTFLHWVYCMENLDLLGPTDVDALMSMLRSLSRVDLQRQVQTLMGLHLSGPSHSQHYRHTP

SEQ ID NO: 19420 - protein, 622 aa, Artificial Sequence
  Synthetic Polypeptide
MALPVTALLLPLALLLHAARPDIQLTQSPSSLSASVGDRVTITCKASQDVGTSVAWYQQKPGKAPKLLIYWTSTRHTGVPSRFSGSGSGTDFTFTISSLQPEDIATYYCQQYSLYRSFGQGTKVEIKLEIQNPDPAVYQLRDSKSSDKSVCLFTDFDSQTNVSQSKDSDVYITDKCVLDMRSMDFKSNSAVAWSNKSDFACANAFNNSIIPEDTFFPSPESSCDVKLVEKSFETDTNLNFQNLSVIGFRILLLKVAGFNLLMTLRLWSSRAKRSGSGVKQTLNFDLLKLAGDVESNPGPTSMDWIWRILFLVGAATGAHSFEEVQLVESGGGVVQPGRSLRLSCSASGFDFTTYWMSWVRQAPGKGLEWIGEIHPDSSTINYAPSLKDRFTISRDNAKNTLFLQMDSLRPEDTGVYFCASLYFGFPWFAYWGQGTPVTVSSTREDLKNVFPPEVAVFEPSEAEISHTQKATLVCLATGFYPDHVELSWWVNGKEVHSGVCTDPQPLKEQPALNDSRYCLSSRLRVSATFWQNPRNHFRCQVQFYGLSENDEWTQDRAKPVTQIVSAEAWGRADCGFTSESYQQGVLSATILYEILLGKATLYAVLVSALVLMAMVKRKDSRG

SEQ ID NO: 19421 - protein, 844 aa, Artificial Sequence
  Synthetic Polypeptide
MALPVTALLLPLALLLHAARPDIQLTQSPSSLSASVGDRVTITCKASQDVGTSVAWYQQKPGKAPKLLIYWTSTRHTGVPSRFSGSGSGTDFTFTISSLQPEDIATYYCQQYSLYRSFGQGTKVEIKLEIQNPDPAVYQLRDSKSSDKSVCLFTDFDSQTNVSQSKDSDVYITDKCVLDMRSMDFKSNSAVAWSNKSDFACANAFNNSIIPEDTFFPSPESSCDVKLVEKSFETDTNLNFQNLSVIGFRILLLKVAGFNLLMTLRLWSSRAKRSGSGVKQTLNFDLLKLAGDVESNPGPTSMDWIWRILFLVGAATGAHSFEEVQLVESGGGVVQPGRSLRLSCSASGFDFTTYWMSWVRQAPGKGLEWIGEIHPDSSTINYAPSLKDRFTISRDNAKNTLFLQMDSLRPEDTGVYFCASLYFGFPWFAYWGQGTPVTVSSTREDLKNVFPPEVAVFEPSEAEISHTQKATLVCLATGFYPDHVELSWWVNGKEVHSGVCTDPQPLKEQPALNDSRYCLSSRLRVSATFWQNPRNHFRCQVQFYGLSENDEWTQDRAKPVTQIVSAEAWGRADCGFTSESYQQGVLSATILYEILLGKATLYAVLVSALVLMAMVKRKDSRGRAKRSGSGATNFSLLKQAGDVEENPGPSRGGIHTMATYEVLCEVARKLGTDDREVVLFLLNVFIPQPTLAQLIGALRALKEEGRLTFPLLAECLFRAGRRDLLRDLLHLDPRFLERHLAGTMSYFSPYQLTVLHVDGELCARDIRSLIFLSKDTIGSRSTPQTFLHWVYCMENLDLLGPTDVDALMSMLRSLSRVDLQRQVQTLMGLHLSGPSHSQHYRHTP

SEQ ID NO: 19422 - protein, 896 aa, Artificial Sequence
  Synthetic Polypeptide
MALPVTALLLPLALLLHAARPLEGKPIPNPLLGLDSTGSGEDLKNVFPPEVAVFEPSKAEIAHTQKATLVCLATGFYPDHVELSWWVNGKEVHSGVCTDPQPLKEQPALNDSRYCLSSRLRVSATFWQNPRNHFRCQVQFYGLSENDEWTQDRAKPVTQIVSAEAWGRADCGITSASYHQGVLSATILYEILLGKATLYAVLVSALVLMAMVKRKDSRGRAKRSGSGATNFSLLKQAGDVEENPGPTSMALPVTALLLPLALLLHAARPDIQLTQSPSSLSASVGDRVTITCKASQDVGTSVAWYQQKPGKAPKLLIYWTSTRHTGVPSRFSGSGSGTDFTFTISSLQPEDIATYYCQQYSLYRSFGQGTKVEIKGGGGSGGGGSGGGGSEVQLVESGGGVVQPGRSLRLSCSASGFDFTTYWMSWVRQAPGKGLEWIGEIHPDSSTINYAPSLKDRFTISRDNAKNTLFLQMDSLRPEDTGVYFCASLYFGFPWFAYWGQGTPVTVSSTREQKLISEEDGSGIQNPDPAVYQLRDSKSSDKSVCLFTDFDSQTNVSQSKDSDVYITDKCVLDMRSMDFKSNSAVAWSNKSDFACANAFNNSIIPEDTFFPSSDVPCDVKLVEKSFETDTNLNFQNLSVIGFRILLLKVAGFNLLMTLRLWSSRAKRSGSGVKQTLNFDLLKLAGDVESNPGPSRGHMTEYKPTVRLATRDDVPRAVRTLAAAFADYPATRHTVDPDRHIERVTELQELFLTRVGLDIGKVWVADDGAAVAVWTTPESVEAGAVFAEIGPRMAELSGSRLAAQQQMEGLLAPHRPKEPAWFLATVGVSPDHQGKGLGSAVVLPGVEAAERAGVPAFLETSAPRNLPFYERLGFTVTADVEVPEGPRTWCMTRKPGA

SEQ ID NO: 19423 - protein, 897 aa, Artificial Sequence
  Synthetic Polypeptide
MALPVTALLLPLALLLHAARPLEQKLISEEDLGSGDRPDPAVYQLRDSKSSDKSVCLFTDFDSQTNVSQSKDSDVYITDKCVLDMRSMDFKSNSAVAWSNKSDFACANAFNNSIIPEDTFFPSPESSCDVKLVEKSFETDTNLNFQNLSVIGFRILLLKVAGFNLLMTLRLWSSSSRAKRSGSGVKQTLNFDLLKLAGDVESNPGPTSMALPVTALLLPLALLLHAARPDIQLTQSPSSLSASVGDRVTITCKASQDVGTSVAWYQQKPGKAPKLLIYWTSTRHTGVPSRFSGSGSGTDFTFTISSLQPEDIATYYCQQYSLYRSFGQGTKVEIKGGGGSGGGGSGGGGSEVQLVESGGGVVQPGRSLRLSCSASGFDFTTYWMSWVRQAPGKGLEWIGEIHPDSSTINYAPSLKDRFTISRDNAKNTLFLQMDSLRPEDTGVYFCASLYFGFPWFAYWGQGTPVTVSSTRGKPIPNPLLGLDSTGSGEDLKNVFPPEVAVFEPSEAEISHTQKATLVCLATGFYPDHVELSWWVNGKEVHSGVCTDPQPLKEQPALNDSRYCLSSRLRVSATFWQNPRNHFRCQVQFYGLSENDEWTQDRAKPVTQIVSAEAWGRADCGFTSESYQQGVLSATILYEILLGKATLYAVLVSALVLMAMVKRKDSRGRAKRSGSGATNFSLLKQAGDVEENPGPSRGHMTEYKPTVRLATRDDVPRAVRTLAAAFADYPATRHTVDPDRHIERVTELQELFLTRVGLDIGKVWVADDGAAVAVWTTPESVEAGAVFAEIGPRMAELSGSRLAAQQQMEGLLAPHRPKEPAWFLATVGVSPDHQGKGLGSAVVLPGVEAAERAGVPAFLETSAPRNLPFYERLGFTVTADVEVPEGPRTWCMTRKPGA

SEQ ID NO: 19424 - protein, 851 aa, Artificial Sequence
  Synthetic Polypeptide
MALPVTALLLPLALLLHAARPDIQLTQSPSSLSASVGDRVTITCKASQDVGTSVAWYQQKPGKAPKLLIYWTSTRHTGVPSRFSGSGSGTDFTFTISSLQPEDIATYYCQQYSLYRSFGQGTKVEIKLEDLKNVFPPEVAVFEPSEAEISHTQKATLVCLATGFYPDHVELSWWVNGKEVHSGVSTDPQPLKEQPALNDSRYCLSSRLRVSATFWQNPRNHFRCQVQFYGLSENDEWTQDRAKPVTQIVSAEAWGRADCGFTSESYQQGVLSATILYEILLGKATLYAVLVSALVLMAMVKRKDSRGRAKRSGSGATNFSLLKQAGDVEENPGPTSMDWIWRILFLVGAATGAHSFEEVQLVESGGGVVQPGRSLRLSCSASGFDFTTYWMSWVRQAPGKGLEWIGEIHPDSSTINYAPSLKDRFTISRDNAKNTLFLQMDSLRPEDTGVYFCASLYFGFPWFAYWGQGTPVTVSSTRIQNPDPAVYQLRDSKSSDKSVCLFTDFDSQTNVSQSKDSDVYITDKTVLDMRSMDFKSNSAVAWSNKSDFACANAFNNSIIPEDTFFPSPESSCDVKLVEKSFETDTNLNFQNLSVIGFRILLLKVAGFNLLMTLRLWSSRAKRSGSGVKQTLNFDLLKLAGDVESNPGPSRGHMTEYKPTVRLATRDDVPRAVRTLAAAFADYPATRHTVDPDRHIERVTELQELFLTRVGLDIGKVWVADDGAAVAVWTTPESVEAGAVFAEIGPRMAELSGSRLAAQQQMEGLLAPHRPKEPAWFLATVGVSPDHQGKGLGSAVVLPGVEAAERAGVPAFLETSAPRNLPFYERLGFTVTADVEVPEGPRTWCMTRKPGA

SEQ ID NO: 19425 - protein, 933 aa, Artificial Sequence
  Synthetic Polypeptide
MALPVTALLLPLALLLHAARPDIQLTQSPSSLSASVGDRVTITCKASQDVGTSVAWYQQKPGKAPKLLIYWTSTRHTGVPSRFSGSGSGTDFTFTISSLQPEDIATYYCQQYSLYRSFGQGTKVEIKLEDLKNVFPPEVAVFEPSEAEISHTQKATLVCLATGFYPDHVELSWWVNGKEVHSGVSTDPQPLKEQPALNDSRYCLSSRLRVSATFWQNPRNHFRCQVQFYGLSENDEWTQDRAKPVTQIVSAEAWGRADCGFTSESYQQGVLSATILYEILLGKATLYAVLVSALVLMAMVKRKDSRGRAKRSGSGATNFSLLKQAGDVEENPGPTSMDWIWRILFLVGAATGAHSFEEVQLVESGGGVVQPGRSLRLSCSASGFDFTTYWMSWVRQAPGKGLEWIGEIHPDSSTINYAPSLKDRFTISRDNAKNTLFLQMDSLRPEDTGVYFCASLYFGFPWFAYWGQGTPVTVSSTREQKLISEEDGSGTPFPSLAPPIMLLVDGKQQMVVVCLVLDVAPPGLDSPIWFSAGNGSALDAFTYGPSPATDGTWTNLAHLSLPSEELASWEPLVCHTGPGAEGHSRSTQPMHLSGEASTARTCPQEPLRGTPGGALWLGVLRLLLFKLLLFDLLLTCSCLCDPAGPLPSPATTTRLRALGSHRLHPATETGGREATSSPRPQPRDRRWGDTPPGRKPGSPVRAKRSGSGVKQTLNFDLLKLAGDVESNPGPSRGHMTEYKPTVRLATRDDVPRAVRTLAAAFADYPATRHTVDPDRHIERVTELQELFLTRVGLDIGKVWVADDGAAVAVWTTPESVEAGAVFAEIGPRMAELSGSRLAAQQQMEGLLAPHRPKEPAWFLATVGVSPDHQGKGLGSAVVLPGVEAAERAGVPAFLETSAPRNLPFYERLGFTVTADVEVPEGPRTWCMTRKPGA

SEQ ID NO: 19426 - protein, 951 aa, Artificial Sequence
  Synthetic Polypeptide
MALPVTALLLPLALLLHAARPLEDLKNVFPPEVAVFEPSEAEISHTQKATLVCLATGFYPDHVELSWWVNGKEVHSGVSTDPQPLKEQPALNDSRYCLSSRLRVSATFWQNPRNHFRCQVQFYGLSENDEWTQDRAKPVTQIVSAEAWGRADCGFTSESYQQGVLSATILYEILLGKATLYAVLVSALVLMAMVKRKDSRGRAKRSGSGATNFSLLKQAGDVEENPGPTSMALPVTALLLPLALLLHAARPDIQLTQSPSSLSASVGDRVTITCKASQDVGTSVAWYQQKPGKAPKLLIYWTSTRHTGVPSRFSGSGSGTDFTFTISSLQPEDIATYYCQQYSLYRSFGQGTKVEIKGGGGSGGGGSGGGGSEVQLVESGGGVVQPGRSLRLSCSASGFDFTTYWMSWVRQAPGKGLEWIGEIHPDSSTINYAPSLKDRFTISRDNAKNTLFLQMDSLRPEDTGVYFCASLYFGFPWFAYWGQGTPVTVSSTREQKLISEEDLGSGTPFPSLAPPIMLLVDGKQQMVVVCLVLDVAPPGLDSPIWFSAGNGSALDAFTYGPSPATDGTWTNLAHLSLPSEELASWEPLVCHTGPGAEGHSRSTQPMHLSGEASTARTCPQEPLRGTPGGALWLGVLRLLLFKLLLFDLLLTCSCLCDPAGPLPSPATTTRLRALGSHRLHPATETGGREATSSPRPQPRDRRWGDTPPGRKPGSPVRAKRSGSGVKQTLNFDLLKLAGDVESNPGPSRSRGHMTEYKPTVRLATRDDVPRAVRTLAAAFADYPATRHTVDPDRHIERVTELQELFLTRVGLDIGKVWVADDGAAVAVWTTPESVEAGAVFAEIGPRMAELSGSRLAAQQQMEGLLAPHRPKEPAWFLATVGVSPDHQGKGLGSAVVLPGVEAAERAGVPAFLETSAPRNLPFYERLGFTVTADVEVPEGPRTWCMTRKPGA

SEQ ID NO: 19427 - protein, 888 aa, Artificial Sequence
  Synthetic Polypeptide
MALPVTALLLPLALLLHAARPDIQLTQSPSSLSASVGDRVTITCKASQDVGTSVAWYQQKPGKAPKLLIYWTSTRHTGVPSRFSGSGSGTDFTFTISSLQPEDIATYYCQQYSLYRSFGQGTKVEIKLEGKPIPNPLLGLDSTGSGDKQLDADVSPKPTIFLPSIAETKLQKAGTYLCLLEKFFPDVIKIHWQEKKSNTILGSQEGNTMKTNDTYMKFSWLTVPEKSLDKEHRCIVRHENNKNGVDQEIIFPPIKTDVITMDPKDNCSKDANDTLLLQLTNTSAYYMYLLLLLKSVVYFAIITCCLLRRTAFCCNGEKSRAKRSGSGATNFSLLKQAGDVEENPGPTSMDWIWRILFLVGAATGAHSFEEVQLVESGGGVVQPGRSLRLSCSASGFDFTTYWMSWVRQAPGKGLEWIGEIHPDSSTINYAPSLKDRFTISRDNAKNTLFLQMDSLRPEDTGVYFCASLYFGFPWFAYWGQGTPVTVSSTREQKLISEEDGSGSQPHTKPSVFVMKNGTNVACLVKEFYPKDIRINLVSSKKITEFDPAIVISPSGKYNAVKLGKYEDSNSVTCSVQHDNKTVHSTDFEVKTDSTDHVKPKETENTKQPSKSCHKPKAIVHTEKVNMMSLTVLGLRMLFAKTVAVNFLLTAKLFFLRAKRSGSGVKQTLNFDLLKLAGDVESNPGPSRGHMTEYKPTVRLATRDDVPRAVRTLAAAFADYPATRHTVDPDRHIERVTELQELFLTRVGLDIGKVWVADDGAAVAVWTTPESVEAGAVFAEIGPRMAELSGSRLAAQQQMEGLLAPHRPKEPAWFLATVGVSPDHQGKGLGSAVVLPGVEAAERAGVPAFLETSAPRNLPFYERLGFTVTADVEVPEGPRTWCMTRKPGA

SEQ ID NO: 19428 - protein, 626 aa, Artificial Sequence
  Synthetic Polypeptide
MALPVTALLLPLALLLHAARPDIQLTQSPSSLSASVGDRVTITCKASQDVGTSVAWYQQKPGKAPKLLIYWTSTRHTGVPSRFSGSGSGTDFTFTISSLQPEDIATYYCQQYSLYRSFGQGTKVEIKLESQPHTKPSVFVMKNGTNVACLVKEFYPKDIRINLVSSKKITEFDPAIVISPSGKYNAVKLGKYEDSNSVTCSVQHDNKTVHSTDFEVKTDSTDHVKPKETENTKQPSKSCHKPKAIVHTEKVNMMSLTVLGLRMLFAKTVAVNFLLTAKLFFLRAKRSGSGATNFSLLKQAGDVEENPGPTSMDWIWRILFLVGAATGAHSFEEVQLVESGGGVVQPGRSLRLSCSASGFDFTTYWMSWVRQAPGKGLEWIGEIHPDSSTINYAPSLKDRFTISRDNAKNTLFLQMDSLRPEDTGVYFCASLYFGFPWFAYWGQGTPVTVSSTRDKQLDADVSPKPTIFLPSIAETKLQKAGTYLCLLEKFFPDVIKIHWQEKKSNTILGSQEGNTMKTNDTYMKFSWLTVPEKSLDKEHRCIVRHENNKNGVDQEIIFPPIKTDVITMDPKDNCSKDANDTLLLQLTNTSAYYMYLLLLLKSVVYFAIITCCLLRRTAFCCNGEKS

SEQ ID NO: 19429 - protein, 903 aa, Artificial Sequence
  Synthetic Polypeptide
MALPVTALLLPLALLLHAARPLEGKPIPNPLLGLDSTGSGDKQLDADVSPKPTIFLPSIAETKLQKAGTYLCLLEKFFPDVIKIHWQEKKSNTILGSQEGNTMKTNDTYMKFSWLTVPEKSLDKEHRCIVRHENNKNGVDQEIIFPPIKTDVITMDPKDNCSKDANDTLLLQLTNTSAYYMYLLLLLKSVVYFAIITCCLLRRTAFCCNGEKSRAKRSGSGATNFSLLKQAGDVEENPGPTSMALPVTALLLPLALLLHAARPDIQLTQSPSSLSASVGDRVTITCKASQDVGTSVAWYQQKPGKAPKLLIYWTSTRHTGVPSRFSGSGSGTDFTFTISSLQPEDIATYYCQQYSLYRSFGQGTKVEIKGGGGSGGGGSGGGGSEVQLVESGGGVVQPGRSLRLSCSASGFDFTTYWMSWVRQAPGKGLEWIGEIHPDSSTINYAPSLKDRFTISRDNAKNTLFLQMDSLRPEDTGVYFCASLYFGFPWFAYWGQGTPVTVSSTREQKLISEEDGSGSQPHTKPSVFVMKNGTNVACLVKEFYPKDIRINLVSSKKITEFDPAIVISPSGKYNAVKLGKYEDSNSVTCSVQHDNKTVHSTDFEVKTDSTDHVKPKETENTKQPSKSCHKPKAIVHTEKVNMMSLTVLGLRMLFAKTVAVNFLLTAKLFFLRAKRSGSGVKQTLNFDLLKLAGDVESNPGPSRGHMTEYKPTVRLATRDDVPRAVRTLAAAFADYPATRHTVDPDRHIERVTELQELFLTRVGLDIGKVWVADDGAAVAVWTTPESVEAGAVFAEIGPRMAELSGSRLAAQQQMEGLLAPHRPKEPAWFLATVGVSPDHQGKGLGSAVVLPGVEAAERAGVPAFLETSAPRNLPFYERLGFTVTADVEVPEGPRTWCMTRKPGA

SEQ ID NO: 19430 - protein, 1028 aa, Artificial Sequence
  Synthetic Polypeptide
MALPVTALLLPLALLLHAARPDIQLTQSPSSLSASVGDRVTITCKASQDVGTSVAWYQQKPGKAPKLLIYWTSTRHTGVPSRFSGSGSGTDFTFTISSLQPEDIATYYCQQYSLYRSFGQGTKVEIKGQPKANPTVTLFPPSSEELQANKATLVCLISDFYPGAVTVAWKADGSPVKAGVETTKPSKQSNNKYAASSYLSLTPEQWKSHRSYSCQVTHEGSTVEKTVAPTECSGSQSFGLLDPKLCYLLDGILFIYGVILTALFLRVKFSRSADAPAYQQGQNQLYNELNLGRREEYDVLDKRRGRDPEMGGKPQRRKNPQEGLYNELQKDKMAEAYSEIGMKGERRRGKGHDGLYQGLSTATKDTYDALHMQALPPRRAKRSGSGATNFSLLKQAGDVEENPGPTSMDWIWRILFLVGAATGAHSFEEVQLVESGGGVVQPGRSLRLSCSASGFDFTTYWMSWVRQAPGKGLEWIGEIHPDSSTINYAPSLKDRFTISRDNAKNTLFLQMDSLRPEDTGVYFCASLYFGFPWFAYWGQGTPVTVSSASTKGPSVFPLAPSSKSTSGGTAALGCLVKDYFPEPVTVSWNSGALTSGVHTFPAVLQSSGLYSLSSVVTVPSSSLGTQTYICNVNHKPSNTKVDKRVEPKSCGTQSFGLLDPKLCYLLDGILFIYGVILTALFLRVKFSRSADAPAYQQGQNQLYNELNLGRREEYDVLDKRRGRDPEMGGKPQRRKNPQEGLYNELQKDKMAEAYSEIGMKGERRRGKGHDGLYQGLSTATKDTYDALHMQALPPRRAKRSGSGVKQTLNFDLLKLAGDVESNPGPSRGHMTEYKPTVRLATRDDVPRAVRTLAAAFADYPATRHTVDPDRHIERVTELQELFLTRVGLDIGKVWVADDGAAVAVWTTPESVEAGAVFAEIGPRMAELSGSRLAAQQQMEGLLAPHRPKEPAWFLATVGVSPDHQGKGLGSAVVLPGVEAAERAGVPAFLETSAPRNLPFYERLGFTVTADVEVPEGPRTWCMTRKPGA

SEQ ID NO: 19431 - protein, 814 aa, Artificial Sequence
  Synthetic Polypeptide
MALPVTALLLPLALLLHAARPDIQLTQSPSSLSASVGDRVTITCKASQDVGTSVAWYQQKPGKAPKLLIYWTSTRHTGVPSRFSGSGSGTDFTFTISSLQPEDIATYYCQQYSLYRSFGQGTKVEIKLEDLKNVFPPEVAVFEPSEAEISHTQKATLVCLATGFYPDHVELSWWVNGKEVHSGVSTDPQPLKEQPALNDSRYCLSSRLRVSATFWQNPRNHFRCQVQFYGLSENDEWTQDRAKPVTQIVSAEAWGRADCGSQSFGLLDPKLCYLLDGILFIYGVILTALFLRVKFSRSADAPAYQQGQNQLYNELNLGRREEYDVLDKRRGRDPEMGGKPQRRKNPQEGLYNELQKDKMAEAYSEIGMKGERRRGKGHDGLYQGLSTATKDTYDALHMQALPPRRAKRSGSGATNFSLLKQAGDVEENPGPTSMDWIWRILFLVGAATGAHSFEEVQLVESGGGVVQPGRSLRLSCSASGFDFTTYWMSWVRQAPGKGLEWIGEIHPDSSTINYAPSLKDRFTISRDNAKNTLFLQMDSLRPEDTGVYFCASLYFGFPWFAYWGQGTPVTVSSTRIQNPDPAVYQLRDSKSSDKSVCLFTDFDSQTNVSQSKDSDVYITDKTVLDMRSMDFKSNSAVAWSNKSDFACANAFNNSIIPEDTFFPSPESSCGTQSFGLLDPKLCYLLDGILFIYGVILTALFLRVKFSRSADAPAYQQGQNQLYNELNLGRREEYDVLDKRRGRDPEMGGKPQRRKNPQEGLYNELQKDKMAEAYSEIGMKGERRRGKGHDGLYQGLSTATKDTYDALHMQALPPR

SEQ ID NO: 19432 - protein, 814 aa, Artificial Sequence
  Synthetic Polypeptide
MALPVTALLLPLALLLHAARPDIQLTQSPSSLSASVGDRVTITCKASQDVGTSVAWYQQKPGKAPKLLIYWTSTRHTGVPSRFSGSGSGTDFTFTISSLQPEDIATYYCQQYSLYRSFGQGTKVEIKLEDLKNVFPPEVAVFEPSKAEIAHTQKATLVCLATGFYPDHVELSWWVNGKEVHSGVCTDPQPLKEQPALNDSRYCLSSRLRVSATFWQNPRNHFRCQVQFYGLSENDEWTQDRAKPVTQIVSAEAWGRADCGSQSFGLLDPKLCYLLDGILFIYGVILTALFLRVKFSRSADAPAYQQGQNQLYNELNLGRREEYDVLDKRRGRDPEMGGKPQRRKNPQEGLYNELQKDKMAEAYSEIGMKGERRRGKGHDGLYQGLSTATKDTYDALHMQALPPRRAKRSGSGATNFSLLKQAGDVEENPGPTSMDWIWRILFLVGAATGAHSFEEVQLVESGGGVVQPGRSLRLSCSASGFDFTTYWMSWVRQAPGKGLEWIGEIHPDSSTINYAPSLKDRFTISRDNAKNTLFLQMDSLRPEDTGVYFCASLYFGFPWFAYWGQGTPVTVSSTRIQNPDPAVYQLRDSKSSDKSVCLFTDFDSQTNVSQSKDSDVYITDKCVLDMRSMDFKSNSAVAWSNKSDFACANAFNNSIIPEDTFFPSSDVPCGTQSFGLLDPKLCYLLDGILFIYGVILTALFLRVKFSRSADAPAYQQGQNQLYNELNLGRREEYDVLDKRRGRDPEMGGKPQRRKNPQEGLYNELQKDKMAEAYSEIGMKGERRRGKGHDGLYQGLSTATKDTYDALHMQALPPR

SEQ ID NO: 19433 - protein, 885 aa, Artificial Sequence
  Synthetic Polypeptide
MALPVTALLLPLALLLHAARPDIQLTQSPSSLSASVGDRVTITCKASQDVGTSVAWYQQKPGKAPKLLIYWTSTRHTGVPSRFSGSGSGTDFTFTISSLQPEDIATYYCQQYSLYRSFGQGTKVEIKLEGKPIPNPLLGLDSTGSGEDLKNVFPPEVAVFEPSEAEISHTQKATLVCLATGFYPDHVELSWWVNGKEVHSGVSTDPQPLKEQPALNDSRYCLSSRLRVSATFWQNPRNHFRCQVQFYGLSENDEWTQDRAKPVTQIVSAEAWGRADCGSQSFGLLDPKLCYLLDGILFIYGVILTALFLRVKFSRSADAPAYQQGQNQLYNELNLGRREEYDVLDKRRGRDPEMGGKPQRRKNPQEGLYNELQKDKMAEAYSEIGMKGERRRGKGHDGLYQGLSTATKDTYDALHMQALPPRRAKRSGSGATNFSLLKQAGDVEENPGPTSMDWIWRILFLVGAATGAHSFEEVQLVESGGGVVQPGRSLRLSCSASGFDFTTYWMSWVRQAPGKGLEWIGEIHPDSSTINYAPSLKDRFTISRDNAKNTLFLQMDSLRPEDTGVYFCASLYFGFPWFAYWGQGTPVTVSSTREQKLISEEDGSGIQNPDPAVYQLRDSKSSDKSVCLFTDFDSQTNVSQSKDSDVYITDKTVLDMRSMDFKSNSAVAWSNKSDFACANAFNNSIIPEDTFFPSPESSCGTQSFGLLDPKLCYLLDGILFIYGVILTALFLRSKRSRLLHSDYMNMTPRRPGPTRKHYQPYAPPRDFAAYRSRVKFSRSADAPAYQQGQNQLYNELNLGRREEYDVLDKRRGRDPEMGGKPQRRKNPQEGLYNELQKDKMAEAYSEIGMKGERRRGKGHDGLYQGLSTATKDTYDALHMQALPPR

SEQ ID NO: 19434 - protein, 926 aa, Artificial Sequence
  Synthetic Polypeptide
MALPVTALLLPLALLLHAARPDIQLTQSPSSLSASVGDRVTITCKASQDVGTSVAWYQQKPGKAPKLLIYWTSTRHTGVPSRFSGSGSGTDFTFTISSLQPEDIATYYCQQYSLYRSFGQGTKVEIKLEGKPIPNPLLGLDSTGSGEDLKNVFPPEVAVFEPSEAEISHTQKATLVCLATGFYPDHVELSWWVNGKEVHSGVSTDPQPLKEQPALNDSRYCLSSRLRVSATFWQNPRNHFRCQVQFYGLSENDEWTQDRAKPVTQIVSAEAWGRADCGSQSFGLLDPKLCYLLDGILFIYGVILTALFLRSKRSRLLHSDYMNMTPRRPGPTRKHYQPYAPPRDFAAYRSRVKFSRSADAPAYQQGQNQLYNELNLGRREEYDVLDKRRGRDPEMGGKPQRRKNPQEGLYNELQKDKMAEAYSEIGMKGERRRGKGHDGLYQGLSTATKDTYDALHMQALPPRRAKRSGSGATNFSLLKQAGDVEENPGPTSMDWIWRILFLVGAATGAHSFEEVQLVESGGGVVQPGRSLRLSCSASGFDFTTYWMSWVRQAPGKGLEWIGEIHPDSSTINYAPSLKDRFTISRDNAKNTLFLQMDSLRPEDTGVYFCASLYFGFPWFAYWGQGTPVTVSSTREQKLISEEDGSGIQNPDPAVYQLRDSKSSDKSVCLFTDFDSQTNVSQSKDSDVYITDKTVLDMRSMDFKSNSAVAWSNKSDFACANAFNNSIIPEDTFFPSPESSCGTQSFGLLDPKLCYLLDGILFIYGVILTALFLRSKRSRLLHSDYMNMTPRRPGPTRKHYQPYAPPRDFAAYRSRVKFSRSADAPAYQQGQNQLYNELNLGRREEYDVLDKRRGRDPEMGGKPQRRKNPQEGLYNELQKDKMAEAYSEIGMKGERRRGKGHDGLYQGLSTATKDTYDALHMQALPPR

SEQ ID NO: 19435 - protein, 887 aa, Artificial Sequence
  Synthetic Polypeptide
MALPVTALLLPLALLLHAARPDIQLTQSPSSLSASVGDRVTITCKASQDVGTSVAWYQQKPGKAPKLLIYWTSTRHTGVPSRFSGSGSGTDFTFTISSLQPEDIATYYCQQYSLYRSFGQGTKVEIKLEGKPIPNPLLGLDSTGSGEDLKNVFPPEVAVFEPSEAEISHTQKATLVCLATGFYPDHVELSWWVNGKEVHSGVSTDPQPLKEQPALNDSRYCLSSRLRVSATFWQNPRNHFRCQVQFYGLSENDEWTQDRAKPVTQIVSAEAWGRADCGSQSFGLLDPKLCYLLDGILFIYGVILTALFLRVKFSRSADAPAYQQGQNQLYNELNLGRREEYDVLDKRRGRDPEMGGKPQRRKNPQEGLYNELQKDKMAEAYSEIGMKGERRRGKGHDGLYQGLSTATKDTYDALHMQALPPRRAKRSGSGATNFSLLKQAGDVEENPGPTSMDWIWRILFLVGAATGAHSFEEVQLVESGGGVVQPGRSLRLSCSASGFDFTTYWMSWVRQAPGKGLEWIGEIHPDSSTINYAPSLKDRFTISRDNAKNTLFLQMDSLRPEDTGVYFCASLYFGFPWFAYWGQGTPVTVSSTREQKLISEEDLGSGIQNPDPAVYQLRDSKSSDKSVCLFTDFDSQTNVSQSKDSDVYITDKTVLDMRSMDFKSNSAVAWSNKSDFACANAFNNSIIPEDTFFPSPESSCGTQSFGLLDPKLCYLLDGILFIYGVILTALFLKRGRKKLLYIFKQPFMRPVQTTQEEDGCSCRFPEEEEGGCELRVKFSRSADAPAYQQGQNQLYNELNLGRREEYDVLDKRRGRDPEMGGKPQRRKNPQEGLYNELQKDKMAEAYSEIGMKGERRRGKGHDGLYQGLSTATKDTYDALHMQALPPR

SEQ ID NO: 19436 - protein, 929 aa, Artificial Sequence
  Synthetic Polypeptide
MALPVTALLLPLALLLHAARPDIQLTQSPSSLSASVGDRVTITCKASQDVGTSVAWYQQKPGKAPKLLIYWTSTRHTGVPSRFSGSGSGTDFTFTISSLQPEDIATYYCQQYSLYRSFGQGTKVEIKLEGKPIPNPLLGLDSTGSGEDLKNVFPPEVAVFEPSEAEISHTQKATLVCLATGFYPDHVELSWWVNGKEVHSGVSTDPQPLKEQPALNDSRYCLSSRLRVSATFWQNPRNHFRCQVQFYGLSENDEWTQDRAKPVTQIVSAEAWGRADCGSQSFGLLDPKLCYLLDGILFIYGVILTALFLKRGRKKLLYIFKQPFMRPVQTTQEEDGCSCRFPEEEEGGCELRVKFSRSADAPAYQQGQNQLYNELNLGRREEYDVLDKRRGRDPEMGGKPQRRKNPQEGLYNELQKDKMAEAYSEIGMKGERRRGKGHDGLYQGLSTATKDTYDALHMQALPPRRAKRSGSGATNFSLLKQAGDVEENPGPTSMDWIWRILFLVGAATGAHSFEEVQLVESGGGVVQPGRSLRLSCSASGFDFTTYWMSWVRQAPGKGLEWIGEIHPDSSTINYAPSLKDRFTISRDNAKNTLFLQMDSLRPEDTGVYFCASLYFGFPWFAYWGQGTPVTVSSTREQKLISEEDLGSGIQNPDPAVYQLRDSKSSDKSVCLFTDFDSQTNVSQSKDSDVYITDKTVLDMRSMDFKSNSAVAWSNKSDFACANAFNNSIIPEDTFFPSPESSCGTQSFGLLDPKLCYLLDGILFIYGVILTALFLKRGRKKLLYIFKQPFMRPVQTTQEEDGCSCRFPEEEEGGCELRVKFSRSADAPAYQQGQNQLYNELNLGRREEYDVLDKRRGRDPEMGGKPQRRKNPQEGLYNELQKDKMAEAYSEIGMKGERRRGKGHDGLYQGLSTATKDTYDALHMQALPPR

SEQ ID NO: 19437 - protein, 819 aa, Artificial Sequence
  Synthetic Polypeptide
MALPVTALLLPLALLLHAARPDIQLTQSPSSLSASVGDRVTITCKASQDVGTSVAWYQQKPGKAPKLLIYWTSTRHTGVPSRFSGSGSGTDFTFTISSLQPEDIATYYCQQYSLYRSFGQGTKVEIKLEQSFGLLDPKLCYLLDGILFIYGVILTALFLRVKFSRSADAPAYQQGQNQLYNELNLGRREEYDVLDKRRGRDPEMGGKPQRRKNPQEGLYNELQKDKMAEAYSEIGMKGERRRGKGHDGLYQGLSTATKDTYDALHMQALPPRRAKRSGSGATNFSLLKQAGDVEENPGPTSMDWIWRILFLVGAATGAHSFEEVQLVESGGGVVQPGRSLRLSCSASGFDFTTYWMSWVRQAPGKGLEWIGEIHPDSSTINYAPSLKDRFTISRDNAKNTLFLQMDSLRPEDTGVYFCASLYFGFPWFAYWGQGTPVTVSSTRQSFGLLDPKLCYLLDGILFIYGVILTALFLRVKFSRSADAPAYQQGQNQLYNELNLGRREEYDVLDKRRGRDPEMGGKPQRRKNPQEGLYNELQKDKMAEAYSEIGMKGERRRGKGHDGLYQGLSTATKDTYDALHMQALPPRRAKRSGSGVKQTLNFDLLKLAGDVESNPGPSRGHMTEYKPTVRLATRDDVPRAVRTLAAAFADYPATRHTVDPDRHIERVTELQELFLTRVGLDIGKVWVADDGAAVAVWTTPESVEAGAVFAEIGPRMAELSGSRLAAQQQMEGLLAPHRPKEPAWFLATVGVSPDHQGKGLGSAVVLPGVEAAERAGVPAFLETSAPRNLPFYERLGFTVTADVEVPEGPRTWCMTRKPGA

SEQ ID NO: 19438 - protein, 644 aa, Artificial Sequence
  Synthetic Polypeptide
MALPVTALLLPLALLLHAARPDIQLTQSPSSLSASVGDRVTITCKASQDVGTSVAWYQQKPGKAPKLLIYWTSTRHTGVPSRFSGSGSGTDFTFTISSLQPEDIATYYCQQYSLYRSFGQGTKVEIKLEGQPKANPTVTLFPPSSEELQANKATLVCLISDFYPGAVTVAWKADGSPVKAGVETTKPSKQSNNKYAASSYLSLTPEQWKSHRSYSCQVTHEGSTVEKTVAPTECSPIKTDVITMDPKDNCSKDANDTLLLQLTNTSAYYMYLLLLLKSVVYFAIITCCLLRRTAFCCNGEKSRAKRSGSGATNFSLLKQAGDVEENPGPTSMDWIWRILFLVGAATGAHSFEEVQLVESGGGVVQPGRSLRLSCSASGFDFTTYWMSWVRQAPGKGLEWIGEIHPDSSTINYAPSLKDRFTISRDNAKNTLFLQMDSLRPEDTGVYFCASLYFGFPWFAYWGQGTPVTVSSTRASTKGPSVFPLAPSSKSTSGGTAALGCLVKDYFPEPVTVSWNSGALTSGVHTFPAVLQSSGLYSLSSVVTVPSSSLGTQTYICNVNHKPSNTKVDKRVEPKSCEVKTDSTDHVKPKETENTKQPSKSCHKPKAIVHTEKVNMMSLTVLGLRMLFAKTVAVNFLLTAKLFFL

SEQ ID NO: 19439 - protein, 622 aa, Artificial Sequence
  Synthetic Polypeptide
MALPVTALLLPLALLLHAARPDIQLTQSPSSLSASVGDRVTITCKASQDVGTSVAWYQQKPGKAPKLLIYWTSTRHTGVPSRFSGSGSGTDFTFTISSLQPEDIATYYCQQYSLYRSFGQGTKVEIKLEGQPKANPTVTLFPPSSEELQANKATLVCLISDFYPGAVTVAWKADGSPVKAGVETTKPSKQSNNKYAASSYLSLTPEQWKSHRSYSCQVTHEGSTVEKTVAPTECSGRADCGITSASYHQGVLSATILYEILLGKATLYAVLVSALVLMAMVKRKDSRGRAKRSGSGATNFSLLKQAGDVEENPGPTSMDWIWRILFLVGAATGAHSFEEVQLVESGGGVVQPGRSLRLSCSASGFDFTTYWMSWVRQAPGKGLEWIGEIHPDSSTINYAPSLKDRFTISRDNAKNTLFLQMDSLRPEDTGVYFCASLYFGFPWFAYWGQGTPVTVSSTRASTKGPSVFPLAPSSKSTSGGTAALGCLVKDYFPEPVTVSWNSGALTSGVHTFPAVLQSSGLYSLSSVVTVPSSSLGTQTYICNVNHKPSNTKVDKRVEPKSCIPEDTFFPSSDVPCDVKLVEKSFETDTNLNFQNLSVIGFRILLLKVAGFNLLMTLRLWSS

SEQ ID NO: 19440 - protein, 622 aa, Artificial Sequence
  Synthetic Polypeptide
MALPVTALLLPLALLLHAARPDIQLTQSPSSLSASVGDRVTITCKASQDVGTSVAWYQQKPGKAPKLLIYWTSTRHTGVPSRFSGSGSGTDFTFTISSLQPEDIATYYCQQYSLYRSFGQGTKVEIKLEGQPKANPTVTLFPPSSEELQANKATLVCLISDFYPGAVTVAWKADGSPVKAGVETTKPSKQSNNKYAASSYLSLTPEQWKSHRSYSCQVTHEGSTVEKTVAPTECSGRADCGFTSESYQQGVLSATILYEILLGKATLYAVLVSALVLMAMVKRKDSRGRAKRSGSGATNFSLLKQAGDVEENPGPTSMDWIWRILFLVGAATGAHSFEEVQLVESGGGVVQPGRSLRLSCSASGFDFTTYWMSWVRQAPGKGLEWIGEIHPDSSTINYAPSLKDRFTISRDNAKNTLFLQMDSLRPEDTGVYFCASLYFGFPWFAYWGQGTPVTVSSTRASTKGPSVFPLAPSSKSTSGGTAALGCLVKDYFPEPVTVSWNSGALTSGVHTFPAVLQSSGLYSLSSVVTVPSSSLGTQTYICNVNHKPSNTKVDKRVEPKSCIPEDTFFPSPESSCDVKLVEKSFETDTNLNFQNLSVIGFRILLLKVAGFNLLMTLRLWSS

SEQ ID NO: 19441 - protein, 448 aa, Artificial Sequence
  Synthetic Polypeptide
MALPVTALLLPLALLLHAARPDIQLTQSPSSLSASVGDRVTITCKASQDVGTSVAWYQQKPGKAPKLLIYWTSTRHTGVPSRFSGSGSGTDFTFTISSLQPEDIATYYCQQYSLYRSFGQGTKVEIKGGGGSGGGGSGGGGSEVQLVESGGGVVQPGRSLRLSCSASGFDFTTYWMSWVRQAPGKGLEWIGEIHPDSSTINYAPSLKDRFTISRDNAKNTLFLQMDSLRPEDTGVYFCASLYFGFPWFAYWGQGTPVTVSSTRDGNEEMGGITQTPYKVSISGTTVILTCPQYPGSEILWQHNDKNIGGDEDDKNIGSDEDHLSLKEFSELEQSGYYVCYPRGSKPEDANFYLYLRARVCENCMEMDVMSVATIVIVDICITGGLLLLVYYWSKNRKAKAKPVTRGAGAGGRQRGQNKERPPPVPNPDYEPIRKGQRDLYSGLNQRRI

SEQ ID NO: 19442 - protein, 413 aa, Artificial Sequence
  Synthetic Polypeptide
MALPVTALLLPLALLLHAARPDIQLTQSPSSLSASVGDRVTITCKASQDVGTSVAWYQQKPGKAPKLLIYWTSTRHTGVPSRFSGSGSGTDFTFTISSLQPEDIATYYCQQYSLYRSFGQGTKVEIKGGGGSGGGGSGGGGSEVQLVESGGGVVQPGRSLRLSCSASGFDFTTYWMSWVRQAPGKGLEWIGEIHPDSSTINYAPSLKDRFTISRDNAKNTLFLQMDSLRPEDTGVYFCASLYFGFPWFAYWGQGTPVTVSSTRFKIPIEELEDRVFVNCNTSITWVEGTVGTLLSDITRLDLGKRILDPRGIYRCNGTDIYKDKESTVQVHYRMCQSCVELDPATVAGIIVTDVIATLLLALGVFCFAGHETGRLSGAADTQALLRNDQVYQPLRDRDDAQYSHLGGNWARNK

SEQ ID NO: 19443 - protein, 423 aa, Artificial Sequence
  Synthetic Polypeptide
MALPVTALLLPLALLLHAARPDIQLTQSPSSLSASVGDRVTITCKASQDVGTSVAWYQQKPGKAPKLLIYWTSTRHTGVPSRFSGSGSGTDFTFTISSLQPEDIATYYCQQYSLYRSFGQGTKVEIKGGGGSGGGGSGGGGSEVQLVESGGGVVQPGRSLRLSCSASGFDFTTYWMSWVRQAPGKGLEWIGEIHPDSSTINYAPSLKDRFTISRDNAKNTLFLQMDSLRPEDTGVYFCASLYFGFPWFAYWGQGTPVTVSSTRQSIKGNHLVKVYDYQEDGSVLLTCDAEAKNITWFKDGKMIGFLTEDKKKWNLGSNAKDPRGMYQCKGSQNKSKPLQVYYRMCQNCIELNAATISGFLFAEIVSIFVLAVGVYFIAGQDGVRQSRASDKQTLLPNDQLYQPLKDREDDQYSHLQGNQLRRN

SEQ ID NO: 19444 - protein, 406 aa, Artificial Sequence
  Synthetic Polypeptide
MALPVTALLLPLALLLHAARPDIQLTQSPSSLSASVGDRVTITCKASQDVGTSVAWYQQKPGKAPKLLIYWTSTRHTGVPSRFSGSGSGTDFTFTISSLQPEDIATYYCQQYSLYRSFGQGTKVEIKGGGGSGGGGSGGGGSEVQLVESGGGVVQPGRSLRLSCSASGFDFTTYWMSWVRQAPGKGLEWIGEIHPDSSTINYAPSLKDRFTISRDNAKNTLFLQMDSLRPEDTGVYFCASLYFGFPWFAYWGQGTPVTVSSTRQSFGLLDPKLCYLLDGILFIYGVILTALFLRVKFSRSADAPAYQQGQNQLYNELNLGRREEYDVLDKRRGRDPEMGGKPQRRKNPQEGLYNELQKDKMAEAYSEIGMKGERRRGKGHDGLYQGLSTATKDTYDALHMQALPPR

SEQ ID NO: 19445 - protein, 448 aa, Artificial Sequence
  Synthetic Polypeptide
MALPVTALLLPLALLLHAARPEVQLVESGGGVVQPGRSLRLSCSASGFDFTTYWMSWVRQAPGKGLEWIGEIHPDSSTINYAPSLKDRFTISRDNAKNTLFLQMDSLRPEDTGVYFCASLYFGFPWFAYWGQGTPVTVSSGGGGSGGGGSGGGGSDIQLTQSPSSLSASVGDRVTITCKASQDVGTSVAWYQQKPGKAPKLLIYWTSTRHTGVPSRFSGSGSGTDFTFTISSLQPEDIATYYCQQYSLYRSFGQGTKVEIKTRDGNEEMGGITQTPYKVSISGTTVILTCPQYPGSEILWQHNDKNIGGDEDDKNIGSDEDHLSLKEFSELEQSGYYVCYPRGSKPEDANFYLYLRARVCENCMEMDVMSVATIVIVDICITGGLLLLVYYWSKNRKAKAKPVTRGAGAGGRQRGQNKERPPPVPNPDYEPIRKGQRDLYSGLNQRRI

SEQ ID NO: 19446 - protein, 413 aa, Artificial Sequence
  Synthetic Polypeptide
MALPVTALLLPLALLLHAARPEVQLVESGGGVVQPGRSLRLSCSASGFDFTTYWMSWVRQAPGKGLEWIGEIHPDSSTINYAPSLKDRFTISRDNAKNTLFLQMDSLRPEDTGVYFCASLYFGFPWFAYWGQGTPVTVSSGGGGSGGGGSGGGGSDIQLTQSPSSLSASVGDRVTITCKASQDVGTSVAWYQQKPGKAPKLLIYWTSTRHTGVPSRFSGSGSGTDFTFTISSLQPEDIATYYCQQYSLYRSFGQGTKVEIKTRFKIPIEELEDRVFVNCNTSITWVEGTVGTLLSDITRLDLGKRILDPRGIYRCNGTDIYKDKESTVQVHYRMCQSCVELDPATVAGIIVTDVIATLLLALGVFCFAGHETGRLSGAADTQALLRNDQVYQPLRDRDDAQYSHLGGNWARNK

SEQ ID NO: 19447 - protein, 423 aa, Artificial Sequence
  Synthetic Polypeptide
MALPVTALLLPLALLLHAARPEVQLVESGGGVVQPGRSLRLSCSASGFDFTTYWMSWVRQAPGKGLEWIGEIHPDSSTINYAPSLKDRFTISRDNAKNTLFLQMDSLRPEDTGVYFCASLYFGFPWFAYWGQGTPVTVSSGGGGSGGGGSGGGGSDIQLTQSPSSLSASVGDRVTITCKASQDVGTSVAWYQQKPGKAPKLLIYWTSTRHTGVPSRFSGSGSGTDFTFTISSLQPEDIATYYCQQYSLYRSFGQGTKVEIKTRQSIKGNHLVKVYDYQEDGSVLLTCDAEAKNITWFKDGKMIGFLTEDKKKWNLGSNAKDPRGMYQCKGSQNKSKPLQVYYRMCQNCIELNAATISGFLFAEIVSIFVLAVGVYFIAGQDGVRQSRASDKQTLLPNDQLYQPLKDREDDQYSHLQGNQLRRN

SEQ ID NO: 19448 - protein, 406 aa, Artificial Sequence
  Synthetic Polypeptide
MALPVTALLLPLALLLHAARPEVQLVESGGGVVQPGRSLRLSCSASGFDFTTYWMSWVRQAPGKGLEWIGEIHPDSSTINYAPSLKDRFTISRDNAKNTLFLQMDSLRPEDTGVYFCASLYFGFPWFAYWGQGTPVTVSSGGGGSGGGGSGGGGSDIQLTQSPSSLSASVGDRVTITCKASQDVGTSVAWYQQKPGKAPKLLIYWTSTRHTGVPSRFSGSGSGTDFTFTISSLQPEDIATYYCQQYSLYRSFGQGTKVEIKTRQSFGLLDPKLCYLLDGILFIYGVILTALFLRVKFSRSADAPAYQQGQNQLYNELNLGRREEYDVLDKRRGRDPEMGGKPQRRKNPQEGLYNELQKDKMAEAYSEIGMKGERRRGKGHDGLYQGLSTATKDTYDALHMQALPPR

SEQ ID NO: 19449 - protein, 639 aa, Artificial Sequence
  Synthetic Polypeptide
MALPVTALLLPLALLLHAARPDIQLTQSPSSLSASVGDRVTITCKASQDVGTSVAWYQQKPGKAPKLLIYWTSTRHTGVPSRFSGSGSGTDFTFTISSLQPEDIATYYCQQYSLYRSFGQGTKVEIKGGGGSGGGGSGGGGSEVQLVESGGGVVQPGRSLRLSCSASGFDFTTYWMSWVRQAPGKGLEWIGEIHPDSSTINYAPSLKDRFTISRDNAKNTLFLQMDSLRPEDTGVYFCASLYFGFPWFAYWGQGTPVTVSSTRGSGIQNPDPAVYQLRDSKSSDKSVCLFTDFDSQTNVSQSKDSDVYITDKTVLDMRSMDFKSNSAVAWSNKSDFACANAFNNSIIPEDTFFPSPESSCDVKLVEKSFETDTNLNFQNLSVIGFRILLLKVAGFNLLMTLRLWSSRAKRSGSGVKQTLNFDLLKLAGDVESNPGPSRGHMTEYKPTVRLATRDDVPRAVRTLAAAFADYPATRHTVDPDRHIERVTELQELFLTRVGLDIGKVWVADDGAAVAVWTTPESVEAGAVFAEIGPRMAELSGSRLAAQQQMEGLLAPHRPKEPAWFLATVGVSPDHQGKGLGSAVVLPGVEAAERAGVPAFLETSAPRNLPFYERLGFTVTADVEVPEGPRTWCMTRKPGA

SEQ ID NO: 19450 - protein, 671 aa, Artificial Sequence
  Synthetic Polypeptide
MALPVTALLLPLALLLHAARPDIQLTQSPSSLSASVGDRVTITCKASQDVGTSVAWYQQKPGKAPKLLIYWTSTRHTGVPSRFSGSGSGTDFTFTISSLQPEDIATYYCQQYSLYRSFGQGTKVEIKGGGGSGGGGSGGGGSEVQLVESGGGVVQPGRSLRLSCSASGFDFTTYWMSWVRQAPGKGLEWIGEIHPDSSTINYAPSLKDRFTISRDNAKNTLFLQMDSLRPEDTGVYFCASLYFGFPWFAYWGQGTPVTVSSLEDLKNVFPPEVAVFEPSEAEISHTQKATLVCLATGFYPDHVELSWWVNGKEVHSGVSTDPQPLKEQPALNDSRYCLSSRLRVSATFWQNPRNHFRCQVQFYGLSENDEWTQDRAKPVTQIVSAEAWGRADCGFTSESYQQGVLSATILYEILLGKATLYAVLVSALVLMAMVKRKDSRGRAKRSGSGATNFSLLKQAGDVEENPGPTRGHMTEYKPTVRLATRDDVPRAVRTLAAAFADYPATRHTVDPDRHIERVTELQELFLTRVGLDIGKVWVADDGAAVAVWTTPESVEAGAVFAEIGPRMAELSGSRLAAQQQMEGLLAPHRPKEPAWFLATVGVSPDHQGKGLGSAVVLPGVEAAERAGVPAFLETSAPRNLPFYERLGFTVTADVEVPEGPRTWCMTRKPGA

SEQ ID NO: 19451 - protein, 721 aa, Artificial Sequence
  Synthetic Polypeptide
MALPVTALLLPLALLLHAARPDIQLTQSPSSLSASVGDRVTITCKASQDVGTSVAWYQQKPGKAPKLLIYWTSTRHTGVPSRFSGSGSGTDFTFTISSLQPEDIATYYCQQYSLYRSFGQGTKVEIKGGGGSGGGGSGGGGSEVQLVESGGGVVQPGRSLRLSCSASGFDFTTYWMSWVRQAPGKGLEWIGEIHPDSSTINYAPSLKDRFTISRDNAKNTLFLQMDSLRPEDTGVYFCASLYFGFPWFAYWGQGTPVTVSSTREQKLISEEDLGSGTPFPSLAPPIMLLVDGKQQMVVVCLVLDVAPPGLDSPIWFSAGNGSALDAFTYGPSPATDGTWTNLAHLSLPSEELASWEPLVCHTGPGAEGHSRSTQPMHLSGEASTARTCPQEPLRGTPGGALWLGVLRLLLFKLLLFDLLLTCSCLCDPAGPLPSPATTTRLRALGSHRLHPATETGGREATSSPRPQPRDRRWGDTPPGRKPGSPVRAKRSGSGVKQTLNFDLLKLAGDVESNPGPSRSRGHMTEYKPTVRLATRDDVPRAVRTLAAAFADYPATRHTVDPDRHIERVTELQELFLTRVGLDIGKVWVADDGAAVAVWTTPESVEAGAVFAEIGPRMAELSGSRLAAQQQMEGLLAPHRPKEPAWFLATVGVSPDHQGKGLGSAVVLPGVEAAERAGVPAFLETSAPRNLPFYERLGFTVTADVEVPEGPRTWCMTRKPGA

SEQ ID NO: 19452 - protein, 537 aa, Artificial Sequence
  Synthetic Polypeptide
MALPVTALLLPLALLLHAARPDIQLTQSPSSLSASVGDRVTITCKASQDVGTSVAWYQQKPGKAPKLLIYWTSTRHTGVPSRFSGSGSGTDFTFTISSLQPEDIATYYCQQYSLYRSFGQGTKVEIKLEDLKNVFPPEVAVFEPSEAEISHTQKATLVCLATGFYPDHVELSWWVNGKEVHSGVSTDPQPLKEQPALNDSRYCLSSRLRVSATFWQNPRNHFRCQVQFYGLSENDEWTQDRAKPVTQIVSAEAWGRADCGFTSESYQQGVLSATILYEILLGKATLYAVLVSALVLMAMVKRKDSRGRAKRSGSGATNFSLLKQAGDVEENPGPTRGHMTEYKPTVRLATRDDVPRAVRTLAAAFADYPATRHTVDPDRHIERVTELQELFLTRVGLDIGKVWVADDGAAVAVWTTPESVEAGAVFAEIGPRMAELSGSRLAAQQQMEGLLAPHRPKEPAWFLATVGVSPDHQGKGLGSAVVLPGVEAAERAGVPAFLETSAPRNLPFYERLGFTVTADVEVPEGPRTWCMTRKPGA

SEQ ID NO: 19453 - protein, 307 aa, Artificial Sequence
  Synthetic Polypeptide
MALPVTALLLPLALLLHAARPDIQLTQSPSSLSASVGDRVTITCKASQDVGTSVAWYQQKPGKAPKLLIYWTSTRHTGVPSRFSGSGSGTDFTFTISSLQPEDIATYYCQQYSLYRSFGQGTKVEIKLEDLKNVFPPEVAVFEPSEAEISHTQKATLVCLATGFYPDHVELSWWVNGKEVHSGVSTDPQPLKEQPALNDSRYCLSSRLRVSATFWQNPRNHFRCQVQFYGLSENDEWTQDRAKPVTQIVSAEAWGRADCGFTSESYQQGVLSATILYEILLGKATLYAVLVSALVLMAMVKRKDSRG

SEQ ID NO: 19454 - protein, 448 aa, Artificial Sequence
  Synthetic Polypeptide
MDWIWRILFLVGAATGAHSFEEVQLVESGGGVVQPGRSLRLSCSASGFDFTTYWMSWVRQAPGKGLEWIGEIHPDSSTINYAPSLKDRFTISRDNAKNTLFLQMDSLRPEDTGVYFCASLYFGFPWFAYWGQGTPVTVSSTRIQNPDPAVYQLRDSKSSDKSVCLFTDFDSQTNVSQSKDSDVYITDKTVLDMRSMDFKSNSAVAWSNKSDFACANAFNNSIIPEDTFFPSPESSCDVKLVEKSFETDTNLNFQNLSVIGFRILLLKVAGFNLLMTLRLWSSRAKRSGSGVKQTLNFDLLKLAGDVESNPGPSRGHMAKPLSQEESTLIERATATINSIPISEDYSVASAALSSDGRIFTGVNVYHFTGGPCAELVVLGTAAAAAAGNLTCIVAIGNENRGILSPCGRCRQVLLDLHPGIKAIVKDSDGQPTAVGIRELLPSGYVWEG

SEQ ID NO: 19455 - protein, 282 aa, Artificial Sequence
  Synthetic Polypeptide
MDWIWRILFLVGAATGAHSFEEVQLVESGGGVVQPGRSLRLSCSASGFDFTTYWMSWVRQAPGKGLEWIGEIHPDSSTINYAPSLKDRFTISRDNAKNTLFLQMDSLRPEDTGVYFCASLYFGFPWFAYWGQGTPVTVSSTRIQNPDPAVYQLRDSKSSDKSVCLFTDFDSQTNVSQSKDSDVYITDKTVLDMRSMDFKSNSAVAWSNKSDFACANAFNNSIIPEDTFFPSPESSCDVKLVEKSFETDTNLNFQNLSVIGFRILLLKVAGFNLLMTLRLWSS

SEQ ID NO: 19456 - protein, 555 aa, Artificial Sequence
  Synthetic Polypeptide
MALPVTALLLPLALLLHAARPDIQLTQSPSSLSASVGDRVTITCKASQDVGTSVAWYQQKPGKAPKLLIYWTSTRHTGVPSRFSGSGSGTDFTFTISSLQPEDIATYYCQQYSLYRSFGQGTKVEIKLEGKPIPNPLLGLDSTGSGEDLKNVFPPEVAVFEPSEAEISHTQKATLVCLATGFYPDHVELSWWVNGKEVHSGVCTDPQPLKEQPALNDSRYCLSSRLRVSATFWQNPRNHFRCQVQFYGLSENDEWTQDRAKPVTQIVSAEAWGRADCGFTSESYQQGVLSATILYEILLGKATLYAVLVSALVLMAMVKRKDSRGRAKRSGSGATNFSLLKQAGDVEENPGPTRGHMTEYKPTVRLATRDDVPRAVRTLAAAFADYPATRHTVDPDRHIERVTELQELFLTRVGLDIGKVWVADDGAAVAVWTTPESVEAGAVFAEIGPRMAELSGSRLAAQQQMEGLLAPHRPKEPAWFLATVGVSPDHQGKGLGSAVVLPGVEAAERAGVPAFLETSAPRNLPFYERLGFTVTADVEVPEGPRTWCMTRKPGA

SEQ ID NO: 19457 - protein, 325 aa, Artificial Sequence
  Synthetic Polypeptide
MALPVTALLLPLALLLHAARPDIQLTQSPSSLSASVGDRVTITCKASQDVGTSVAWYQQKPGKAPKLLIYWTSTRHTGVPSRFSGSGSGTDFTFTISSLQPEDIATYYCQQYSLYRSFGQGTKVEIKLEGKPIPNPLLGLDSTGSGEDLKNVFPPEVAVFEPSEAEISHTQKATLVCLATGFYPDHVELSWWVNGKEVHSGVCTDPQPLKEQPALNDSRYCLSSRLRVSATFWQNPRNHFRCQVQFYGLSENDEWTQDRAKPVTQIVSAEAWGRADCGFTSESYQQGVLSATILYEILLGKATLYAVLVSALVLMAMVKRKDSRG

SEQ ID NO: 19458 - protein, 460 aa, Artificial Sequence
  Synthetic Polypeptide
MDWIWRILFLVGAATGAHSFEEVQLVESGGGVVQPGRSLRLSCSASGFDFTTYWMSWVRQAPGKGLEWIGEIHPDSSTINYAPSLKDRFTISRDNAKNTLFLQMDSLRPEDTGVYFCASLYFGFPWFAYWGQGTPVTVSSTREQKLISEEDGSGIQNPDPAVYQLRDSKSSDKSVCLFTDFDSQTNVSQSKDSDVYITDKCVLDMRSMDFKSNSAVAWSNKSDFACANAFNNSIIPEDTFFPSPESSCDVKLVEKSFETDTNLNFQNLSVIGFRILLLKVAGFNLLMTLRLWSSRAKRSGSGVKQTLNFDLLKLAGDVESNPGPSRGHMAKPLSQEESTLIERATATINSIPISEDYSVASAALSSDGRIFTGVNVYHFTGGPCAELVVLGTAAAAAAGNLTCIVAIGNENRGILSPCGRCRQVLLDLHPGIKAIVKDSDGQPTAVGIRELLPSGYVWEG

SEQ ID NO: 19459 - protein, 294 aa, Artificial Sequence
  Synthetic Polypeptide
MDWIWRILFLVGAATGAHSFEEVQLVESGGGVVQPGRSLRLSCSASGFDFTTYWMSWVRQAPGKGLEWIGEIHPDSSTINYAPSLKDRFTISRDNAKNTLFLQMDSLRPEDTGVYFCASLYFGFPWFAYWGQGTPVTVSSTREQKLISEEDGSGIQNPDPAVYQLRDSKSSDKSVCLFTDFDSQTNVSQSKDSDVYITDKCVLDMRSMDFKSNSAVAWSNKSDFACANAFNNSIIPEDTFFPSPESSCDVKLVEKSFETDTNLNFQNLSVIGFRILLLKVAGFNLLMTLRLWSS

SEQ ID NO: 19460 - protein, 639 aa, Artificial Sequence
  Synthetic Polypeptide
MALPVTALLLPLALLLHAARPDIQLTQSPSSLSASVGDRVTITCKASQDVGTSVAWYQQKPGKAPKLLIYWTSTRHTGVPSRFSGSGSGTDFTFTISSLQPEDIATYYCQQYSLYRSFGQGTKVEIKGGGGSGGGGSGGGGSEVQLVESGGGVVQPGRSLRLSCSASGFDFTTYWMSWVRQAPGKGLEWIGEIHPDSSTINYAPSLKDRFTISRDNAKNTLFLQMDSLRPEDTGVYFCASLYFGFPWFAYWGQGTPVTVSSTRGSGIQNPDPAVYQLRDSKSSDKSVCLFTDFDSQTNVSQSKDSDVYITDKTVLDMRSMDFKSNSAVAWSNKSDFACANAFNNSIIPEDTFFPSSDVPCDVKLVEKSFETDTNLNFQNLSVIGFRILLLKVAGFNLLMTLRLWSSRAKRSGSGVKQTLNFDLLKLAGDVESNPGPSRGHMTEYKPTVRLATRDDVPRAVRTLAAAFADYPATRHTVDPDRHIERVTELQELFLTRVGLDIGKVWVADDGAAVAVWTTPESVEAGAVFAEIGPRMAELSGSRLAAQQQMEGLLAPHRPKEPAWFLATVGVSPDHQGKGLGSAVVLPGVEAAERAGVPAFLETSAPRNLPFYERLGFTVTADVEVPEGPRTWCMTRKPGA

SEQ ID NO: 19461 - protein, 671 aa, Artificial Sequence
  Synthetic Polypeptide
MALPVTALLLPLALLLHAARPDIQLTQSPSSLSASVGDRVTITCKASQDVGTSVAWYQQKPGKAPKLLIYWTSTRHTGVPSRFSGSGSGTDFTFTISSLQPEDIATYYCQQYSLYRSFGQGTKVEIKGGGGSGGGGSGGGGSEVQLVESGGGVVQPGRSLRLSCSASGFDFTTYWMSWVRQAPGKGLEWIGEIHPDSSTINYAPSLKDRFTISRDNAKNTLFLQMDSLRPEDTGVYFCASLYFGFPWFAYWGQGTPVTVSSLEDLKNVFPPEVAVFEPSKAEIAHTQKATLVCLATGFYPDHVELSWWVNGKEVHSGVSTDPQPLKEQPALNDSRYCLSSRLRVSATFWQNPRNHFRCQVQFYGLSENDEWTQDRAKPVTQIVSAEAWGRADCGITSASYHQGVLSATILYEILLGKATLYAVLVSALVLMAMVKRKDSRGRAKRSGSGATNFSLLKQAGDVEENPGPTRGHMTEYKPTVRLATRDDVPRAVRTLAAAFADYPATRHTVDPDRHIERVTELQELFLTRVGLDIGKVWVADDGAAVAVWTTPESVEAGAVFAEIGPRMAELSGSRLAAQQQMEGLLAPHRPKEPAWFLATVGVSPDHQGKGLGSAVVLPGVEAAERAGVPAFLETSAPRNLPFYERLGFTVTADVEVPEGPRTWCMTRKPGA

SEQ ID NO: 19462 - protein, 694 aa, Artificial Sequence
  Synthetic Polypeptide
MALPVTALLLPLALLLHAARPDIQLTQSPSSLSASVGDRVTITCKASQDVGTSVAWYQQKPGKAPKLLIYWTSTRHTGVPSRFSGSGSGTDFTFTISSLQPEDIATYYCQQYSLYRSFGQGTKVEIKGGGGSGGGGSGGGGSEVQLVESGGGVVQPGRSLRLSCSASGFDFTTYWMSWVRQAPGKGLEWIGEIHPDSSTINYAPSLKDRFTISRDNAKNTLFLQMDSLRPEDTGVYFCASLYFGFPWFAYWGQGTPVTVSSTRGSGGGGSGGGGSGDGNEEMGGITQTPYKVSISGTTVILTCPQYPGSEILWQHNDKNIGGDEDDKNIGSDEDHLSLKEFSELEQSGYYVCYPRGSKPEDANFYLYLRARVCENCMEMDVMSVATIVIVDICITGGLLLLVYYWSKNRKAKAKPVTRGAGAGGRQRGQNKERPPPVPNPDYEPIRKGQRDLYSGLNQRRIRAKRSGSGVKQTLNFDLLKLAGDVESNPGPSRGHMTEYKPTVRLATRDDVPRAVRTLAAAFADYPATRHTVDPDRHIERVTELQELFLTRVGLDIGKVWVADDGAAVAVWTTPESVEAGAVFAEIGPRMAELSGSRLAAQQQMEGLLAPHRPKEPAWFLATVGVSPDHQGKGLGSAVVLPGVEAAERAGVPAFLETSAPRNLPFYERLGFTVTADVEVPEGPRTWCMTRKPGA

SEQ ID NO: 19463 - protein, 659 aa, Artificial Sequence
  Synthetic Polypeptide
MALPVTALLLPLALLLHAARPDIQLTQSPSSLSASVGDRVTITCKASQDVGTSVAWYQQKPGKAPKLLIYWTSTRHTGVPSRFSGSGSGTDFTFTISSLQPEDIATYYCQQYSLYRSFGQGTKVEIKGGGGSGGGGSGGGGSEVQLVESGGGVVQPGRSLRLSCSASGFDFTTYWMSWVRQAPGKGLEWIGEIHPDSSTINYAPSLKDRFTISRDNAKNTLFLQMDSLRPEDTGVYFCASLYFGFPWFAYWGQGTPVTVSSTRGSGGGGSGGGGSGFKIPIEELEDRVFVNCNTSITWVEGTVGTLLSDITRLDLGKRILDPRGIYRCNGTDIYKDKESTVQVHYRMCQSCVELDPATVAGIIVTDVIATLLLALGVFCFAGHETGRLSGAADTQALLRNDQVYQPLRDRDDAQYSHLGGNWARNKRAKRSGSGVKQTLNFDLLKLAGDVESNPGPSRGHMTEYKPTVRLATRDDVPRAVRTLAAAFADYPATRHTVDPDRHIERVTELQELFLTRVGLDIGKVWVADDGAAVAVWTTPESVEAGAVFAEIGPRMAELSGSRLAAQQQMEGLLAPHRPKEPAWFLATVGVSPDHQGKGLGSAVVLPGVEAAERAGVPAFLETSAPRNLPFYERLGFTVTADVEVPEGPRTWCMTRKPGA

SEQ ID NO: 19464 - protein, 669 aa, Artificial Sequence
  Synthetic Polypeptide
MALPVTALLLPLALLLHAARPDIQLTQSPSSLSASVGDRVTITCKASQDVGTSVAWYQQKPGKAPKLLIYWTSTRHTGVPSRFSGSGSGTDFTFTISSLQPEDIATYYCQQYSLYRSFGQGTKVEIKGGGGSGGGGSGGGGSEVQLVESGGGVVQPGRSLRLSCSASGFDFTTYWMSWVRQAPGKGLEWIGEIHPDSSTINYAPSLKDRFTISRDNAKNTLFLQMDSLRPEDTGVYFCASLYFGFPWFAYWGQGTPVTVSSTRGSGGGGSGGGGSGQSIKGNHLVKVYDYQEDGSVLLTCDAEAKNITWFKDGKMIGFLTEDKKKWNLGSNAKDPRGMYQCKGSQNKSKPLQVYYRMCQNCIELNAATISGFLFAEIVSIFVLAVGVYFIAGQDGVRQSRASDKQTLLPNDQLYQPLKDREDDQYSHLQGNQLRRNRAKRSGSGVKQTLNFDLLKLAGDVESNPGPSRGHMTEYKPTVRLATRDDVPRAVRTLAAAFADYPATRHTVDPDRHIERVTELQELFLTRVGLDIGKVWVADDGAAVAVWTTPESVEAGAVFAEIGPRMAELSGSRLAAQQQMEGLLAPHRPKEPAWFLATVGVSPDHQGKGLGSAVVLPGVEAAERAGVPAFLETSAPRNLPFYERLGFTVTADVEVPEGPRTWCMTRKPGA

SEQ ID NO: 19465 - protein, 652 aa, Artificial Sequence
  Synthetic Polypeptide
MALPVTALLLPLALLLHAARPDIQLTQSPSSLSASVGDRVTITCKASQDVGTSVAWYQQKPGKAPKLLIYWTSTRHTGVPSRFSGSGSGTDFTFTISSLQPEDIATYYCQQYSLYRSFGQGTKVEIKGGGGSGGGGSGGGGSEVQLVESGGGVVQPGRSLRLSCSASGFDFTTYWMSWVRQAPGKGLEWIGEIHPDSSTINYAPSLKDRFTISRDNAKNTLFLQMDSLRPEDTGVYFCASLYFGFPWFAYWGQGTPVTVSSTRGSGGGGSGGGGSGQSFGLLDPKLCYLLDGILFIYGVILTALFLRVKFSRSADAPAYQQGQNQLYNELNLGRREEYDVLDKRRGRDPEMGGKPQRRKNPQEGLYNELQKDKMAEAYSEIGMKGERRRGKGHDGLYQGLSTATKDTYDALHMQALPPRRAKRSGSGVKQTLNFDLLKLAGDVESNPGPSRGHMTEYKPTVRLATRDDVPRAVRTLAAAFADYPATRHTVDPDRHIERVTELQELFLTRVGLDIGKVWVADDGAAVAVWTTPESVEAGAVFAEIGPRMAELSGSRLAAQQQMEGLLAPHRPKEPAWFLATVGVSPDHQGKGLGSAVVLPGVEAAERAGVPAFLETSAPRNLPFYERLGFTVTADVEVPEGPRTWCMTRKPGA

SEQ ID NO: 19466 - protein, 753 aa, Artificial Sequence
  Synthetic Polypeptide
MALPVTALLLPLALLLHAARPEVQLVESGGGLVQPGGSLRLSCAASGFSFSDFWMSWVRQAPGKGLEWVATISQAGSEKDYVDSVKGRFTISRDNAKKSLYLQMNSLRAEDTAVYYCASGVYSFDYRGQGTLVTVSSGTGGGGSGGGGSGGGGSEFDIQLTQSPSSLSASVGDRVTITCKASQDVGTSVAWYQQKPGKAPKLLIYWTSTRHTGVPSRFSGSGSGTDFTFTISSLQPEDIATYYCQQYSLYRSFGQGTKVEIKLEDLKNVFPPEVAVFEPSEAEISHTQKATLVCLATGFYPDHVELSWWVNGKEVHSGVCTDPQPLKEQPALNDSRYCLSSRLRVSATFWQNPRNHFRCQVQFYGLSENDEWTQDRAKPVTQIVSAEAWGRADCGFTSESYQQGVLSATILYEILLGKATLYAVLVSALVLMAMVKRKDSRGRAKRSGSGATNFSLLKQAGDVEENPGPTSMDWIWRILFLVGAATGAHSFEEVQLVESGGGVVQPGRSLRLSCSASGFDFTTYWMSWVRQAPGKGLEWIGEIHPDSSTINYAPSLKDRFTISRDNAKNTLFLQMDSLRPEDTGVYFCASLYFGFPWFAYWGQGTPVTVSSTRIQNPDPAVYQLRDSKSSDKSVCLFTDFDSQTNVSQSKDSDVYITDKCVLDMRSMDFKSNSAVAWSNKSDFACANAFNNSIIPEDTFFPSPESSCDVKLVEKSFETDTNLNFQNLSVIGFRILLLKVAGFNLLMTLRLWSS

SEQ ID NO: 19467 - protein, 757 aa, Artificial Sequence
  Synthetic Polypeptide
MALPVTALLLPLALLLHAARPEVQLVESGGGLVQPGGSLRLSCAASGFSFSDFWMSWVRQAPGKGLEWVATISQAGSEKDYVDSVKGRFTISRDNAKKSLYLQMNSLRAEDTAVYYCASGVYSFDYRGQGTLVTVSSGTGGGGSGGGGSGGGGSEFDIQLTQSPSSLSASVGDRVTITCKASQDVGTSVAWYQQKPGKAPKLLIYWTSTRHTGVPSRFSGSGSGTDFTFTISSLQPEDIATYYCQQYSLYRSFGQGTKVEIKLEIQNPDPAVYQLRDSKSSDKSVCLFTDFDSQTNVSQSKDSDVYITDKCVLDMRSMDFKSNSAVAWSNKSDFACANAFNNSIIPEDTFFPSPESSCDVKLVEKSFETDTNLNFQNLSVIGFRILLLKVAGFNLLMTLRLWSSRAKRSGSGVKQTLNFDLLKLAGDVESNPGPTSMDWIWRILFLVGAATGAHSFEEVQLVESGGGVVQPGRSLRLSCSASGFDFTTYWMSWVRQAPGKGLEWIGEIHPDSSTINYAPSLKDRFTISRDNAKNTLFLQMDSLRPEDTGVYFCASLYFGFPWFAYWGQGTPVTVSSTREDLKNVFPPEVAVFEPSEAEISHTQKATLVCLATGFYPDHVELSWWVNGKEVHSGVCTDPQPLKEQPALNDSRYCLSSRLRVSATFWQNPRNHFRCQVQFYGLSENDEWTQDRAKPVTQIVSAEAWGRADCGFTSESYQQGVLSATILYEILLGKATLYAVLVSALVLMAMVKRKDSRG

SEQ ID NO: 19468 - protein, 949 aa, Artificial Sequence
  Synthetic Polypeptide
MALPVTALLLPLALLLHAARPEVQLVESGGGLVQPGGSLRLSCAASGFSFSDFWMSWVRQAPGKGLEWVATISQAGSEKDYVDSVKGRFTISRDNAKKSLYLQMNSLRAEDTAVYYCASGVYSFDYRGQGTLVTVSSGTGGGGSGGGGSGGGGSEFDIQLTQSPSSLSASVGDRVTITCKASQDVGTSVAWYQQKPGKAPKLLIYWTSTRHTGVPSRFSGSGSGTDFTFTISSLQPEDIATYYCQQYSLYRSFGQGTKVEIKLEDLKNVFPPEVAVFEPSEAEISHTQKATLVCLATGFYPDHVELSWWVNGKEVHSGVSTDPQPLKEQPALNDSRYCLSSRLRVSATFWQNPRNHFRCQVQFYGLSENDEWTQDRAKPVTQIVSAEAWGRADCGSQSFGLLDPKLCYLLDGILFIYGVILTALFLRVKFSRSADAPAYQQGQNQLYNELNLGRREEYDVLDKRRGRDPEMGGKPQRRKNPQEGLYNELQKDKMAEAYSEIGMKGERRRGKGHDGLYQGLSTATKDTYDALHMQALPPRRAKRSGSGATNFSLLKQAGDVEENPGPTSMDWIWRILFLVGAATGAHSFEEVQLVESGGGVVQPGRSLRLSCSASGFDFTTYWMSWVRQAPGKGLEWIGEIHPDSSTINYAPSLKDRFTISRDNAKNTLFLQMDSLRPEDTGVYFCASLYFGFPWFAYWGQGTPVTVSSTRIQNPDPAVYQLRDSKSSDKSVCLFTDFDSQTNVSQSKDSDVYITDKTVLDMRSMDFKSNSAVAWSNKSDFACANAFNNSIIPEDTFFPSPESSCGTQSFGLLDPKLCYLLDGILFIYGVILTALFLRVKFSRSADAPAYQQGQNQLYNELNLGRREEYDVLDKRRGRDPEMGGKPQRRKNPQEGLYNELQKDKMAEAYSEIGMKGERRRGKGHDGLYQGLSTATKDTYDALHMQALPPR

SEQ ID NO: 19469 - protein, 779 aa, Artificial Sequence
  Synthetic Polypeptide
MALPVTALLLPLALLLHAARPEVQLVESGGGLVQPGGSLRLSCAASGFSFSDFWMSWVRQAPGKGLEWVATISQAGSEKDYVDSVKGRFTISRDNAKKSLYLQMNSLRAEDTAVYYCASGVYSFDYRGQGTLVTVSSGTGGGGSGGGGSGGGGSEFDIQLTQSPSSLSASVGDRVTITCKASQDVGTSVAWYQQKPGKAPKLLIYWTSTRHTGVPSRFSGSGSGTDFTFTISSLQPEDIATYYCQQYSLYRSFGQGTKVEIKLEGQPKANPTVTLFPPSSEELQANKATLVCLISDFYPGAVTVAWKADGSPVKAGVETTKPSKQSNNKYAASSYLSLTPEQWKSHRSYSCQVTHEGSTVEKTVAPTECSPIKTDVITMDPKDNCSKDANDTLLLQLTNTSAYYMYLLLLLKSVVYFAIITCCLLRRTAFCCNGEKSRAKRSGSGATNFSLLKQAGDVEENPGPTSMDWIWRILFLVGAATGAHSFEEVQLVESGGGVVQPGRSLRLSCSASGFDFTTYWMSWVRQAPGKGLEWIGEIHPDSSTINYAPSLKDRFTISRDNAKNTLFLQMDSLRPEDTGVYFCASLYFGFPWFAYWGQGTPVTVSSTRASTKGPSVFPLAPSSKSTSGGTAALGCLVKDYFPEPVTVSWNSGALTSGVHTFPAVLQSSGLYSLSSVVTVPSSSLGTQTYICNVNHKPSNTKVDKRVEPKSCEVKTDSTDHVKPKETENTKQPSKSCHKPKAIVHTEKVNMMSLTVLGLRMLFAKTVAVNFLLTAKLFFL

SEQ ID NO: 19470 - protein, 760 aa, Artificial Sequence
  Synthetic Polypeptide
MALPVTALLLPLALLLHAARPEVQLVESGGGLVQPGGSLRLSCAASGFSFSDFWMSWVRQAPGKGLEWVATISQAGSEKDYVDSVKGRFTISRDNAKKSLYLQMNSLRAEDTAVYYCASGVYSFDYRGQGTLVTVSSGTGGGGSGGGGSGGGGSEFDIQLTQSPSSLSASVGDRVTITCKASQDVGTSVAWYQQKPGKAPKLLIYWTSTRHTGVPSRFSGSGSGTDFTFTISSLQPEDIATYYCQQYSLYRSFGQGTKVEIKLEGQPKANPTVTLFPPSSEELQANKATLVCLISDFYPGAVTVAWKADGSPVKAGVETTKPSKQSNNKYAASSYLSLTPEQWKSHRSYSCQVTHEGSTVEKTVAPTECSGRADCGFTSESYQQGVLSATILYEILLGKATLYAVLVSALVLMAMVKRKDSRGRAKRSGSGVKQTLNFDLLKLAGDVESNPGPTSMDWIWRILFLVGAATGAHSFEEVQLVESGGGVVQPGRSLRLSCSASGFDFTTYWMSWVRQAPGKGLEWIGEIHPDSSTINYAPSLKDRFTISRDNAKNTLFLQMDSLRPEDTGVYFCASLYFGFPWFAYWGQGTPVTVSSTRASTKGPSVFPLAPSSKSTSGGTAALGCLVKDYFPEPVTVSWNSGALTSGVHTFPAVLQSSGLYSLSSVVTVPSSSLGTQTYICNVNHKPSNTKVDKRVEPKSCIPEDTFFPSPESSCDVKLVEKSFETDTNLNFQNLSVIGFRILLLKVAGFNLLMTLRLWSS

SEQ ID NO: 19471 - protein, 894 aa, Artificial Sequence
  Synthetic Polypeptide
MALPVTALLLPLALLLHAARPEVQLVESGGGLVQPGGSLRLSCAASGFSFSDFWMSWVRQAPGKGLEWVATISQAGSEKDYVDSVKGRFTISRDNAKKSLYLQMNSLRAEDTAVYYCASGVYSFDYRGQGTLVTVSSGTGGGGSGGGGSGGGGSEFDIQLTQSPSSLSASVGDRVTITCKASQDVGTSVAWYQQKPGKAPKLLIYWTSTRHTGVPSRFSGSGSGTDFTFTISSLQPEDIATYYCQQYSLYRSFGQGTKVEIKLEIQNPDPAVYQLRDSKSSDKSVCLFTDFDSQTNVSQSKDSDVYITDKCVLDMRSMDFKSNSAVAWSNKSDFACANAFNNSIIPEDTFFPSPESSCDVKLVEKSFETDTNLNFQNLSVIGFRILLLKVAGFNLLMTLRLWSSRAKRSGSGVKQTLNFDLLKLAGDVESNPGPTSMDWIWRILFLVGAATGAHSGPQLQLQESGPGLVKPSETLSLTCTVSGDSISSGDYYWGWIRQPPGKGLEWIGHIYYSGVTYYNPSLKSRVTISVDTSRNQFSLKLSSVTAADTAVYYCTREDSSNWRSRGQGTLVTVSSGSGGGGSGGGGSGGGGSFEEVQLVESGGGVVQPGRSLRLSCSASGFDFTTYWMSWVRQAPGKGLEWIGEIHPDSSTINYAPSLKDRFTISRDNAKNTLFLQMDSLRPEDTGVYFCASLYFGFPWFAYWGQGTPVTVSSTREDLKNVFPPEVAVFEPSEAEISHTQKATLVCLATGFYPDHVELSWWVNGKEVHSGVCTDPQPLKEQPALNDSRYCLSSRLRVSATFWQNPRNHFRCQVQFYGLSENDEWTQDRAKPVTQIVSAEAWGRADCGFTSESYQQGVLSATILYEILLGKATLYAVLVSALVLMAMVKRKDSRG

SEQ ID NO: 19472 - protein, 1086 aa, Artificial Sequence
  Synthetic Polypeptide
MALPVTALLLPLALLLHAARPEVQLVESGGGLVQPGGSLRLSCAASGFSFSDFWMSWVRQAPGKGLEWVATISQAGSEKDYVDSVKGRFTISRDNAKKSLYLQMNSLRAEDTAVYYCASGVYSFDYRGQGTLVTVSSGTGGGGSGGGGSGGGGSEFDIQLTQSPSSLSASVGDRVTITCKASQDVGTSVAWYQQKPGKAPKLLIYWTSTRHTGVPSRFSGSGSGTDFTFTISSLQPEDIATYYCQQYSLYRSFGQGTKVEIKLEDLKNVFPPEVAVFEPSEAEISHTQKATLVCLATGFYPDHVELSWWVNGKEVHSGVSTDPQPLKEQPALNDSRYCLSSRLRVSATFWQNPRNHFRCQVQFYGLSENDEWTQDRAKPVTQIVSAEAWGRADCGSQSFGLLDPKLCYLLDGILFIYGVILTALFLRVKFSRSADAPAYQQGQNQLYNELNLGRREEYDVLDKRRGRDPEMGGKPQRRKNPQEGLYNELQKDKMAEAYSEIGMKGERRRGKGHDGLYQGLSTATKDTYDALHMQALPPRRAKRSGSGATNFSLLKQAGDVEENPGPTSMDWIWRILFLVGAATGAHSGPQLQLQESGPGLVKPSETLSLTCTVSGDSISSGDYYWGWIRQPPGKGLEWIGHIYYSGVTYYNPSLKSRVTISVDTSRNQFSLKLSSVTAADTAVYYCTREDSSNWRSRGQGTLVTVSSGSGGGGSGGGGSGGGGSFEEVQLVESGGGVVQPGRSLRLSCSASGFDFTTYWMSWVRQAPGKGLEWIGEIHPDSSTINYAPSLKDRFTISRDNAKNTLFLQMDSLRPEDTGVYFCASLYFGFPWFAYWGQGTPVTVSSTRIQNPDPAVYQLRDSKSSDKSVCLFTDFDSQTNVSQSKDSDVYITDKTVLDMRSMDFKSNSAVAWSNKSDFACANAFNNSIIPEDTFFPSPESSCGTQSFGLLDPKLCYLLDGILFIYGVILTALFLRVKFSRSADAPAYQQGQNQLYNELNLGRREEYDVLDKRRGRDPEMGGKPQRRKNPQEGLYNELQKDKMAEAYSEIGMKGERRRGKGHDGLYQGLSTATKDTYDALHMQALPPR

SEQ ID NO: 19473 - protein, 916 aa, Artificial Sequence
  Synthetic Polypeptide
MALPVTALLLPLALLLHAARPEVQLVESGGGLVQPGGSLRLSCAASGFSFSDFWMSWVRQAPGKGLEWVATISQAGSEKDYVDSVKGRFTISRDNAKKSLYLQMNSLRAEDTAVYYCASGVYSFDYRGQGTLVTVSSGTGGGGSGGGGSGGGGSEFDIQLTQSPSSLSASVGDRVTITCKASQDVGTSVAWYQQKPGKAPKLLIYWTSTRHTGVPSRFSGSGSGTDFTFTISSLQPEDIATYYCQQYSLYRSFGQGTKVEIKLEGQPKANPTVTLFPPSSEELQANKATLVCLISDFYPGAVTVAWKADGSPVKAGVETTKPSKQSNNKYAASSYLSLTPEQWKSHRSYSCQVTHEGSTVEKTVAPTECSPIKTDVITMDPKDNCSKDANDTLLLQLTNTSAYYMYLLLLLKSVVYFAIITCCLLRRTAFCCNGEKSRAKRSGSGATNFSLLKQAGDVEENPGPTSMDWIWRILFLVGAATGAHSGPQLQLQESGPGLVKPSETLSLTCTVSGDSISSGDYYWGWIRQPPGKGLEWIGHIYYSGVTYYNPSLKSRVTISVDTSRNQFSLKLSSVTAADTAVYYCTREDSSNWRSRGQGTLVTVSSGSGGGGSGGGGSGGGGSFEEVQLVESGGGVVQPGRSLRLSCSASGFDFTTYWMSWVRQAPGKGLEWIGEIHPDSSTINYAPSLKDRFTISRDNAKNTLFLQMDSLRPEDTGVYFCASLYFGFPWFAYWGQGTPVTVSSTRASTKGPSVFPLAPSSKSTSGGTAALGCLVKDYFPEPVTVSWNSGALTSGVHTFPAVLQSSGLYSLSSVVTVPSSSLGTQTYICNVNHKPSNTKVDKRVEPKSCEVKTDSTDHVKPKETENTKQPSKSCHKPKAIVHTEKVNMMSLTVLGLRMLFAKTVAVNFLLTAKLFFL

SEQ ID NO: 19474 - protein, 897 aa, Artificial Sequence
  Synthetic Polypeptide
MALPVTALLLPLALLLHAARPEVQLVESGGGLVQPGGSLRLSCAASGFSFSDFWMSWVRQAPGKGLEWVATISQAGSEKDYVDSVKGRFTISRDNAKKSLYLQMNSLRAEDTAVYYCASGVYSFDYRGQGTLVTVSSGTGGGGSGGGGSGGGGSEFDIQLTQSPSSLSASVGDRVTITCKASQDVGTSVAWYQQKPGKAPKLLIYWTSTRHTGVPSRFSGSGSGTDFTFTISSLQPEDIATYYCQQYSLYRSFGQGTKVEIKLEGQPKANPTVTLFPPSSEELQANKATLVCLISDFYPGAVTVAWKADGSPVKAGVETTKPSKQSNNKYAASSYLSLTPEQWKSHRSYSCQVTHEGSTVEKTVAPTECSGRADCGFTSESYQQGVLSATILYEILLGKATLYAVLVSALVLMAMVKRKDSRGRAKRSGSGVKQTLNFDLLKLAGDVESNPGPTSMDWIWRILFLVGAATGAHSGPQLQLQESGPGLVKPSETLSLTCTVSGDSISSGDYYWGWIRQPPGKGLEWIGHIYYSGVTYYNPSLKSRVTISVDTSRNQFSLKLSSVTAADTAVYYCTREDSSNWRSRGQGTLVTVSSGSGGGGSGGGGSGGGGSFEEVQLVESGGGVVQPGRSLRLSCSASGFDFTTYWMSWVRQAPGKGLEWIGEIHPDSSTINYAPSLKDRFTISRDNAKNTLFLQMDSLRPEDTGVYFCASLYFGFPWFAYWGQGTPVTVSSTRASTKGPSVFPLAPSSKSTSGGTAALGCLVKDYFPEPVTVSWNSGALTSGVHTFPAVLQSSGLYSLSSVVTVPSSSLGTQTYICNVNHKPSNTKVDKRVEPKSCIPEDTFFPSPESSCDVKLVEKSFETDTNLNFQNLSVIGFRILLLKVAGFNLLMTLRLWSS

SEQ ID NO: 19475 - protein, 754 aa, Artificial Sequence
  Synthetic Polypeptide
MALPVTALLLPLALLLHAARPEVQVLESGGGLVQPGGSLRLSCAASGFTFSNFAMSWVRQAPGKGLEWVSTISGSAGTTDYADSVKGRFTISRDNSKKTLYLQMNSLRVEDTAVYYCADGRGPFFDYRGQGTLVTVSSGTGGGGSGGGGSGGGGSEFDIQLTQSPSSLSASVGDRVTITCKASQDVGTSVAWYQQKPGKAPKLLIYWTSTRHTGVPSRFSGSGSGTDFTFTISSLQPEDIATYYCQQYSLYRSFGQGTKVEIKLEDLKNVFPPEVAVFEPSEAEISHTQKATLVCLATGFYPDHVELSWWVNGKEVHSGVCTDPQPLKEQPALNDSRYCLSSRLRVSATFWQNPRNHFRCQVQFYGLSENDEWTQDRAKPVTQIVSAEAWGRADCGFTSESYQQGVLSATILYEILLGKATLYAVLVSALVLMAMVKRKDSRGRAKRSGSGATNFSLLKQAGDVEENPGPTSMDWIWRILFLVGAATGAHSFEEVQLVESGGGVVQPGRSLRLSCSASGFDFTTYWMSWVRQAPGKGLEWIGEIHPDSSTINYAPSLKDRFTISRDNAKNTLFLQMDSLRPEDTGVYFCASLYFGFPWFAYWGQGTPVTVSSTRIQNPDPAVYQLRDSKSSDKSVCLFTDFDSQTNVSQSKDSDVYITDKCVLDMRSMDFKSNSAVAWSNKSDFACANAFNNSIIPEDTFFPSPESSCDVKLVEKSFETDTNLNFQNLSVIGFRILLLKVAGFNLLMTLRLWSS

SEQ ID NO: 19476 - protein, 755 aa, Artificial Sequence
  Synthetic Polypeptide
MALPVTALLLPLALLLHAARPDIQLTQSPSSLSASVGDRVTITCKASQDVGTSVAWYQQKPGKAPKLLIYWTSTRHTGVPSRFSGSGSGTDFTFTISSLQPEDIATYYCQQYSLYRSFGQGTKVEIKLEDLKNVFPPEVAVFEPSEAEISHTQKATLVCLATGFYPDHVELSWWVNGKEVHSGVCTDPQPLKEQPALNDSRYCLSSRLRVSATFWQNPRNHFRCQVQFYGLSENDEWTQDRAKPVTQIVSAEAWGRADCGFTSESYQQGVLSATILYEILLGKATLYAVLVSALVLMAMVKRKDSRGRAKRSGSGATNFSLLKQAGDVEENPGPTSMDWIWRILFLVGAATGAHSGPEVQLVESGGGLVQAGGSLRLSCAASGRTFSMGWFRQAPGKEREFVAAITYSGGSPYYADSVKGRFTISRDNAKNTVYLQMNSLKPEDTAVYYCAANPTYGSDWNAENWGQGTQVTVSSGSGGGGSGGGGSGGGGSFEEVQLVESGGGVVQPGRSLRLSCSASGFDFTTYWMSWVRQAPGKGLEWIGEIHPDSSTINYAPSLKDRFTISRDNAKNTLFLQMDSLRPEDTGVYFCASLYFGFPWFAYWGQGTPVTVSSTRIQNPDPAVYQLRDSKSSDKSVCLFTDFDSQTNVSQSKDSDVYITDKCVLDMRSMDFKSNSAVAWSNKSDFACANAFNNSIIPEDTFFPSPESSCDVKLVEKSFETDTNLNFQNLSVIGFRILLLKVAGFNLLMTLRLWSS

SEQ ID NO: 19477 - protein, 882 aa, Artificial Sequence
  Synthetic Polypeptide
MALPVTALLLPLALLLHAARPDIQLTQSPSSLSASVGDRVTITCKASQDVGTSVAWYQQKPGKAPKLLIYWTSTRHTGVPSRFSGSGSGTDFTFTISSLQPEDIATYYCQQYSLYRSFGQGTKVEIKLEDLKNVFPPEVAVFEPSEAEISHTQKATLVCLATGFYPDHVELSWWVNGKEVHSGVCTDPQPLKEQPALNDSRYCLSSRLRVSATFWQNPRNHFRCQVQFYGLSENDEWTQDRAKPVTQIVSAEAWGRADCGFTSESYQQGVLSATILYEILLGKATLYAVLVSALVLMAMVKRKDSRGRAKRSGSGATNFSLLKQAGDVEENPGPTSMDWIWRILFLVGAATGAHSQLQLQESGPGLVKPSETLSLTCTVSGGSISSGDYYWGWIRQPPGKGLEWIGSISYSGSTYYNPSLKSRVTISVDTSRNQFSLKLSSVTAADTAVYYCTREDSSNWRSRGQGTLVTVSSSGGGGSGGGGSEVQLVESGGGLVQAGGSLRLSCAASGRTFSMGWFRQAPGKEREFVAAITYSGGSPYYADSVKGRFTISRDNAKNTVYLQMNSLKPEDTAVYYCAANPTYGSDWNAENWGQGTQVTVSSGSGGGGSGGGGSGGGGSFEEVQLVESGGGVVQPGRSLRLSCSASGFDFTTYWMSWVRQAPGKGLEWIGEIHPDSSTINYAPSLKDRFTISRDNAKNTLFLQMDSLRPEDTGVYFCASLYFGFPWFAYWGQGTPVTVSSTRIQNPDPAVYQLRDSKSSDKSVCLFTDFDSQTNVSQSKDSDVYITDKCVLDMRSMDFKSNSAVAWSNKSDFACANAFNNSIIPEDTFFPSPESSCDVKLVEKSFETDTNLNFQNLSVIGFRILLLKVAGFNLLMTLRLWSS

SEQ ID NO: 19478 - protein, 891 aa, Artificial Sequence
  Synthetic Polypeptide
MALPVTALLLPLALLLHAARPEVQVLESGGGLVQPGGSLRLSCAASGFTFSNFAMSWVRQAPGKGLEWVSTISGSAGTTDYADSVKGRFTISRDNSKKTLYLQMNSLRVEDTAVYYCADGRGPFFDYRGQGTLVTVSSGTGGGGSGGGGSGGGGSEFDIQLTQSPSSLSASVGDRVTITCKASQDVGTSVAWYQQKPGKAPKLLIYWTSTRHTGVPSRFSGSGSGTDFTFTISSLQPEDIATYYCQQYSLYRSFGQGTKVEIKLEDLKNVFPPEVAVFEPSEAEISHTQKATLVCLATGFYPDHVELSWWVNGKEVHSGVCTDPQPLKEQPALNDSRYCLSSRLRVSATFWQNPRNHFRCQVQFYGLSENDEWTQDRAKPVTQIVSAEAWGRADCGFTSESYQQGVLSATILYEILLGKATLYAVLVSALVLMAMVKRKDSRGRAKRSGSGATNFSLLKQAGDVEENPGPTSMDWIWRILFLVGAATGAHSGPEVQLVESGGGLVQAGGSLRLSCAASGRTFSMGWFRQAPGKEREFVAAITYSGGSPYYASSVRGRFTISRDNAKNTVYLQMNSLKPEDTAVYYCAANPTYGSDWNAENWGQGTQVTVSSGSGGGGSGGGGSGGGGSFEEVQLVESGGGVVQPGRSLRLSCSASGFDFTTYWMSWVRQAPGKGLEWIGEIHPDSSTINYAPSLKDRFTISRDNAKNTLFLQMDSLRPEDTGVYFCASLYFGFPWFAYWGQGTPVTVSSTRIQNPDPAVYQLRDSKSSDKSVCLFTDFDSQTNVSQSKDSDVYITDKCVLDMRSMDFKSNSAVAWSNKSDFACANAFNNSIIPEDTFFPSPESSCDVKLVEKSFETDTNLNFQNLSVIGFRILLLKVAGFNLLMTLRLWSS

SEQ ID NO: 19479 - protein, 726 aa, Artificial Sequence
  Synthetic Polypeptide
MALPVTALLLPLALLLHAARPDIQLTQSPSSLSASVGDRVTITCSTSSSVSYMHWYQQKPGKAPKLLIYSTSNLASGVPSRFSGSGSGTDFTFTISSLQPEDIATYYCHQWSSYPTFGQGTKVEIKGGGGSGGGGSGGGGSGVHSQVQLQESGPGLVRPSQTLSLTCTVSGFTISSGYSWHWVRQPPGRGLEWIGYIQYSGITNYNPSLKSRVTMLVDTSKNQFSLRLSSVTAADTAVYYCAREDYDYHWYFDVWGQGTTVTVSSTREQKLISEEDLAKPTTTPAPRPPTPAPTIASQPLSLRPEACRPAAGGAVHTRGLDFACDIYIWAPLAGTCGVLLLSLVITLYCKRGRKKLLYIFKQPFMRPVQTTQEEDGCSCRFPEEEEGGCELRVKFSRSADAPAYQQGQNQLYNELNLGRREEYDVLDKRRGRDPEMGGKPRRKNPQEGLYNELQKDKMAEAYSEIGMKGERRRGKGHDGLYQGLSTATKDTYDALHMQALPPRSSGSGEGRGSLLTCGDVEENPGPHMTEYKPTVRLATRDDVPRAVRTLAAAFADYPATRHTVDPDRHIERVTELQELFLTRVGLDIGKVWVADDGAAVAVWTTPESVEAGAVFAEIGPRMAELSGSRLAAQQQMEGLLAPHRPKEPAWFLATVGVSPDHQGKGLGSAVVLPGVEAAERAGVPAFLETSAPRNLPFYERLGFTVTADVEVPEGPRTWCMTRKPGA

SEQ ID NO: 19480 - protein, 720 aa, Artificial Sequence
  Synthetic Polypeptide
MALPVTALLLPLALLLHAARPDIQLTQSPSSLSASVGDRVTITCSTSSSVSYMHWYQQKPGKAPKLLIYSTSNLASGVPSRFSGSGSGTDFTFTISSLQPEDIATYYCHQWSSYPTFGQGTKVEIKGGGGSGGGGSGGGGSGVHSQVQLQESGPGLVRPSQTLSLTCTVSGFTISSGYSWHWVRQPPGRGLEWIGYIQYSGITNYNPSLKSRVTMLVDTSKNQFSLRLSSVTAADTAVYYCAREDYDYHWYFDVWGQGTTVTVSSTREQKLISEEDLKIEVMYPPPYLDNEKSNGTIIHVKGKHLCPSPLFPGPSKPFWVLVVVGGVLACYSLLVTVAFIIFWVRSKRSRLLHSDYMNMTPRRPGPTRKHYQPYAPPRDFAAYRSRVKFSRSADAPAYQQGQNQLYNELNLGRREEYDVLDKRRGRDPEMGGKPRRKNPQEGLYNELQKDKMAEAYSEIGMKGERRRGKGHDGLYQGLSTATKDTYDALHMQALPPRSSGSGEGRGSLLTCGDVEENPGPHMTEYKPTVRLATRDDVPRAVRTLAAAFADYPATRHTVDPDRHIERVTELQELFLTRVGLDIGKVWVADDGAAVAVWTTPESVEAGAVFAEIGPRMAELSGSRLAAQQQMEGLLAPHRPKEPAWFLATVGVSPDHQGKGLGSAVVLPGVEAAERAGVPAFLETSAPRNLPFYERLGFTVTADVEVPEGPRTWCMTRKPGA

SEQ ID NO: 19481 - protein, 497 aa, Artificial Sequence
  Synthetic Polypeptide
MALPVTALLLPLALLLHAARPDIQLTQSPSSLSASVGDRVTITCSTSSSVSYMHWYQQKPGKAPKLLIYSTSNLASGVPSRFSGSGSGTDFTFTISSLQPEDIATYYCHQWSSYPTFGQGTKVEIKGGGGSGGGGSGGGGSGVHSQVQLQESGPGLVRPSQTLSLTCTVSGFTISSGYSWHWVRQPPGRGLEWIGYIQYSGITNYNPSLKSRVTMLVDTSKNQFSLRLSSVTAADTAVYYCAREDYDYHWYFDVWGQGTTVTVSSTREQKLISEEDLKIEVMYPPPYLDNEKSNGTIIHVKGKHLCPSPLFPGPSKPFWVLVVVGGVLACYSLLVTVAFIIFWVRSKRSRLLHSDYMNMTPRRPGPTRKHYQPYAPPRDFAAYRSRVKFSRSADAPAYQQGQNQLYNELNLGRREEYDVLDKRRGRDPEMGGKPRRKNPQEGLYNELQKDKMAEAYSEIGMKGERRRGKGHDGLYQGLSTATKDTYDALHMQALPPR

SEQ ID NO: 19482 - protein, 503 aa, Artificial Sequence
  Synthetic Polypeptide
MALPVTALLLPLALLLHAARPDIQLTQSPSSLSASVGDRVTITCSTSSSVSYMHWYQQKPGKAPKLLIYSTSNLASGVPSRFSGSGSGTDFTFTISSLQPEDIATYYCHQWSSYPTFGQGTKVEIKGGGGSGGGGSGGGGSGVHSQVQLQESGPGLVRPSQTLSLTCTVSGFTISSGYSWHWVRQPPGRGLEWIGYIQYSGITNYNPSLKSRVTMLVDTSKNQFSLRLSSVTAADTAVYYCAREDYDYHWYFDVWGQGTTVTVSSTREQKLISEEDLAKPTTTPAPRPPTPAPTIASQPLSLRPEACRPAAGGAVHTRGLDFACDIYIWAPLAGTCGVLLLSLVITLYCKRGRKKLLYIFKQPFMRPVQTTQEEDGCSCRFPEEEEGGCELRVKFSRSADAPAYQQGQNQLYNELNLGRREEYDVLDKRRGRDPEMGGKPRRKNPQEGLYNELQKDKMAEAYSEIGMKGERRRGKGHDGLYQGLSTATKDTYDALHMQALPPR

SEQ ID NO: 19483 - protein, 503 aa, Artificial Sequence
  Synthetic Polypeptide
MALPVTALLLPLALLLHAARPGVHSQVQLQESGPGLVRPSQTLSLTCTVSGFTISSGYSWHWVRQPPGRGLEWIGYIQYSGITNYNPSLKSRVTMLVDTSKNQFSLRLSSVTAADTAVYYCAREDYDYHWYFDVWGQGTTVTVSSGGGGSGGGGSGGGGSDIQLTQSPSSLSASVGDRVTITCSTSSSVSYMHWYQQKPGKAPKLLIYSTSNLASGVPSRFSGSGSGTDFTFTISSLQPEDIATYYCHQWSSYPTFGQGTKVEIKTREQKLISEEDLAKPTTTPAPRPPTPAPTIASQPLSLRPEACRPAAGGAVHTRGLDFACDIYIWAPLAGTCGVLLLSLVITLYCKRGRKKLLYIFKQPFMRPVQTTQEEDGCSCRFPEEEEGGCELRVKFSRSADAPAYQQGQNQLYNELNLGRREEYDVLDKRRGRDPEMGGKPRRKNPQEGLYNELQKDKMAEAYSEIGMKGERRRGKGHDGLYQGLSTATKDTYDALHMQALPPR

SEQ ID NO: 19484 - protein, 916 aa, Artificial Sequence
  Synthetic Polypeptide
MALPVTALLLPLALLLHAARPDIQLTQSPSSLSASVGDRVTITCSTSSSVSYMHWYQQKPGKAPKLLIYSTSNLASGVPSRFSGSGSGTDFTFTISSLQPEDIATYYCHQWSSYPTFGQGTKVEIKGGGGSGGGGSGGGGSGVHSQVQLQESGPGLVRPSQTLSLTCTVSGFTISSGYSWHWVRQPPGRGLEWIGYIQYSGITNYNPSLKSRVTMLVDTSKNQFSLRLSSVTAADTAVYYCAREDYDYHWYFDVWGQGTTVTVSSTREQKLISEEDLAKPTTTPAPRPPTPAPTIASQPLSLRPEACRPAAGGAVHTRGLDFACDIYIWAPLAGTCGVLLLSLVITLYCGRARVKFSRSADAPAYQQGQNQLYNELNLGRREEYDVLDKRRGRDPEMGGKPRRKNPQEGLYNELQKDKMAEAYSEIGMKGERRRGKGHDGLYQGLSTATKDTYDALHMQALPPRSRGSGATNFSLLKQAGDVEENPGPGIHMATYEVLCEVARKLGTDDREVVLFLLNVFIPQPTLAQLIGALRALKEEGRLTFPLLAECLFRAGRRDLLRDLLHLDPRFLERHLAGTMSYFSPYQLTVLHVDGELCARDIRSLIFLSKDTIGSRSTPQTFLHWVYCMENLDLLGPTDVDALMSMLRSLSRVDLQRQVQTLMGLHLSGPSHSQHYRHTPLETDFYDYKDDDDKTSGSGEGRGSLLTCGDVEENPGPHMTEYKPTVRLATRDDVPRAVRTLAAAFADYPATRHTVDPDRHIERVTELQELFLTRVGLDIGKVWVADDGAAVAVWTTPESVEAGAVFAEIGPRMAELSGSRLAAQQQMEGLLAPHRPKEPAWFLATVGVSPDHQGKGLGSAVVLPGVEAAERAGVPAFLETSAPRNLPFYERLGFTVTADVEVPEGPRTWCMTRKPGA

SEQ ID NO: 19485 - protein, 856 aa, Artificial Sequence
  Synthetic Polypeptide
MALPVTALLLPLALLLHAARPDIQLTQSPSSLSASVGDRVTITCSTSSSVSYMHWYQQKPGKAPKLLIYSTSNLASGVPSRFSGSGSGTDFTFTISSLQPEDIATYYCHQWSSYPTFGQGTKVEIKLEIQNPDPAVYQLRDSKSSDKSVCLFTDFDSQTNVSQSKDSDVYITDKCVLDMRSMDFKSNSAVAWSNKSDFACANAFNNSIIPEDTFFPSSDVPCDVKLVEKSFETDTNLNFQNLSVIGFRILLLKVAGFNLLMTLRLWSSRAKRSGSGVKQTLNFDLLKLAGDVESNPGPTSMDWIWRILFLVGAATGAHSFEGVHSQVQLQESGPGLVRPSQTLSLTCTVSGFTISSGYSWHWVRQPPGRGLEWIGYIQYSGITNYNPSLKSRVTMLVDTSKNQFSLRLSSVTAADTAVYYCAREDYDYHWYFDVWGQGTTVTVSSTREDLKNVFPPEVAVFEPSKAEIAHTQKATLVCLATGFYPDHVELSWWVNGKEVHSGVCTDPQPLKEQPALNDSRYCLSSRLRVSATFWQNPRNHFRCQVQFYGLSENDEWTQDRAKPVTQIVSAEAWGRADCGITSASYHQGVLSATILYEILLGKATLYAVLVSALVLMAMVKRKDSRGRAKRSGSGATNFSLLKQAGDVEENPGPSRGHMTEYKPTVRLATRDDVPRAVRTLAAAFADYPATRHTVDPDRHIERVTELQELFLTRVGLDIGKVWVADDGAAVAVWTTPESVEAGAVFAEIGPRMAELSGSRLAAQQQMEGLLAPHRPKEPAWFLATVGVSPDHQGKGLGSAVVLPGVEAAERAGVPAFLETSAPRNLPFYERLGFTVTADVEVPEGPRTWCMTRKPGA

SEQ ID NO: 19486 - protein, 855 aa, Artificial Sequence
  Synthetic Polypeptide
MALPVTALLLPLALLLHAARPDIQLTQSPSSLSASVGDRVTITCSTSSSVSYMHWYQQKPGKAPKLLIYSTSNLASGVPSRFSGSGSGTDFTFTISSLQPEDIATYYCHQWSSYPTFGQGTKVEIKLEDLKNVFPPEVAVFEPSKAEIAHTQKATLVCLATGFYPDHVELSWWVNGKEVHSGVCTDPQPLKEQPALNDSRYCLSSRLRVSATFWQNPRNHFRCQVQFYGLSENDEWTQDRAKPVTQIVSAEAWGRADCGITSASYHQGVLSATILYEILLGKATLYAVLVSALVLMAMVKRKDSRGRAKRSGSGATNFSLLKQAGDVEENPGPTSMDWIWRILFLVGAATGAHSFEGVHSQVQLQESGPGLVRPSQTLSLTCTVSGFTISSGYSWHWVRQPPGRGLEWIGYIQYSGITNYNPSLKSRVTMLVDTSKNQFSLRLSSVTAADTAVYYCAREDYDYHWYFDVWGQGTTVTVSSTRIQNPDPAVYQLRDSKSSDKSVCLFTDFDSQTNVSQSKDSDVYITDKCVLDMRSMDFKSNSAVAWSNKSDFACANAFNNSIIPEDTFFPSSDVPCDVKLVEKSFETDTNLNFQNLSVIGFRILLLKVAGFNLLMTLRLWSSRAKRSGSGVKQTLNFDLLKLAGDVESNPGPSRGHMTEYKPTVRLATRDDVPRAVRTLAAAFADYPATRHTVDPDRHIERVTELQELFLTRVGLDIGKVWVADDGAAVAVWTTPESVEAGAVFAEIGPRMAELSGSRLAAQQQMEGLLAPHRPKEPAWFLATVGVSPDHQGKGLGSAVVLPGVEAAERAGVPAFLETSAPRNLPFYERLGFTVTADVEVPEGPRTWCMTRKPGA

SEQ ID NO: 19487 - protein, 622 aa, Artificial Sequence
  Synthetic Polypeptide
MALPVTALLLPLALLLHAARPDIQLTQSPSSLSASVGDRVTITCSTSSSVSYMHWYQQKPGKAPKLLIYSTSNLASGVPSRFSGSGSGTDFTFTISSLQPEDIATYYCHQWSSYPTFGQGTKVEIKLEDLKNVFPPEVAVFEPSEAEISHTQKATLVCLATGFYPDHVELSWWVNGKEVHSGVCTDPQPLKEQPALNDSRYCLSSRLRVSATFWQNPRNHFRCQVQFYGLSENDEWTQDRAKPVTQIVSAEAWGRADCGFTSESYQQGVLSATILYEILLGKATLYAVLVSALVLMAMVKRKDSRGRAKRSGSGATNFSLLKQAGDVEENPGPTSMDWIWRILFLVGAATGAHSFEGVHSQVQLQESGPGLVRPSQTLSLTCTVSGFTISSGYSWHWVRQPPGRGLEWIGYIQYSGITNYNPSLKSRVTMLVDTSKNQFSLRLSSVTAADTAVYYCAREDYDYHWYFDVWGQGTTVTVSSTRIQNPDPAVYQLRDSKSSDKSVCLFTDFDSQTNVSQSKDSDVYITDKCVLDMRSMDFKSNSAVAWSNKSDFACANAFNNSIIPEDTFFPSPESSCDVKLVEKSFETDTNLNFQNLSVIGFRILLLKVAGFNLLMTLRLWSS

SEQ ID NO: 19488 - protein, 847 aa, Artificial Sequence
  Synthetic Polypeptide
MALPVTALLLPLALLLHAARPDIQLTQSPSSLSASVGDRVTITCSTSSSVSYMHWYQQKPGKAPKLLIYSTSNLASGVPSRFSGSGSGTDFTFTISSLQPEDIATYYCHQWSSYPTFGQGTKVEIKLEDLKNVFPPEVAVFEPSEAEISHTQKATLVCLATGFYPDHVELSWWVNGKEVHSGVCTDPQPLKEQPALNDSRYCLSSRLRVSATFWQNPRNHFRCQVQFYGLSENDEWTQDRAKPVTQIVSAEAWGRADCGFTSESYQQGVLSATILYEILLGKATLYAVLVSALVLMAMVKRKDSRGRAKRSGSGATNFSLLKQAGDVEENPGPTSMDWIWRILFLVGAATGAHSFEGVHSQVQLQESGPGLVRPSQTLSLTCTVSGFTISSGYSWHWVRQPPGRGLEWIGYIQYSGITNYNPSLKSRVTMLVDTSKNQFSLRLSSVTAADTAVYYCAREDYDYHWYFDVWGQGTTVTVSSTRIQNPDPAVYQLRDSKSSDKSVCLFTDFDSQTNVSQSKDSDVYITDKCVLDMRSMDFKSNSAVAWSNKSDFACANAFNNSIIPEDTFFPSPESSCDVKLVEKSFETDTNLNFQNLSVIGFRILLLKVAGFNLLMTLRLWSSRAKRSGSGVKQTLNFDLLKLAGDVESNPGPSRGGIHTMATYEVLCEVARKLGTDDREVVLFLLNVFIPQPTLAQLIGALRALKEEGRLTFPLLAECLFRAGRRDLLRDLLHLDPRFLERHLAGTMSYFSPYQLTVLHVDGELCARDIRSLIFLSKDTIGSRSTPQTFLHWVYCMENLDLLGPTDVDALMSMLRSLSRVDLQRQVQTLMGLHLSGPSHSQHYRHTP

SEQ ID NO: 19489 - protein, 626 aa, Artificial Sequence
  Synthetic Polypeptide
MALPVTALLLPLALLLHAARPDIQLTQSPSSLSASVGDRVTITCSTSSSVSYMHWYQQKPGKAPKLLIYSTSNLASGVPSRFSGSGSGTDFTFTISSLQPEDIATYYCHQWSSYPTFGQGTKVEIKLEIQNPDPAVYQLRDSKSSDKSVCLFTDFDSQTNVSQSKDSDVYITDKCVLDMRSMDFKSNSAVAWSNKSDFACANAFNNSIIPEDTFFPSPESSCDVKLVEKSFETDTNLNFQNLSVIGFRILLLKVAGFNLLMTLRLWSSRAKRSGSGVKQTLNFDLLKLAGDVESNPGPTSMDWIWRILFLVGAATGAHSFEGVHSQVQLQESGPGLVRPSQTLSLTCTVSGFTISSGYSWHWVRQPPGRGLEWIGYIQYSGITNYNPSLKSRVTMLVDTSKNQFSLRLSSVTAADTAVYYCAREDYDYHWYFDVWGQGTTVTVSSTREDLKNVFPPEVAVFEPSEAEISHTQKATLVCLATGFYPDHVELSWWVNGKEVHSGVCTDPQPLKEQPALNDSRYCLSSRLRVSATFWQNPRNHFRCQVQFYGLSENDEWTQDRAKPVTQIVSAEAWGRADCGFTSESYQQGVLSATILYEILLGKATLYAVLVSALVLMAMVKRKDSRG

SEQ ID NO: 19490 - protein, 848 aa, Artificial Sequence
  Synthetic Polypeptide
MALPVTALLLPLALLLHAARPDIQLTQSPSSLSASVGDRVTITCSTSSSVSYMHWYQQKPGKAPKLLIYSTSNLASGVPSRFSGSGSGTDFTFTISSLQPEDIATYYCHQWSSYPTFGQGTKVEIKLEIQNPDPAVYQLRDSKSSDKSVCLFTDFDSQTNVSQSKDSDVYITDKCVLDMRSMDFKSNSAVAWSNKSDFACANAFNNSIIPEDTFFPSPESSCDVKLVEKSFETDTNLNFQNLSVIGFRILLLKVAGFNLLMTLRLWSSRAKRSGSGVKQTLNFDLLKLAGDVESNPGPTSMDWIWRILFLVGAATGAHSFEGVHSQVQLQESGPGLVRPSQTLSLTCTVSGFTISSGYSWHWVRQPPGRGLEWIGYIQYSGITNYNPSLKSRVTMLVDTSKNQFSLRLSSVTAADTAVYYCAREDYDYHWYFDVWGQGTTVTVSSTREDLKNVFPPEVAVFEPSEAEISHTQKATLVCLATGFYPDHVELSWWVNGKEVHSGVCTDPQPLKEQPALNDSRYCLSSRLRVSATFWQNPRNHFRCQVQFYGLSENDEWTQDRAKPVTQIVSAEAWGRADCGFTSESYQQGVLSATILYEILLGKATLYAVLVSALVLMAMVKRKDSRGRAKRSGSGATNFSLLKQAGDVEENPGPSRGGIHTMATYEVLCEVARKLGTDDREVVLFLLNVFIPQPTLAQLIGALRALKEEGRLTFPLLAECLFRAGRRDLLRDLLHLDPRFLERHLAGTMSYFSPYQLTVLHVDGELCARDIRSLIFLSKDTIGSRSTPQTFLHWVYCMENLDLLGPTDVDALMSMLRSLSRVDLQRQVQTLMGLHLSGPSHSQHYRHTP

SEQ ID NO: 19491 - protein, 900 aa, Artificial Sequence
  Synthetic Polypeptide
MALPVTALLLPLALLLHAARPLEGKPIPNPLLGLDSTGSGEDLKNVFPPEVAVFEPSKAEIAHTQKATLVCLATGFYPDHVELSWWVNGKEVHSGVCTDPQPLKEQPALNDSRYCLSSRLRVSATFWQNPRNHFRCQVQFYGLSENDEWTQDRAKPVTQIVSAEAWGRADCGITSASYHQGVLSATILYEILLGKATLYAVLVSALVLMAMVKRKDSRGRAKRSGSGATNFSLLKQAGDVEENPGPTSMALPVTALLLPLALLLHAARPDIQLTQSPSSLSASVGDRVTITCSTSSSVSYMHWYQQKPGKAPKLLIYSTSNLASGVPSRFSGSGSGTDFTFTISSLQPEDIATYYCHQWSSYPTFGQGTKVEIKGGGGSGGGGSGGGGSGVHSQVQLQESGPGLVRPSQTLSLTCTVSGFTISSGYSWHWVRQPPGRGLEWIGYIQYSGITNYNPSLKSRVTMLVDTSKNQFSLRLSSVTAADTAVYYCAREDYDYHWYFDVWGQGTTVTVSSTREQKLISEEDGSGIQNPDPAVYQLRDSKSSDKSVCLFTDFDSQTNVSQSKDSDVYITDKCVLDMRSMDFKSNSAVAWSNKSDFACANAFNNSIIPEDTFFPSSDVPCDVKLVEKSFETDTNLNFQNLSVIGFRILLLKVAGFNLLMTLRLWSSRAKRSGSGVKQTLNFDLLKLAGDVESNPGPSRGHMTEYKPTVRLATRDDVPRAVRTLAAAFADYPATRHTVDPDRHIERVTELQELFLTRVGLDIGKVWVADDGAAVAVWTTPESVEAGAVFAEIGPRMAELSGSRLAAQQQMEGLLAPHRPKEPAWFLATVGVSPDHQGKGLGSAVVLPGVEAAERAGVPAFLETSAPRNLPFYERLGFTVTADVEVPEGPRTWCMTRKPGA

SEQ ID NO: 19492 - protein, 901 aa, Artificial Sequence
  Synthetic Polypeptide
MALPVTALLLPLALLLHAARPLEQKLISEEDLGSGDRPDPAVYQLRDSKSSDKSVCLFTDFDSQTNVSQSKDSDVYITDKCVLDMRSMDFKSNSAVAWSNKSDFACANAFNNSIIPEDTFFPSPESSCDVKLVEKSFETDTNLNFQNLSVIGFRILLLKVAGFNLLMTLRLWSSSSRAKRSGSGVKQTLNFDLLKLAGDVESNPGPTSMALPVTALLLPLALLLHAARPDIQLTQSPSSLSASVGDRVTITCSTSSSVSYMHWYQQKPGKAPKLLIYSTSNLASGVPSRFSGSGSGTDFTFTISSLQPEDIATYYCHQWSSYPTFGQGTKVEIKGGGGSGGGGSGGGGSGVHSQVQLQESGPGLVRPSQTLSLTCTVSGFTISSGYSWHWVRQPPGRGLEWIGYIQYSGITNYNPSLKSRVTMLVDTSKNQFSLRLSSVTAADTAVYYCAREDYDYHWYFDVWGQGTTVTVSSTRGKPIPNPLLGLDSTGSGEDLKNVFPPEVAVFEPSEAEISHTQKATLVCLATGFYPDHVELSWWVNGKEVHSGVCTDPQPLKEQPALNDSRYCLSSRLRVSATFWQNPRNHFRCQVQFYGLSENDEWTQDRAKPVTQIVSAEAWGRADCGFTSESYQQGVLSATILYEILLGKATLYAVLVSALVLMAMVKRKDSRGRAKRSGSGATNFSLLKQAGDVEENPGPSRGHMTEYKPTVRLATRDDVPRAVRTLAAAFADYPATRHTVDPDRHIERVTELQELFLTRVGLDIGKVWVADDGAAVAVWTTPESVEAGAVFAEIGPRMAELSGSRLAAQQQMEGLLAPHRPKEPAWFLATVGVSPDHQGKGLGSAVVLPGVEAAERAGVPAFLETSAPRNLPFYERLGFTVTADVEVPEGPRTWCMTRKPGA

SEQ ID NO: 19493 - protein, 855 aa, Artificial Sequence
  Synthetic Polypeptide
MALPVTALLLPLALLLHAARPDIQLTQSPSSLSASVGDRVTITCSTSSSVSYMHWYQQKPGKAPKLLIYSTSNLASGVPSRFSGSGSGTDFTFTISSLQPEDIATYYCHQWSSYPTFGQGTKVEIKLEDLKNVFPPEVAVFEPSEAEISHTQKATLVCLATGFYPDHVELSWWVNGKEVHSGVSTDPQPLKEQPALNDSRYCLSSRLRVSATFWQNPRNHFRCQVQFYGLSENDEWTQDRAKPVTQIVSAEAWGRADCGFTSESYQQGVLSATILYEILLGKATLYAVLVSALVLMAMVKRKDSRGRAKRSGSGATNFSLLKQAGDVEENPGPTSMDWIWRILFLVGAATGAHSFEGVHSQVQLQESGPGLVRPSQTLSLTCTVSGFTISSGYSWHWVRQPPGRGLEWIGYIQYSGITNYNPSLKSRVTMLVDTSKNQFSLRLSSVTAADTAVYYCAREDYDYHWYFDVWGQGTTVTVSSTRIQNPDPAVYQLRDSKSSDKSVCLFTDFDSQTNVSQSKDSDVYITDKTVLDMRSMDFKSNSAVAWSNKSDFACANAFNNSIIPEDTFFPSPESSCDVKLVEKSFETDTNLNFQNLSVIGFRILLLKVAGFNLLMTLRLWSSRAKRSGSGVKQTLNFDLLKLAGDVESNPGPSRGHMTEYKPTVRLATRDDVPRAVRTLAAAFADYPATRHTVDPDRHIERVTELQELFLTRVGLDIGKVWVADDGAAVAVWTTPESVEAGAVFAEIGPRMAELSGSRLAAQQQMEGLLAPHRPKEPAWFLATVGVSPDHQGKGLGSAVVLPGVEAAERAGVPAFLETSAPRNLPFYERLGFTVTADVEVPEGPRTWCMTRKPGA

SEQ ID NO: 19494 - protein, 937 aa, Artificial Sequence
  Synthetic Polypeptide
MALPVTALLLPLALLLHAARPDIQLTQSPSSLSASVGDRVTITCSTSSSVSYMHWYQQKPGKAPKLLIYSTSNLASGVPSRFSGSGSGTDFTFTISSLQPEDIATYYCHQWSSYPTFGQGTKVEIKLEDLKNVFPPEVAVFEPSEAEISHTQKATLVCLATGFYPDHVELSWWVNGKEVHSGVSTDPQPLKEQPALNDSRYCLSSRLRVSATFWQNPRNHFRCQVQFYGLSENDEWTQDRAKPVTQIVSAEAWGRADCGFTSESYQQGVLSATILYEILLGKATLYAVLVSALVLMAMVKRKDSRGRAKRSGSGATNFSLLKQAGDVEENPGPTSMDWIWRILFLVGAATGAHSFEGVHSQVQLQESGPGLVRPSQTLSLTCTVSGFTISSGYSWHWVRQPPGRGLEWIGYIQYSGITNYNPSLKSRVTMLVDTSKNQFSLRLSSVTAADTAVYYCAREDYDYHWYFDVWGQGTTVTVSSTREQKLISEEDGSGTPFPSLAPPIMLLVDGKQQMVVVCLVLDVAPPGLDSPIWFSAGNGSALDAFTYGPSPATDGTWTNLAHLSLPSEELASWEPLVCHTGPGAEGHSRSTQPMHLSGEASTARTCPQEPLRGTPGGALWLGVLRLLLFKLLLFDLLLTCSCLCDPAGPLPSPATTTRLRALGSHRLHPATETGGREATSSPRPQPRDRRWGDTPPGRKPGSPVRAKRSGSGVKQTLNFDLLKLAGDVESNPGPSRGHMTEYKPTVRLATRDDVPRAVRTLAAAFADYPATRHTVDPDRHIERVTELQELFLTRVGLDIGKVWVADDGAAVAVWTTPESVEAGAVFAEIGPRMAELSGSRLAAQQQMEGLLAPHRPKEPAWFLATVGVSPDHQGKGLGSAVVLPGVEAAERAGVPAFLETSAPRNLPFYERLGFTVTADVEVPEGPRTWCMTRKPGA

SEQ ID NO: 19495 - protein, 955 aa, Artificial Sequence
  Synthetic Polypeptide
MALPVTALLLPLALLLHAARPLEDLKNVFPPEVAVFEPSEAEISHTQKATLVCLATGFYPDHVELSWWVNGKEVHSGVSTDPQPLKEQPALNDSRYCLSSRLRVSATFWQNPRNHFRCQVQFYGLSENDEWTQDRAKPVTQIVSAEAWGRADCGFTSESYQQGVLSATILYEILLGKATLYAVLVSALVLMAMVKRKDSRGRAKRSGSGATNFSLLKQAGDVEENPGPTSMALPVTALLLPLALLLHAARPDIQLTQSPSSLSASVGDRVTITCSTSSSVSYMHWYQQKPGKAPKLLIYSTSNLASGVPSRFSGSGSGTDFTFTISSLQPEDIATYYCHQWSSYPTFGQGTKVEIKGGGGSGGGGSGGGGSGVHSQVQLQESGPGLVRPSQTLSLTCTVSGFTISSGYSWHWVRQPPGRGLEWIGYIQYSGITNYNPSLKSRVTMLVDTSKNQFSLRLSSVTAADTAVYYCAREDYDYHWYFDVWGQGTTVTVSSTREQKLISEEDLGSGTPFPSLAPPIMLLVDGKQQMVVVCLVLDVAPPGLDSPIWFSAGNGSALDAFTYGPSPATDGTWTNLAHLSLPSEELASWEPLVCHTGPGAEGHSRSTQPMHLSGEASTARTCPQEPLRGTPGGALWLGVLRLLLFKLLLFDLLLTCSCLCDPAGPLPSPATTTRLRALGSHRLHPATETGGREATSSPRPQPRDRRWGDTPPGRKPGSPVRAKRSGSGVKQTLNFDLLKLAGDVESNPGPSRSRGHMTEYKPTVRLATRDDVPRAVRTLAAAFADYPATRHTVDPDRHIERVTELQELFLTRVGLDIGKVWVADDGAAVAVWTTPESVEAGAVFAEIGPRMAELSGSRLAAQQQMEGLLAPHRPKEPAWFLATVGVSPDHQGKGLGSAVVLPGVEAAERAGVPAFLETSAPRNLPFYERLGFTVTADVEVPEGPRTWCMTRKPGA

SEQ ID NO: 19496 - protein, 892 aa, Artificial Sequence
  Synthetic Polypeptide
MALPVTALLLPLALLLHAARPDIQLTQSPSSLSASVGDRVTITCSTSSSVSYMHWYQQKPGKAPKLLIYSTSNLASGVPSRFSGSGSGTDFTFTISSLQPEDIATYYCHQWSSYPTFGQGTKVEIKLEGKPIPNPLLGLDSTGSGDKQLDADVSPKPTIFLPSIAETKLQKAGTYLCLLEKFFPDVIKIHWQEKKSNTILGSQEGNTMKTNDTYMKFSWLTVPEKSLDKEHRCIVRHENNKNGVDQEIIFPPIKTDVITMDPKDNCSKDANDTLLLQLTNTSAYYMYLLLLLKSVVYFAIITCCLLRRTAFCCNGEKSRAKRSGSGATNFSLLKQAGDVEENPGPTSMDWIWRILFLVGAATGAHSFEGVHSQVQLQESGPGLVRPSQTLSLTCTVSGFTISSGYSWHWVRQPPGRGLEWIGYIQYSGITNYNPSLKSRVTMLVDTSKNQFSLRLSSVTAADTAVYYCAREDYDYHWYFDVWGQGTTVTVSSTREQKLISEEDGSGSQPHTKPSVFVMKNGTNVACLVKEFYPKDIRINLVSSKKITEFDPAIVISPSGKYNAVKLGKYEDSNSVTCSVQHDNKTVHSTDFEVKTDSTDHVKPKETENTKQPSKSCHKPKAIVHTEKVNMMSLTVLGLRMLFAKTVAVNFLLTAKLFFLRAKRSGSGVKQTLNFDLLKLAGDVESNPGPSRGHMTEYKPTVRLATRDDVPRAVRTLAAAFADYPATRHTVDPDRHIERVTELQELFLTRVGLDIGKVWVADDGAAVAVWTTPESVEAGAVFAEIGPRMAELSGSRLAAQQQMEGLLAPHRPKEPAWFLATVGVSPDHQGKGLGSAVVLPGVEAAERAGVPAFLETSAPRNLPFYERLGFTVTADVEVPEGPRTWCMTRKPGA

SEQ ID NO: 19497 - protein, 630 aa, Artificial Sequence
  Synthetic Polypeptide
MALPVTALLLPLALLLHAARPDIQLTQSPSSLSASVGDRVTITCSTSSSVSYMHWYQQKPGKAPKLLIYSTSNLASGVPSRFSGSGSGTDFTFTISSLQPEDIATYYCHQWSSYPTFGQGTKVEIKLESQPHTKPSVFVMKNGTNVACLVKEFYPKDIRINLVSSKKITEFDPAIVISPSGKYNAVKLGKYEDSNSVTCSVQHDNKTVHSTDFEVKTDSTDHVKPKETENTKQPSKSCHKPKAIVHTEKVNMMSLTVLGLRMLFAKTVAVNFLLTAKLFFLRAKRSGSGATNFSLLKQAGDVEENPGPTSMDWIWRILFLVGAATGAHSFEGVHSQVQLQESGPGLVRPSQTLSLTCTVSGFTISSGYSWHWVRQPPGRGLEWIGYIQYSGITNYNPSLKSRVTMLVDTSKNQFSLRLSSVTAADTAVYYCAREDYDYHWYFDVWGQGTTVTVSSTRDKQLDADVSPKPTIFLPSIAETKLQKAGTYLCLLEKFFPDVIKIHWQEKKSNTILGSQEGNTMKTNDTYMKFSWLTVPEKSLDKEHRCIVRHENNKNGVDQEIIFPPIKTDVITMDPKDNCSKDANDTLLLQLTNTSAYYMYLLLLLKSVVYFAIITCCLLRRTAFCCNGEKS

SEQ ID NO: 19498 - protein, 907 aa, Artificial Sequence
  Synthetic Polypeptide
MALPVTALLLPLALLLHAARPLEGKPIPNPLLGLDSTGSGDKQLDADVSPKPTIFLPSIAETKLQKAGTYLCLLEKFFPDVIKIHWQEKKSNTILGSQEGNTMKTNDTYMKFSWLTVPEKSLDKEHRCIVRHENNKNGVDQEIIFPPIKTDVITMDPKDNCSKDANDTLLLQLTNTSAYYMYLLLLLKSVVYFAIITCCLLRRTAFCCNGEKSRAKRSGSGATNFSLLKQAGDVEENPGPTSMALPVTALLLPLALLLHAARPDIQLTQSPSSLSASVGDRVTITCSTSSSVSYMHWYQQKPGKAPKLLIYSTSNLASGVPSRFSGSGSGTDFTFTISSLQPEDIATYYCHQWSSYPTFGQGTKVEIKGGGGSGGGGSGGGGSGVHSQVQLQESGPGLVRPSQTLSLTCTVSGFTISSGYSWHWVRQPPGRGLEWIGYIQYSGITNYNPSLKSRVTMLVDTSKNQFSLRLSSVTAADTAVYYCAREDYDYHWYFDVWGQGTTVTVSSTREQKLISEEDGSGSQPHTKPSVFVMKNGTNVACLVKEFYPKDIRINLVSSKKITEFDPAIVISPSGKYNAVKLGKYEDSNSVTCSVQHDNKTVHSTDFEVKTDSTDHVKPKETENTKQPSKSCHKPKAIVHTEKVNMMSLTVLGLRMLFAKTVAVNFLLTAKLFFLRAKRSGSGVKQTLNFDLLKLAGDVESNPGPSRGHMTEYKPTVRLATRDDVPRAVRTLAAAFADYPATRHTVDPDRHIERVTELQELFLTRVGLDIGKVWVADDGAAVAVWTTPESVEAGAVFAEIGPRMAELSGSRLAAQQQMEGLLAPHRPKEPAWFLATVGVSPDHQGKGLGSAVVLPGVEAAERAGVPAFLETSAPRNLPFYERLGFTVTADVEVPEGPRTWCMTRKPGA

SEQ ID NO: 19499 - protein, 1032 aa, Artificial Sequence
  Synthetic Polypeptide
MALPVTALLLPLALLLHAARPDIQLTQSPSSLSASVGDRVTITCSTSSSVSYMHWYQQKPGKAPKLLIYSTSNLASGVPSRFSGSGSGTDFTFTISSLQPEDIATYYCHQWSSYPTFGQGTKVEIKGQPKANPTVTLFPPSSEELQANKATLVCLISDFYPGAVTVAWKADGSPVKAGVETTKPSKQSNNKYAASSYLSLTPEQWKSHRSYSCQVTHEGSTVEKTVAPTECSGSQSFGLLDPKLCYLLDGILFIYGVILTALFLRVKFSRSADAPAYQQGQNQLYNELNLGRREEYDVLDKRRGRDPEMGGKPQRRKNPQEGLYNELQKDKMAEAYSEIGMKGERRRGKGHDGLYQGLSTATKDTYDALHMQALPPRRAKRSGSGATNFSLLKQAGDVEENPGPTSMDWIWRILFLVGAATGAHSFEGVHSQVQLQESGPGLVRPSQTLSLTCTVSGFTISSGYSWHWVRQPPGRGLEWIGYIQYSGITNYNPSLKSRVTMLVDTSKNQFSLRLSSVTAADTAVYYCAREDYDYHWYFDVWGQGTTVTVSSASTKGPSVFPLAPSSKSTSGGTAALGCLVKDYFPEPVTVSWNSGALTSGVHTFPAVLQSSGLYSLSSVVTVPSSSLGTQTYICNVNHKPSNTKVDKRVEPKSCGTQSFGLLDPKLCYLLDGILFIYGVILTALFLRVKFSRSADAPAYQQGQNQLYNELNLGRREEYDVLDKRRGRDPEMGGKPQRRKNPQEGLYNELQKDKMAEAYSEIGMKGERRRGKGHDGLYQGLSTATKDTYDALHMQALPPRRAKRSGSGVKQTLNFDLLKLAGDVESNPGPSRGHMTEYKPTVRLATRDDVPRAVRTLAAAFADYPATRHTVDPDRHIERVTELQELFLTRVGLDIGKVWVADDGAAVAVWTTPESVEAGAVFAEIGPRMAELSGSRLAAQQQMEGLLAPHRPKEPAWFLATVGVSPDHQGKGLGSAVVLPGVEAAERAGVPAFLETSAPRNLPFYERLGFTVTADVEVPEGPRTWCMTRKPGA

SEQ ID NO: 19500 - protein, 818 aa, Artificial Sequence
  Synthetic Polypeptide
MALPVTALLLPLALLLHAARPDIQLTQSPSSLSASVGDRVTITCSTSSSVSYMHWYQQKPGKAPKLLIYSTSNLASGVPSRFSGSGSGTDFTFTISSLQPEDIATYYCHQWSSYPTFGQGTKVEIKLEDLKNVFPPEVAVFEPSEAEISHTQKATLVCLATGFYPDHVELSWWVNGKEVHSGVSTDPQPLKEQPALNDSRYCLSSRLRVSATFWQNPRNHFRCQVQFYGLSENDEWTQDRAKPVTQIVSAEAWGRADCGSQSFGLLDPKLCYLLDGILFIYGVILTALFLRVKFSRSADAPAYQQGQNQLYNELNLGRREEYDVLDKRRGRDPEMGGKPQRRKNPQEGLYNELQKDKMAEAYSEIGMKGERRRGKGHDGLYQGLSTATKDTYDALHMQALPPRRAKRSGSGATNFSLLKQAGDVEENPGPTSMDWIWRILFLVGAATGAHSFEGVHSQVQLQESGPGLVRPSQTLSLTCTVSGFTISSGYSWHWVRQPPGRGLEWIGYIQYSGITNYNPSLKSRVTMLVDTSKNQFSLRLSSVTAADTAVYYCAREDYDYHWYFDVWGQGTTVTVSSTRIQNPDPAVYQLRDSKSSDKSVCLFTDFDSQTNVSQSKDSDVYITDKTVLDMRSMDFKSNSAVAWSNKSDFACANAFNNSIIPEDTFFPSPESSCGTQSFGLLDPKLCYLLDGILFIYGVILTALFLRVKFSRSADAPAYQQGQNQLYNELNLGRREEYDVLDKRRGRDPEMGGKPQRRKNPQEGLYNELQKDKMAEAYSEIGMKGERRRGKGHDGLYQGLSTATKDTYDALHMQALPPR

SEQ ID NO: 19501 - protein, 818 aa, Artificial Sequence
  Synthetic Polypeptide
MALPVTALLLPLALLLHAARPDIQLTQSPSSLSASVGDRVTITCSTSSSVSYMHWYQQKPGKAPKLLIYSTSNLASGVPSRFSGSGSGTDFTFTISSLQPEDIATYYCHQWSSYPTFGQGTKVEIKLEDLKNVFPPEVAVFEPSKAEIAHTQKATLVCLATGFYPDHVELSWWVNGKEVHSGVCTDPQPLKEQPALNDSRYCLSSRLRVSATFWQNPRNHFRCQVQFYGLSENDEWTQDRAKPVTQIVSAEAWGRADCGSQSFGLLDPKLCYLLDGILFIYGVILTALFLRVKFSRSADAPAYQQGQNQLYNELNLGRREEYDVLDKRRGRDPEMGGKPQRRKNPQEGLYNELQKDKMAEAYSEIGMKGERRRGKGHDGLYQGLSTATKDTYDALHMQALPPRRAKRSGSGATNFSLLKQAGDVEENPGPTSMDWIWRILFLVGAATGAHSFEGVHSQVQLQESGPGLVRPSQTLSLTCTVSGFTISSGYSWHWVRQPPGRGLEWIGYIQYSGITNYNPSLKSRVTMLVDTSKNQFSLRLSSVTAADTAVYYCAREDYDYHWYFDVWGQGTTVTVSSTRIQNPDPAVYQLRDSKSSDKSVCLFTDFDSQTNVSQSKDSDVYITDKCVLDMRSMDFKSNSAVAWSNKSDFACANAFNNSIIPEDTFFPSSDVPCGTQSFGLLDPKLCYLLDGILFIYGVILTALFLRVKFSRSADAPAYQQGQNQLYNELNLGRREEYDVLDKRRGRDPEMGGKPQRRKNPQEGLYNELQKDKMAEAYSEIGMKGERRRGKGHDGLYQGLSTATKDTYDALHMQALPPR

SEQ ID NO: 19502 - protein, 889 aa, Artificial Sequence
  Synthetic Polypeptide
MALPVTALLLPLALLLHAARPDIQLTQSPSSLSASVGDRVTITCSTSSSVSYMHWYQQKPGKAPKLLIYSTSNLASGVPSRFSGSGSGTDFTFTISSLQPEDIATYYCHQWSSYPTFGQGTKVEIKLEGKPIPNPLLGLDSTGSGEDLKNVFPPEVAVFEPSEAEISHTQKATLVCLATGFYPDHVELSWWVNGKEVHSGVSTDPQPLKEQPALNDSRYCLSSRLRVSATFWQNPRNHFRCQVQFYGLSENDEWTQDRAKPVTQIVSAEAWGRADCGSQSFGLLDPKLCYLLDGILFIYGVILTALFLRVKFSRSADAPAYQQGQNQLYNELNLGRREEYDVLDKRRGRDPEMGGKPQRRKNPQEGLYNELQKDKMAEAYSEIGMKGERRRGKGHDGLYQGLSTATKDTYDALHMQALPPRRAKRSGSGATNFSLLKQAGDVEENPGPTSMDWIWRILFLVGAATGAHSFEGVHSQVQLQESGPGLVRPSQTLSLTCTVSGFTISSGYSWHWVRQPPGRGLEWIGYIQYSGITNYNPSLKSRVTMLVDTSKNQFSLRLSSVTAADTAVYYCAREDYDYHWYFDVWGQGTTVTVSSTREQKLISEEDGSGIQNPDPAVYQLRDSKSSDKSVCLFTDFDSQTNVSQSKDSDVYITDKTVLDMRSMDFKSNSAVAWSNKSDFACANAFNNSIIPEDTFFPSPESSCGTQSFGLLDPKLCYLLDGILFIYGVILTALFLRSKRSRLLHSDYMNMTPRRPGPTRKHYQPYAPPRDFAAYRSRVKFSRSADAPAYQQGQNQLYNELNLGRREEYDVLDKRRGRDPEMGGKPQRRKNPQEGLYNELQKDKMAEAYSEIGMKGERRRGKGHDGLYQGLSTATKDTYDALHMQALPPR

SEQ ID NO: 19503 - protein, 930 aa, Artificial Sequence
  Synthetic Polypeptide
MALPVTALLLPLALLLHAARPDIQLTQSPSSLSASVGDRVTITCSTSSSVSYMHWYQQKPGKAPKLLIYSTSNLASGVPSRFSGSGSGTDFTFTISSLQPEDIATYYCHQWSSYPTFGQGTKVEIKLEGKPIPNPLLGLDSTGSGEDLKNVFPPEVAVFEPSEAEISHTQKATLVCLATGFYPDHVELSWWVNGKEVHSGVSTDPQPLKEQPALNDSRYCLSSRLRVSATFWQNPRNHFRCQVQFYGLSENDEWTQDRAKPVTQIVSAEAWGRADCGSQSFGLLDPKLCYLLDGILFIYGVILTALFLRSKRSRLLHSDYMNMTPRRPGPTRKHYQPYAPPRDFAAYRSRVKFSRSADAPAYQQGQNQLYNELNLGRREEYDVLDKRRGRDPEMGGKPQRRKNPQEGLYNELQKDKMAEAYSEIGMKGERRRGKGHDGLYQGLSTATKDTYDALHMQALPPRRAKRSGSGATNFSLLKQAGDVEENPGPTSMDWIWRILFLVGAATGAHSFEGVHSQVQLQESGPGLVRPSQTLSLTCTVSGFTISSGYSWHWVRQPPGRGLEWIGYIQYSGITNYNPSLKSRVTMLVDTSKNQFSLRLSSVTAADTAVYYCAREDYDYHWYFDVWGQGTTVTVSSTREQKLISEEDGSGIQNPDPAVYQLRDSKSSDKSVCLFTDFDSQTNVSQSKDSDVYITDKTVLDMRSMDFKSNSAVAWSNKSDFACANAFNNSIIPEDTFFPSPESSCGTQSFGLLDPKLCYLLDGILFIYGVILTALFLRSKRSRLLHSDYMNMTPRRPGPTRKHYQPYAPPRDFAAYRSRVKFSRSADAPAYQQGQNQLYNELNLGRREEYDVLDKRRGRDPEMGGKPQRRKNPQEGLYNELQKDKMAEAYSEIGMKGERRRGKGHDGLYQGLSTATKDTYDALHMQALPPR

SEQ ID NO: 19504 - protein, 891 aa, Artificial Sequence
  Synthetic Polypeptide
MALPVTALLLPLALLLHAARPDIQLTQSPSSLSASVGDRVTITCSTSSSVSYMHWYQQKPGKAPKLLIYSTSNLASGVPSRFSGSGSGTDFTFTISSLQPEDIATYYCHQWSSYPTFGQGTKVEIKLEGKPIPNPLLGLDSTGSGEDLKNVFPPEVAVFEPSEAEISHTQKATLVCLATGFYPDHVELSWWVNGKEVHSGVSTDPQPLKEQPALNDSRYCLSSRLRVSATFWQNPRNHFRCQVQFYGLSENDEWTQDRAKPVTQIVSAEAWGRADCGSQSFGLLDPKLCYLLDGILFIYGVILTALFLRVKFSRSADAPAYQQGQNQLYNELNLGRREEYDVLDKRRGRDPEMGGKPQRRKNPQEGLYNELQKDKMAEAYSEIGMKGERRRGKGHDGLYQGLSTATKDTYDALHMQALPPRRAKRSGSGATNFSLLKQAGDVEENPGPTSMDWIWRILFLVGAATGAHSFEGVHSQVQLQESGPGLVRPSQTLSLTCTVSGFTISSGYSWHWVRQPPGRGLEWIGYIQYSGITNYNPSLKSRVTMLVDTSKNQFSLRLSSVTAADTAVYYCAREDYDYHWYFDVWGQGTTVTVSSTREQKLISEEDLGSGIQNPDPAVYQLRDSKSSDKSVCLFTDFDSQTNVSQSKDSDVYITDKTVLDMRSMDFKSNSAVAWSNKSDFACANAFNNSIIPEDTFFPSPESSCGTQSFGLLDPKLCYLLDGILFIYGVILTALFLKRGRKKLLYIFKQPFMRPVQTTQEEDGCSCRFPEEEEGGCELRVKFSRSADAPAYQQGQNQLYNELNLGRREEYDVLDKRRGRDPEMGGKPQRRKNPQEGLYNELQKDKMAEAYSEIGMKGERRRGKGHDGLYQGLSTATKDTYDALHMQALPPR

SEQ ID NO: 19505 - protein, 933 aa, Artificial Sequence
  Synthetic Polypeptide
MALPVTALLLPLALLLHAARPDIQLTQSPSSLSASVGDRVTITCSTSSSVSYMHWYQQKPGKAPKLLIYSTSNLASGVPSRFSGSGSGTDFTFTISSLQPEDIATYYCHQWSSYPTFGQGTKVEIKLEGKPIPNPLLGLDSTGSGEDLKNVFPPEVAVFEPSEAEISHTQKATLVCLATGFYPDHVELSWWVNGKEVHSGVSTDPQPLKEQPALNDSRYCLSSRLRVSATFWQNPRNHFRCQVQFYGLSENDEWTQDRAKPVTQIVSAEAWGRADCGSQSFGLLDPKLCYLLDGILFIYGVILTALFLKRGRKKLLYIFKQPFMRPVQTTQEEDGCSCRFPEEEEGGCELRVKFSRSADAPAYQQGQNQLYNELNLGRREEYDVLDKRRGRDPEMGGKPQRRKNPQEGLYNELQKDKMAEAYSEIGMKGERRRGKGHDGLYQGLSTATKDTYDALHMQALPPRRAKRSGSGATNFSLLKQAGDVEENPGPTSMDWIWRILFLVGAATGAHSFEGVHSQVQLQESGPGLVRPSQTLSLTCTVSGFTISSGYSWHWVRQPPGRGLEWIGYIQYSGITNYNPSLKSRVTMLVDTSKNQFSLRLSSVTAADTAVYYCAREDYDYHWYFDVWGQGTTVTVSSTREQKLISEEDLGSGIQNPDPAVYQLRDSKSSDKSVCLFTDFDSQTNVSQSKDSDVYITDKTVLDMRSMDFKSNSAVAWSNKSDFACANAFNNSIIPEDTFFPSPESSCGTQSFGLLDPKLCYLLDGILFIYGVILTALFLKRGRKKLLYIFKQPFMRPVQTTQEEDGCSCRFPEEEEGGCELRVKFSRSADAPAYQQGQNQLYNELNLGRREEYDVLDKRRGRDPEMGGKPQRRKNPQEGLYNELQKDKMAEAYSEIGMKGERRRGKGHDGLYQGLSTATKDTYDALHMQALPPR

SEQ ID NO: 19506 - protein, 823 aa, Artificial Sequence
  Synthetic Polypeptide
MALPVTALLLPLALLLHAARPDIQLTQSPSSLSASVGDRVTITCSTSSSVSYMHWYQQKPGKAPKLLIYSTSNLASGVPSRFSGSGSGTDFTFTISSLQPEDIATYYCHQWSSYPTFGQGTKVEIKLEQSFGLLDPKLCYLLDGILFIYGVILTALFLRVKFSRSADAPAYQQGQNQLYNELNLGRREEYDVLDKRRGRDPEMGGKPQRRKNPQEGLYNELQKDKMAEAYSEIGMKGERRRGKGHDGLYQGLSTATKDTYDALHMQALPPRRAKRSGSGATNFSLLKQAGDVEENPGPTSMDWIWRILFLVGAATGAHSFEGVHSQVQLQESGPGLVRPSQTLSLTCTVSGFTISSGYSWHWVRQPPGRGLEWIGYIQYSGITNYNPSLKSRVTMLVDTSKNQFSLRLSSVTAADTAVYYCAREDYDYHWYFDVWGQGTTVTVSSTRQSFGLLDPKLCYLLDGILFIYGVILTALFLRVKFSRSADAPAYQQGQNQLYNELNLGRREEYDVLDKRRGRDPEMGGKPQRRKNPQEGLYNELQKDKMAEAYSEIGMKGERRRGKGHDGLYQGLSTATKDTYDALHMQALPPRRAKRSGSGVKQTLNFDLLKLAGDVESNPGPSRGHMTEYKPTVRLATRDDVPRAVRTLAAAFADYPATRHTVDPDRHIERVTELQELFLTRVGLDIGKVWVADDGAAVAVWTTPESVEAGAVFAEIGPRMAELSGSRLAAQQQMEGLLAPHRPKEPAWFLATVGVSPDHQGKGLGSAVVLPGVEAAERAGVPAFLETSAPRNLPFYERLGFTVTADVEVPEGPRTWCMTRKPGA

SEQ ID NO: 19507 - protein, 648 aa, Artificial Sequence
  Synthetic Polypeptide
MALPVTALLLPLALLLHAARPDIQLTQSPSSLSASVGDRVTITCSTSSSVSYMHWYQQKPGKAPKLLIYSTSNLASGVPSRFSGSGSGTDFTFTISSLQPEDIATYYCHQWSSYPTFGQGTKVEIKLEGQPKANPTVTLFPPSSEELQANKATLVCLISDFYPGAVTVAWKADGSPVKAGVETTKPSKQSNNKYAASSYLSLTPEQWKSHRSYSCQVTHEGSTVEKTVAPTECSPIKTDVITMDPKDNCSKDANDTLLLQLTNTSAYYMYLLLLLKSVVYFAIITCCLLRRTAFCCNGEKSRAKRSGSGATNFSLLKQAGDVEENPGPTSMDWIWRILFLVGAATGAHSFEGVHSQVQLQESGPGLVRPSQTLSLTCTVSGFTISSGYSWHWVRQPPGRGLEWIGYIQYSGITNYNPSLKSRVTMLVDTSKNQFSLRLSSVTAADTAVYYCAREDYDYHWYFDVWGQGTTVTVSSTRASTKGPSVFPLAPSSKSTSGGTAALGCLVKDYFPEPVTVSWNSGALTSGVHTFPAVLQSSGLYSLSSVVTVPSSSLGTQTYICNVNHKPSNTKVDKRVEPKSCEVKTDSTDHVKPKETENTKQPSKSCHKPKAIVHTEKVNMMSLTVLGLRMLFAKTVAVNFLLTAKLFFL

SEQ ID NO: 19508 - protein, 626 aa, Artificial Sequence
  Synthetic Polypeptide
MALPVTALLLPLALLLHAARPDIQLTQSPSSLSASVGDRVTITCSTSSSVSYMHWYQQKPGKAPKLLIYSTSNLASGVPSRFSGSGSGTDFTFTISSLQPEDIATYYCHQWSSYPTFGQGTKVEIKLEGQPKANPTVTLFPPSSEELQANKATLVCLISDFYPGAVTVAWKADGSPVKAGVETTKPSKQSNNKYAASSYLSLTPEQWKSHRSYSCQVTHEGSTVEKTVAPTECSGRADCGITSASYHQGVLSATILYEILLGKATLYAVLVSALVLMAMVKRKDSRGRAKRSGSGATNFSLLKQAGDVEENPGPTSMDWIWRILFLVGAATGAHSFEGVHSQVQLQESGPGLVRPSQTLSLTCTVSGFTISSGYSWHWVRQPPGRGLEWIGYIQYSGITNYNPSLKSRVTMLVDTSKNQFSLRLSSVTAADTAVYYCAREDYDYHWYFDVWGQGTTVTVSSTRASTKGPSVFPLAPSSKSTSGGTAALGCLVKDYFPEPVTVSWNSGALTSGVHTFPAVLQSSGLYSLSSVVTVPSSSLGTQTYICNVNHKPSNTKVDKRVEPKSCIPEDTFFPSSDVPCDVKLVEKSFETDTNLNFQNLSVIGFRILLLKVAGFNLLMTLRLWSS

SEQ ID NO: 19509 - protein, 626 aa, Artificial Sequence
  Synthetic Polypeptide
MALPVTALLLPLALLLHAARPDIQLTQSPSSLSASVGDRVTITCSTSSSVSYMHWYQQKPGKAPKLLIYSTSNLASGVPSRFSGSGSGTDFTFTISSLQPEDIATYYCHQWSSYPTFGQGTKVEIKLEGQPKANPTVTLFPPSSEELQANKATLVCLISDFYPGAVTVAWKADGSPVKAGVETTKPSKQSNNKYAASSYLSLTPEQWKSHRSYSCQVTHEGSTVEKTVAPTECSGRADCGFTSESYQQGVLSATILYEILLGKATLYAVLVSALVLMAMVKRKDSRGRAKRSGSGATNFSLLKQAGDVEENPGPTSMDWIWRILFLVGAATGAHSFEGVHSQVQLQESGPGLVRPSQTLSLTCTVSGFTISSGYSWHWVRQPPGRGLEWIGYIQYSGITNYNPSLKSRVTMLVDTSKNQFSLRLSSVTAADTAVYYCAREDYDYHWYFDVWGQGTTVTVSSTRASTKGPSVFPLAPSSKSTSGGTAALGCLVKDYFPEPVTVSWNSGALTSGVHTFPAVLQSSGLYSLSSVVTVPSSSLGTQTYICNVNHKPSNTKVDKRVEPKSCIPEDTFFPSPESSCDVKLVEKSFETDTNLNFQNLSVIGFRILLLKVAGFNLLMTLRLWSS

SEQ ID NO: 19510 - protein, 452 aa, Artificial Sequence
  Synthetic Polypeptide
MALPVTALLLPLALLLHAARPDIQLTQSPSSLSASVGDRVTITCSTSSSVSYMHWYQQKPGKAPKLLIYSTSNLASGVPSRFSGSGSGTDFTFTISSLQPEDIATYYCHQWSSYPTFGQGTKVEIKGGGGSGGGGSGGGGSGVHSQVQLQESGPGLVRPSQTLSLTCTVSGFTISSGYSWHWVRQPPGRGLEWIGYIQYSGITNYNPSLKSRVTMLVDTSKNQFSLRLSSVTAADTAVYYCAREDYDYHWYFDVWGQGTTVTVSSTRDGNEEMGGITQTPYKVSISGTTVILTCPQYPGSEILWQHNDKNIGGDEDDKNIGSDEDHLSLKEFSELEQSGYYVCYPRGSKPEDANFYLYLRARVCENCMEMDVMSVATIVIVDICITGGLLLLVYYWSKNRKAKAKPVTRGAGAGGRQRGQNKERPPPVPNPDYEPIRKGQRDLYSGLNQRRI

SEQ ID NO: 19511 - protein, 417 aa, Artificial Sequence
  Synthetic Polypeptide
MALPVTALLLPLALLLHAARPDIQLTQSPSSLSASVGDRVTITCSTSSSVSYMHWYQQKPGKAPKLLIYSTSNLASGVPSRFSGSGSGTDFTFTISSLQPEDIATYYCHQWSSYPTFGQGTKVEIKGGGGSGGGGSGGGGSGVHSQVQLQESGPGLVRPSQTLSLTCTVSGFTISSGYSWHWVRQPPGRGLEWIGYIQYSGITNYNPSLKSRVTMLVDTSKNQFSLRLSSVTAADTAVYYCAREDYDYHWYFDVWGQGTTVTVSSTRFKIPIEELEDRVFVNCNTSITWVEGTVGTLLSDITRLDLGKRILDPRGIYRCNGTDIYKDKESTVQVHYRMCQSCVELDPATVAGIIVTDVIATLLLALGVFCFAGHETGRLSGAADTQALLRNDQVYQPLRDRDDAQYSHLGGNWARNK

SEQ ID NO: 19512 - protein, 427 aa, Artificial Sequence
  Synthetic Polypeptide
MALPVTALLLPLALLLHAARPDIQLTQSPSSLSASVGDRVTITCSTSSSVSYMHWYQQKPGKAPKLLIYSTSNLASGVPSRFSGSGSGTDFTFTISSLQPEDIATYYCHQWSSYPTFGQGTKVEIKGGGGSGGGGSGGGGSGVHSQVQLQESGPGLVRPSQTLSLTCTVSGFTISSGYSWHWVRQPPGRGLEWIGYIQYSGITNYNPSLKSRVTMLVDTSKNQFSLRLSSVTAADTAVYYCAREDYDYHWYFDVWGQGTTVTVSSTRQSIKGNHLVKVYDYQEDGSVLLTCDAEAKNITWFKDGKMIGFLTEDKKKWNLGSNAKDPRGMYQCKGSQNKSKPLQVYYRMCQNCIELNAATISGFLFAEIVSIFVLAVGVYFIAGQDGVRQSRASDKQTLLPNDQLYQPLKDREDDQYSHLQGNQLRRN

SEQ ID NO: 19513 - protein, 410 aa, Artificial Sequence
  Synthetic Polypeptide
MALPVTALLLPLALLLHAARPDIQLTQSPSSLSASVGDRVTITCSTSSSVSYMHWYQQKPGKAPKLLIYSTSNLASGVPSRFSGSGSGTDFTFTISSLQPEDIATYYCHQWSSYPTFGQGTKVEIKGGGGSGGGGSGGGGSGVHSQVQLQESGPGLVRPSQTLSLTCTVSGFTISSGYSWHWVRQPPGRGLEWIGYIQYSGITNYNPSLKSRVTMLVDTSKNQFSLRLSSVTAADTAVYYCAREDYDYHWYFDVWGQGTTVTVSSTRQSFGLLDPKLCYLLDGILFIYGVILTALFLRVKFSRSADAPAYQQGQNQLYNELNLGRREEYDVLDKRRGRDPEMGGKPQRRKNPQEGLYNELQKDKMAEAYSEIGMKGERRRGKGHDGLYQGLSTATKDTYDALHMQALPPR

SEQ ID NO: 19514 - protein, 452 aa, Artificial Sequence
  Synthetic Polypeptide
MALPVTALLLPLALLLHAARPGVHSQVQLQESGPGLVRPSQTLSLTCTVSGFTISSGYSWHWVRQPPGRGLEWIGYIQYSGITNYNPSLKSRVTMLVDTSKNQFSLRLSSVTAADTAVYYCAREDYDYHWYFDVWGQGTTVTVSSGGGGSGGGGSGGGGSDIQLTQSPSSLSASVGDRVTITCSTSSSVSYMHWYQQKPGKAPKLLIYSTSNLASGVPSRFSGSGSGTDFTFTISSLQPEDIATYYCHQWSSYPTFGQGTKVEIKTRDGNEEMGGITQTPYKVSISGTTVILTCPQYPGSEILWQHNDKNIGGDEDDKNIGSDEDHLSLKEFSELEQSGYYVCYPRGSKPEDANFYLYLRARVCENCMEMDVMSVATIVIVDICITGGLLLLVYYWSKNRKAKAKPVTRGAGAGGRQRGQNKERPPPVPNPDYEPIRKGQRDLYSGLNQRRI

SEQ ID NO: 19515 - protein, 417 aa, Artificial Sequence
  Synthetic Polypeptide
MALPVTALLLPLALLLHAARPGVHSQVQLQESGPGLVRPSQTLSLTCTVSGFTISSGYSWHWVRQPPGRGLEWIGYIQYSGITNYNPSLKSRVTMLVDTSKNQFSLRLSSVTAADTAVYYCAREDYDYHWYFDVWGQGTTVTVSSGGGGSGGGGSGGGGSDIQLTQSPSSLSASVGDRVTITCSTSSSVSYMHWYQQKPGKAPKLLIYSTSNLASGVPSRFSGSGSGTDFTFTISSLQPEDIATYYCHQWSSYPTFGQGTKVEIKTRFKIPIEELEDRVFVNCNTSITWVEGTVGTLLSDITRLDLGKRILDPRGIYRCNGTDIYKDKESTVQVHYRMCQSCVELDPATVAGIIVTDVIATLLLALGVFCFAGHETGRLSGAADTQALLRNDQVYQPLRDRDDAQYSHLGGNWARNK

SEQ ID NO: 19516 - protein, 427 aa, Artificial Sequence
  Synthetic Polypeptide
MALPVTALLLPLALLLHAARPGVHSQVQLQESGPGLVRPSQTLSLTCTVSGFTISSGYSWHWVRQPPGRGLEWIGYIQYSGITNYNPSLKSRVTMLVDTSKNQFSLRLSSVTAADTAVYYCAREDYDYHWYFDVWGQGTTVTVSSGGGGSGGGGSGGGGSDIQLTQSPSSLSASVGDRVTITCSTSSSVSYMHWYQQKPGKAPKLLIYSTSNLASGVPSRFSGSGSGTDFTFTISSLQPEDIATYYCHQWSSYPTFGQGTKVEIKTRQSIKGNHLVKVYDYQEDGSVLLTCDAEAKNITWFKDGKMIGFLTEDKKKWNLGSNAKDPRGMYQCKGSQNKSKPLQVYYRMCQNCIELNAATISGFLFAEIVSIFVLAVGVYFIAGQDGVRQSRASDKQTLLPNDQLYQPLKDREDDQYSHLQGNQLRRN

SEQ ID NO: 19517 - protein, 410 aa, Artificial Sequence
  Synthetic Polypeptide
MALPVTALLLPLALLLHAARPGVHSQVQLQESGPGLVRPSQTLSLTCTVSGFTISSGYSWHWVRQPPGRGLEWIGYIQYSGITNYNPSLKSRVTMLVDTSKNQFSLRLSSVTAADTAVYYCAREDYDYHWYFDVWGQGTTVTVSSGGGGSGGGGSGGGGSDIQLTQSPSSLSASVGDRVTITCSTSSSVSYMHWYQQKPGKAPKLLIYSTSNLASGVPSRFSGSGSGTDFTFTISSLQPEDIATYYCHQWSSYPTFGQGTKVEIKTRQSFGLLDPKLCYLLDGILFIYGVILTALFLRVKFSRSADAPAYQQGQNQLYNELNLGRREEYDVLDKRRGRDPEMGGKPQRRKNPQEGLYNELQKDKMAEAYSEIGMKGERRRGKGHDGLYQGLSTATKDTYDALHMQALPPR

SEQ ID NO: 19518 - protein, 643 aa, Artificial Sequence
  Synthetic Polypeptide
MALPVTALLLPLALLLHAARPDIQLTQSPSSLSASVGDRVTITCSTSSSVSYMHWYQQKPGKAPKLLIYSTSNLASGVPSRFSGSGSGTDFTFTISSLQPEDIATYYCHQWSSYPTFGQGTKVEIKGGGGSGGGGSGGGGSGVHSQVQLQESGPGLVRPSQTLSLTCTVSGFTISSGYSWHWVRQPPGRGLEWIGYIQYSGITNYNPSLKSRVTMLVDTSKNQFSLRLSSVTAADTAVYYCAREDYDYHWYFDVWGQGTTVTVSSTRGSGIQNPDPAVYQLRDSKSSDKSVCLFTDFDSQTNVSQSKDSDVYITDKTVLDMRSMDFKSNSAVAWSNKSDFACANAFNNSIIPEDTFFPSPESSCDVKLVEKSFETDTNLNFQNLSVIGFRILLLKVAGFNLLMTLRLWSSRAKRSGSGVKQTLNFDLLKLAGDVESNPGPSRGHMTEYKPTVRLATRDDVPRAVRTLAAAFADYPATRHTVDPDRHIERVTELQELFLTRVGLDIGKVWVADDGAAVAVWTTPESVEAGAVFAEIGPRMAELSGSRLAAQQQMEGLLAPHRPKEPAWFLATVGVSPDHQGKGLGSAVVLPGVEAAERAGVPAFLETSAPRNLPFYERLGFTVTADVEVPEGPRTWCMTRKPGA

SEQ ID NO: 19519 - protein, 675 aa, Artificial Sequence
  Synthetic Polypeptide
MALPVTALLLPLALLLHAARPDIQLTQSPSSLSASVGDRVTITCSTSSSVSYMHWYQQKPGKAPKLLIYSTSNLASGVPSRFSGSGSGTDFTFTISSLQPEDIATYYCHQWSSYPTFGQGTKVEIKGGGGSGGGGSGGGGSGVHSQVQLQESGPGLVRPSQTLSLTCTVSGFTISSGYSWHWVRQPPGRGLEWIGYIQYSGITNYNPSLKSRVTMLVDTSKNQFSLRLSSVTAADTAVYYCAREDYDYHWYFDVWGQGTTVTVSSLEDLKNVFPPEVAVFEPSEAEISHTQKATLVCLATGFYPDHVELSWWVNGKEVHSGVSTDPQPLKEQPALNDSRYCLSSRLRVSATFWQNPRNHFRCQVQFYGLSENDEWTQDRAKPVTQIVSAEAWGRADCGFTSESYQQGVLSATILYEILLGKATLYAVLVSALVLMAMVKRKDSRGRAKRSGSGATNFSLLKQAGDVEENPGPTRGHMTEYKPTVRLATRDDVPRAVRTLAAAFADYPATRHTVDPDRHIERVTELQELFLTRVGLDIGKVWVADDGAAVAVWTTPESVEAGAVFAEIGPRMAELSGSRLAAQQQMEGLLAPHRPKEPAWFLATVGVSPDHQGKGLGSAVVLPGVEAAERAGVPAFLETSAPRNLPFYERLGFTVTADVEVPEGPRTWCMTRKPGA

SEQ ID NO: 19520 - protein, 725 aa, Artificial Sequence
  Synthetic Polypeptide
MALPVTALLLPLALLLHAARPDIQLTQSPSSLSASVGDRVTITCSTSSSVSYMHWYQQKPGKAPKLLIYSTSNLASGVPSRFSGSGSGTDFTFTISSLQPEDIATYYCHQWSSYPTFGQGTKVEIKGGGGSGGGGSGGGGSGVHSQVQLQESGPGLVRPSQTLSLTCTVSGFTISSGYSWHWVRQPPGRGLEWIGYIQYSGITNYNPSLKSRVTMLVDTSKNQFSLRLSSVTAADTAVYYCAREDYDYHWYFDVWGQGTTVTVSSTREQKLISEEDLGSGTPFPSLAPPIMLLVDGKQQMVVVCLVLDVAPPGLDSPIWFSAGNGSALDAFTYGPSPATDGTWTNLAHLSLPSEELASWEPLVCHTGPGAEGHSRSTQPMHLSGEASTARTCPQEPLRGTPGGALWLGVLRLLLFKLLLFDLLLTCSCLCDPAGPLPSPATTTRLRALGSHRLHPATETGGREATSSPRPQPRDRRWGDTPPGRKPGSPVRAKRSGSGVKQTLNFDLLKLAGDVESNPGPSRSRGHMTEYKPTVRLATRDDVPRAVRTLAAAFADYPATRHTVDPDRHIERVTELQELFLTRVGLDIGKVWVADDGAAVAVWTTPESVEAGAVFAEIGPRMAELSGSRLAAQQQMEGLLAPHRPKEPAWFLATVGVSPDHQGKGLGSAVVLPGVEAAERAGVPAFLETSAPRNLPFYERLGFTVTADVEVPEGPRTWCMTRKPGA

SEQ ID NO: 19521 - protein, 536 aa, Artificial Sequence
  Synthetic Polypeptide
MALPVTALLLPLALLLHAARPDIQLTQSPSSLSASVGDRVTITCSTSSSVSYMHWYQQKPGKAPKLLIYSTSNLASGVPSRFSGSGSGTDFTFTISSLQPEDIATYYCHQWSSYPTFGQGTKVEIKLEDLKNVFPPEVAVFEPSEAEISHTQKATLVCLATGFYPDHVELSWWVNGKEVHSGVSTDPQPLKEQPALNDSRYCLSSRLRVSATFWQNPRNHFRCQVQFYGLSENDEWTQDRAKPVTQIVSAEAWGRADCGFTSESYQQGVLSATILYEILLGKATLYAVLVSALVLMAMVKRKDSRGRAKRSGSGATNFSLLKQAGDVEENPGPTRGHMTEYKPTVRLATRDDVPRAVRTLAAAFADYPATRHTVDPDRHIERVTELQELFLTRVGLDIGKVWVADDGAAVAVWTTPESVEAGAVFAEIGPRMAELSGSRLAAQQQMEGLLAPHRPKEPAWFLATVGVSPDHQGKGLGSAVVLPGVEAAERAGVPAFLETSAPRNLPFYERLGFTVTADVEVPEGPRTWCMTRKPGA

SEQ ID NO: 19522 - protein, 306 aa, Artificial Sequence
  Synthetic Polypeptide
MALPVTALLLPLALLLHAARPDIQLTQSPSSLSASVGDRVTITCSTSSSVSYMHWYQQKPGKAPKLLIYSTSNLASGVPSRFSGSGSGTDFTFTISSLQPEDIATYYCHQWSSYPTFGQGTKVEIKLEDLKNVFPPEVAVFEPSEAEISHTQKATLVCLATGFYPDHVELSWWVNGKEVHSGVSTDPQPLKEQPALNDSRYCLSSRLRVSATFWQNPRNHFRCQVQFYGLSENDEWTQDRAKPVTQIVSAEAWGRADCGFTSESYQQGVLSATILYEILLGKATLYAVLVSALVLMAMVKRKDSRG

SEQ ID NO: 19523 - protein, 453 aa, Artificial Sequence
  Synthetic Polypeptide
MDWIWRILFLVGAATGAHSFEGVHSQVQLQESGPGLVRPSQTLSLTCTVSGFTISSGYSWHWVRQPPGRGLEWIGYIQYSGITNYNPSLKSRVTMLVDTSKNQFSLRLSSVTAADTAVYYCAREDYDYHWYFDVWGQGTTVTVSSTRIQNPDPAVYQLRDSKSSDKSVCLFTDFDSQTNVSQSKDSDVYITDKTVLDMRSMDFKSNSAVAWSNKSDFACANAFNNSIIPEDTFFPSPESSCDVKLVEKSFETDTNLNFQNLSVIGFRILLLKVAGFNLLMTLRLWSSRAKRSGSGVKQTLNFDLLKLAGDVESNPGPSRGHMAKPLSQEESTLIERATATINSIPISEDYSVASAALSSDGRIFTGVNVYHFTGGPCAELVVLGTAAAAAAGNLTCIVAIGNENRGILSPCGRCRQVLLDLHPGIKAIVKDSDGQPTAVGIRELLPSGYVWEG

SEQ ID NO: 19524 - protein, 287 aa, Artificial Sequence
  Synthetic Polypeptide
MDWIWRILFLVGAATGAHSFEGVHSQVQLQESGPGLVRPSQTLSLTCTVSGFTISSGYSWHWVRQPPGRGLEWIGYIQYSGITNYNPSLKSRVTMLVDTSKNQFSLRLSSVTAADTAVYYCAREDYDYHWYFDVWGQGTTVTVSSTRIQNPDPAVYQLRDSKSSDKSVCLFTDFDSQTNVSQSKDSDVYITDKTVLDMRSMDFKSNSAVAWSNKSDFACANAFNNSIIPEDTFFPSPESSCDVKLVEKSFETDTNLNFQNLSVIGFRILLLKVAGFNLLMTLRLWSS

SEQ ID NO: 19525 - protein, 554 aa, Artificial Sequence
  Synthetic Polypeptide
MALPVTALLLPLALLLHAARPDIQLTQSPSSLSASVGDRVTITCSTSSSVSYMHWYQQKPGKAPKLLIYSTSNLASGVPSRFSGSGSGTDFTFTISSLQPEDIATYYCHQWSSYPTFGQGTKVEIKLEGKPIPNPLLGLDSTGSGEDLKNVFPPEVAVFEPSEAEISHTQKATLVCLATGFYPDHVELSWWVNGKEVHSGVCTDPQPLKEQPALNDSRYCLSSRLRVSATFWQNPRNHFRCQVQFYGLSENDEWTQDRAKPVTQIVSAEAWGRADCGFTSESYQQGVLSATILYEILLGKATLYAVLVSALVLMAMVKRKDSRGRAKRSGSGATNFSLLKQAGDVEENPGPTRGHMTEYKPTVRLATRDDVPRAVRTLAAAFADYPATRHTVDPDRHIERVTELQELFLTRVGLDIGKVWVADDGAAVAVWTTPESVEAGAVFAEIGPRMAELSGSRLAAQQQMEGLLAPHRPKEPAWFLATVGVSPDHQGKGLGSAVVLPGVEAAERAGVPAFLETSAPRNLPFYERLGFTVTADVEVPEGPRTWCMTRKPGA

SEQ ID NO: 19526 - protein, 324 aa, Artificial Sequence
  Synthetic Polypeptide
MALPVTALLLPLALLLHAARPDIQLTQSPSSLSASVGDRVTITCSTSSSVSYMHWYQQKPGKAPKLLIYSTSNLASGVPSRFSGSGSGTDFTFTISSLQPEDIATYYCHQWSSYPTFGQGTKVEIKLEGKPIPNPLLGLDSTGSGEDLKNVFPPEVAVFEPSEAEISHTQKATLVCLATGFYPDHVELSWWVNGKEVHSGVCTDPQPLKEQPALNDSRYCLSSRLRVSATFWQNPRNHFRCQVQFYGLSENDEWTQDRAKPVTQIVSAEAWGRADCGFTSESYQQGVLSATILYEILLGKATLYAVLVSALVLMAMVKRKDSRG

SEQ ID NO: 19527 - protein, 465 aa, Artificial Sequence
  Synthetic Polypeptide
MDWIWRILFLVGAATGAHSFEGVHSQVQLQESGPGLVRPSQTLSLTCTVSGFTISSGYSWHWVRQPPGRGLEWIGYIQYSGITNYNPSLKSRVTMLVDTSKNQFSLRLSSVTAADTAVYYCAREDYDYHWYFDVWGQGTTVTVSSTREQKLISEEDGSGIQNPDPAVYQLRDSKSSDKSVCLFTDFDSQTNVSQSKDSDVYITDKCVLDMRSMDFKSNSAVAWSNKSDFACANAFNNSIIPEDTFFPSPESSCDVKLVEKSFETDTNLNFQNLSVIGFRILLLKVAGFNLLMTLRLWSSRAKRSGSGVKQTLNFDLLKLAGDVESNPGPSRGHMAKPLSQEESTLIERATATINSIPISEDYSVASAALSSDGRIFTGVNVYHFTGGPCAELVVLGTAAAAAAGNLTCIVAIGNENRGILSPCGRCRQVLLDLHPGIKAIVKDSDGQPTAVGIRELLPSGYVWEG

SEQ ID NO: 19528 - protein, 299 aa, Artificial Sequence
  Synthetic Polypeptide
MDWIWRILFLVGAATGAHSFEGVHSQVQLQESGPGLVRPSQTLSLTCTVSGFTISSGYSWHWVRQPPGRGLEWIGYIQYSGITNYNPSLKSRVTMLVDTSKNQFSLRLSSVTAADTAVYYCAREDYDYHWYFDVWGQGTTVTVSSTREQKLISEEDGSGIQNPDPAVYQLRDSKSSDKSVCLFTDFDSQTNVSQSKDSDVYITDKCVLDMRSMDFKSNSAVAWSNKSDFACANAFNNSIIPEDTFFPSPESSCDVKLVEKSFETDTNLNFQNLSVIGFRILLLKVAGFNLLMTLRLWSS

SEQ ID NO: 19529 - protein, 643 aa, Artificial Sequence
  Synthetic Polypeptide
MALPVTALLLPLALLLHAARPDIQLTQSPSSLSASVGDRVTITCSTSSSVSYMHWYQQKPGKAPKLLIYSTSNLASGVPSRFSGSGSGTDFTFTISSLQPEDIATYYCHQWSSYPTFGQGTKVEIKGGGGSGGGGSGGGGSGVHSQVQLQESGPGLVRPSQTLSLTCTVSGFTISSGYSWHWVRQPPGRGLEWIGYIQYSGITNYNPSLKSRVTMLVDTSKNQFSLRLSSVTAADTAVYYCAREDYDYHWYFDVWGQGTTVTVSSTRGSGIQNPDPAVYQLRDSKSSDKSVCLFTDFDSQTNVSQSKDSDVYITDKTVLDMRSMDFKSNSAVAWSNKSDFACANAFNNSIIPEDTFFPSSDVPCDVKLVEKSFETDTNLNFQNLSVIGFRILLLKVAGFNLLMTLRLWSSRAKRSGSGVKQTLNFDLLKLAGDVESNPGPSRGHMTEYKPTVRLATRDDVPRAVRTLAAAFADYPATRHTVDPDRHIERVTELQELFLTRVGLDIGKVWVADDGAAVAVWTTPESVEAGAVFAEIGPRMAELSGSRLAAQQQMEGLLAPHRPKEPAWFLATVGVSPDHQGKGLGSAVVLPGVEAAERAGVPAFLETSAPRNLPFYERLGFTVTADVEVPEGPRTWCMTRKPGA

SEQ ID NO: 19530 - protein, 675 aa, Artificial Sequence
  Synthetic Polypeptide
MALPVTALLLPLALLLHAARPDIQLTQSPSSLSASVGDRVTITCSTSSSVSYMHWYQQKPGKAPKLLIYSTSNLASGVPSRFSGSGSGTDFTFTISSLQPEDIATYYCHQWSSYPTFGQGTKVEIKGGGGSGGGGSGGGGSGVHSQVQLQESGPGLVRPSQTLSLTCTVSGFTISSGYSWHWVRQPPGRGLEWIGYIQYSGITNYNPSLKSRVTMLVDTSKNQFSLRLSSVTAADTAVYYCAREDYDYHWYFDVWGQGTTVTVSSLEDLKNVFPPEVAVFEPSKAEIAHTQKATLVCLATGFYPDHVELSWWVNGKEVHSGVSTDPQPLKEQPALNDSRYCLSSRLRVSATFWQNPRNHFRCQVQFYGLSENDEWTQDRAKPVTQIVSAEAWGRADCGITSASYHQGVLSATILYEILLGKATLYAVLVSALVLMAMVKRKDSRGRAKRSGSGATNFSLLKQAGDVEENPGPTRGHMTEYKPTVRLATRDDVPRAVRTLAAAFADYPATRHTVDPDRHIERVTELQELFLTRVGLDIGKVWVADDGAAVAVWTTPESVEAGAVFAEIGPRMAELSGSRLAAQQQMEGLLAPHRPKEPAWFLATVGVSPDHQGKGLGSAVVLPGVEAAERAGVPAFLETSAPRNLPFYERLGFTVTADVEVPEGPRTWCMTRKPGA

SEQ ID NO: 19531 - protein, 698 aa, Artificial Sequence
  Synthetic Polypeptide
MALPVTALLLPLALLLHAARPDIQLTQSPSSLSASVGDRVTITCSTSSSVSYMHWYQQKPGKAPKLLIYSTSNLASGVPSRFSGSGSGTDFTFTISSLQPEDIATYYCHQWSSYPTFGQGTKVEIKGGGGSGGGGSGGGGSGVHSQVQLQESGPGLVRPSQTLSLTCTVSGFTISSGYSWHWVRQPPGRGLEWIGYIQYSGITNYNPSLKSRVTMLVDTSKNQFSLRLSSVTAADTAVYYCAREDYDYHWYFDVWGQGTTVTVSSTRGSGGGGSGGGGSGDGNEEMGGITQTPYKVSISGTTVILTCPQYPGSEILWQHNDKNIGGDEDDKNIGSDEDHLSLKEFSELEQSGYYVCYPRGSKPEDANFYLYLRARVCENCMEMDVMSVATIVIVDICITGGLLLLVYYWSKNRKAKAKPVTRGAGAGGRQRGQNKERPPPVPNPDYEPIRKGQRDLYSGLNQRRIRAKRSGSGVKQTLNFDLLKLAGDVESNPGPSRGHMTEYKPTVRLATRDDVPRAVRTLAAAFADYPATRHTVDPDRHIERVTELQELFLTRVGLDIGKVWVADDGAAVAVWTTPESVEAGAVFAEIGPRMAELSGSRLAAQQQMEGLLAPHRPKEPAWFLATVGVSPDHQGKGLGSAVVLPGVEAAERAGVPAFLETSAPRNLPFYERLGFTVTADVEVPEGPRTWCMTRKPGA

SEQ ID NO: 19532 - protein, 663 aa, Artificial Sequence
  Synthetic Polypeptide
MALPVTALLLPLALLLHAARPDIQLTQSPSSLSASVGDRVTITCSTSSSVSYMHWYQQKPGKAPKLLIYSTSNLASGVPSRFSGSGSGTDFTFTISSLQPEDIATYYCHQWSSYPTFGQGTKVEIKGGGGSGGGGSGGGGSGVHSQVQLQESGPGLVRPSQTLSLTCTVSGFTISSGYSWHWVRQPPGRGLEWIGYIQYSGITNYNPSLKSRVTMLVDTSKNQFSLRLSSVTAADTAVYYCAREDYDYHWYFDVWGQGTTVTVSSTRGSGGGGSGGGGSGFKIPIEELEDRVFVNCNTSITWVEGTVGTLLSDITRLDLGKRILDPRGIYRCNGTDIYKDKESTVQVHYRMCQSCVELDPATVAGIIVTDVIATLLLALGVFCFAGHETGRLSGAADTQALLRNDQVYQPLRDRDDAQYSHLGGNWARNKRAKRSGSGVKQTLNFDLLKLAGDVESNPGPSRGHMTEYKPTVRLATRDDVPRAVRTLAAAFADYPATRHTVDPDRHIERVTELQELFLTRVGLDIGKVWVADDGAAVAVWTTPESVEAGAVFAEIGPRMAELSGSRLAAQQQMEGLLAPHRPKEPAWFLATVGVSPDHQGKGLGSAVVLPGVEAAERAGVPAFLETSAPRNLPFYERLGFTVTADVEVPEGPRTWCMTRKPGA

SEQ ID NO: 19533 - protein, 673 aa, Artificial Sequence
  Synthetic Polypeptide
MALPVTALLLPLALLLHAARPDIQLTQSPSSLSASVGDRVTITCSTSSSVSYMHWYQQKPGKAPKLLIYSTSNLASGVPSRFSGSGSGTDFTFTISSLQPEDIATYYCHQWSSYPTFGQGTKVEIKGGGGSGGGGSGGGGSGVHSQVQLQESGPGLVRPSQTLSLTCTVSGFTISSGYSWHWVRQPPGRGLEWIGYIQYSGITNYNPSLKSRVTMLVDTSKNQFSLRLSSVTAADTAVYYCAREDYDYHWYFDVWGQGTTVTVSSTRGSGGGGSGGGGSGQSIKGNHLVKVYDYQEDGSVLLTCDAEAKNITWFKDGKMIGFLTEDKKKWNLGSNAKDPRGMYQCKGSQNKSKPLQVYYRMCQNCIELNAATISGFLFAEIVSIFVLAVGVYFIAGQDGVRQSRASDKQTLLPNDQLYQPLKDREDDQYSHLQGNQLRRNRAKRSGSGVKQTLNFDLLKLAGDVESNPGPSRGHMTEYKPTVRLATRDDVPRAVRTLAAAFADYPATRHTVDPDRHIERVTELQELFLTRVGLDIGKVWVADDGAAVAVWTTPESVEAGAVFAEIGPRMAELSGSRLAAQQQMEGLLAPHRPKEPAWFLATVGVSPDHQGKGLGSAVVLPGVEAAERAGVPAFLETSAPRNLPFYERLGFTVTADVEVPEGPRTWCMTRKPGA

SEQ ID NO: 19534 - protein, 656 aa, Artificial Sequence
  Synthetic Polypeptide
MALPVTALLLPLALLLHAARPDIQLTQSPSSLSASVGDRVTITCSTSSSVSYMHWYQQKPGKAPKLLIYSTSNLASGVPSRFSGSGSGTDFTFTISSLQPEDIATYYCHQWSSYPTFGQGTKVEIKGGGGSGGGGSGGGGSGVHSQVQLQESGPGLVRPSQTLSLTCTVSGFTISSGYSWHWVRQPPGRGLEWIGYIQYSGITNYNPSLKSRVTMLVDTSKNQFSLRLSSVTAADTAVYYCAREDYDYHWYFDVWGQGTTVTVSSTRGSGGGGSGGGGSGQSFGLLDPKLCYLLDGILFIYGVILTALFLRVKFSRSADAPAYQQGQNQLYNELNLGRREEYDVLDKRRGRDPEMGGKPQRRKNPQEGLYNELQKDKMAEAYSEIGMKGERRRGKGHDGLYQGLSTATKDTYDALHMQALPPRRAKRSGSGVKQTLNFDLLKLAGDVESNPGPSRGHMTEYKPTVRLATRDDVPRAVRTLAAAFADYPATRHTVDPDRHIERVTELQELFLTRVGLDIGKVWVADDGAAVAVWTTPESVEAGAVFAEIGPRMAELSGSRLAAQQQMEGLLAPHRPKEPAWFLATVGVSPDHQGKGLGSAVVLPGVEAAERAGVPAFLETSAPRNLPFYERLGFTVTADVEVPEGPRTWCMTRKPGA

SEQ ID NO: 19535 - protein, 757 aa, Artificial Sequence
  Synthetic Polypeptide
MALPVTALLLPLALLLHAARPEVQLVESGGGLVQPGGSLRLSCAASGFSFSDFWMSWVRQAPGKGLEWVATISQAGSEKDYVDSVKGRFTISRDNAKKSLYLQMNSLRAEDTAVYYCASGVYSFDYRGQGTLVTVSSGTGGGGSGGGGSGGGGSEFDIQLTQSPSSLSASVGDRVTITCSTSSSVSYMHWYQQKPGKAPKLLIYSTSNLASGVPSRFSGSGSGTDFTFTISSLQPEDIATYYCHQWSSYPTFGQGTKVEIKLEDLKNVFPPEVAVFEPSEAEISHTQKATLVCLATGFYPDHVELSWWVNGKEVHSGVCTDPQPLKEQPALNDSRYCLSSRLRVSATFWQNPRNHFRCQVQFYGLSENDEWTQDRAKPVTQIVSAEAWGRADCGFTSESYQQGVLSATILYEILLGKATLYAVLVSALVLMAMVKRKDSRGRAKRSGSGATNFSLLKQAGDVEENPGPTSMDWIWRILFLVGAATGAHSFEGVHSQVQLQESGPGLVRPSQTLSLTCTVSGFTISSGYSWHWVRQPPGRGLEWIGYIQYSGITNYNPSLKSRVTMLVDTSKNQFSLRLSSVTAADTAVYYCAREDYDYHWYFDVWGQGTTVTVSSTRIQNPDPAVYQLRDSKSSDKSVCLFTDFDSQTNVSQSKDSDVYITDKCVLDMRSMDFKSNSAVAWSNKSDFACANAFNNSIIPEDTFFPSPESSCDVKLVEKSFETDTNLNFQNLSVIGFRILLLKVAGFNLLMTLRLWSS

SEQ ID NO: 19536 - protein, 761 aa, Artificial Sequence
  Synthetic Polypeptide
MALPVTALLLPLALLLHAARPEVQLVESGGGLVQPGGSLRLSCAASGFSFSDFWMSWVRQAPGKGLEWVATISQAGSEKDYVDSVKGRFTISRDNAKKSLYLQMNSLRAEDTAVYYCASGVYSFDYRGQGTLVTVSSGTGGGGSGGGGSGGGGSEFDIQLTQSPSSLSASVGDRVTITCSTSSSVSYMHWYQQKPGKAPKLLIYSTSNLASGVPSRFSGSGSGTDFTFTISSLQPEDIATYYCHQWSSYPTFGQGTKVEIKLEIQNPDPAVYQLRDSKSSDKSVCLFTDFDSQTNVSQSKDSDVYITDKCVLDMRSMDFKSNSAVAWSNKSDFACANAFNNSIIPEDTFFPSPESSCDVKLVEKSFETDTNLNFQNLSVIGFRILLLKVAGFNLLMTLRLWSSRAKRSGSGVKQTLNFDLLKLAGDVESNPGPTSMDWIWRILFLVGAATGAHSFEGVHSQVQLQESGPGLVRPSQTLSLTCTVSGFTISSGYSWHWVRQPPGRGLEWIGYIQYSGITNYNPSLKSRVTMLVDTSKNQFSLRLSSVTAADTAVYYCAREDYDYHWYFDVWGQGTTVTVSSTREDLKNVFPPEVAVFEPSEAEISHTQKATLVCLATGFYPDHVELSWWVNGKEVHSGVCTDPQPLKEQPALNDSRYCLSSRLRVSATFWQNPRNHFRCQVQFYGLSENDEWTQDRAKPVTQIVSAEAWGRADCGFTSESYQQGVLSATILYEILLGKATLYAVLVSALVLMAMVKRKDSRG

SEQ ID NO: 19537 - protein, 953 aa, Artificial Sequence
  Synthetic Polypeptide
MALPVTALLLPLALLLHAARPEVQLVESGGGLVQPGGSLRLSCAASGFSFSDFWMSWVRQAPGKGLEWVATISQAGSEKDYVDSVKGRFTISRDNAKKSLYLQMNSLRAEDTAVYYCASGVYSFDYRGQGTLVTVSSGTGGGGSGGGGSGGGGSEFDIQLTQSPSSLSASVGDRVTITCSTSSSVSYMHWYQQKPGKAPKLLIYSTSNLASGVPSRFSGSGSGTDFTFTISSLQPEDIATYYCHQWSSYPTFGQGTKVEIKLEDLKNVFPPEVAVFEPSEAEISHTQKATLVCLATGFYPDHVELSWWVNGKEVHSGVSTDPQPLKEQPALNDSRYCLSSRLRVSATFWQNPRNHFRCQVQFYGLSENDEWTQDRAKPVTQIVSAEAWGRADCGSQSFGLLDPKLCYLLDGILFIYGVILTALFLRVKFSRSADAPAYQQGQNQLYNELNLGRREEYDVLDKRRGRDPEMGGKPQRRKNPQEGLYNELQKDKMAEAYSEIGMKGERRRGKGHDGLYQGLSTATKDTYDALHMQALPPRRAKRSGSGATNFSLLKQAGDVEENPGPTSMDWIWRILFLVGAATGAHSFEGVHSQVQLQESGPGLVRPSQTLSLTCTVSGFTISSGYSWHWVRQPPGRGLEWIGYIQYSGITNYNPSLKSRVTMLVDTSKNQFSLRLSSVTAADTAVYYCAREDYDYHWYFDVWGQGTTVTVSSTRIQNPDPAVYQLRDSKSSDKSVCLFTDFDSQTNVSQSKDSDVYITDKTVLDMRSMDFKSNSAVAWSNKSDFACANAFNNSIIPEDTFFPSPESSCGTQSFGLLDPKLCYLLDGILFIYGVILTALFLRVKFSRSADAPAYQQGQNQLYNELNLGRREEYDVLDKRRGRDPEMGGKPQRRKNPQEGLYNELQKDKMAEAYSEIGMKGERRRGKGHDGLYQGLSTATKDTYDALHMQALPPR

SEQ ID NO: 19538 - protein, 783 aa, Artificial Sequence
  Synthetic Polypeptide
MALPVTALLLPLALLLHAARPEVQLVESGGGLVQPGGSLRLSCAASGFSFSDFWMSWVRQAPGKGLEWVATISQAGSEKDYVDSVKGRFTISRDNAKKSLYLQMNSLRAEDTAVYYCASGVYSFDYRGQGTLVTVSSGTGGGGSGGGGSGGGGSEFDIQLTQSPSSLSASVGDRVTITCSTSSSVSYMHWYQQKPGKAPKLLIYSTSNLASGVPSRFSGSGSGTDFTFTISSLQPEDIATYYCHQWSSYPTFGQGTKVEIKLEGQPKANPTVTLFPPSSEELQANKATLVCLISDFYPGAVTVAWKADGSPVKAGVETTKPSKQSNNKYAASSYLSLTPEQWKSHRSYSCQVTHEGSTVEKTVAPTECSPIKTDVITMDPKDNCSKDANDTLLLQLTNTSAYYMYLLLLLKSVVYFAIITCCLLRRTAFCCNGEKSRAKRSGSGATNFSLLKQAGDVEENPGPTSMDWIWRILFLVGAATGAHSFEGVHSQVQLQESGPGLVRPSQTLSLTCTVSGFTISSGYSWHWVRQPPGRGLEWIGYIQYSGITNYNPSLKSRVTMLVDTSKNQFSLRLSSVTAADTAVYYCAREDYDYHWYFDVWGQGTTVTVSSTRASTKGPSVFPLAPSSKSTSGGTAALGCLVKDYFPEPVTVSWNSGALTSGVHTFPAVLQSSGLYSLSSVVTVPSSSLGTQTYICNVNHKPSNTKVDKRVEPKSCEVKTDSTDHVKPKETENTKQPSKSCHKPKAIVHTEKVNMMSLTVLGLRMLFAKTVAVNFLLTAKLFFL

SEQ ID NO: 19539 - protein, 764 aa, Artificial Sequence
  Synthetic Polypeptide
MALPVTALLLPLALLLHAARPEVQLVESGGGLVQPGGSLRLSCAASGFSFSDFWMSWVRQAPGKGLEWVATISQAGSEKDYVDSVKGRFTISRDNAKKSLYLQMNSLRAEDTAVYYCASGVYSFDYRGQGTLVTVSSGTGGGGSGGGGSGGGGSEFDIQLTQSPSSLSASVGDRVTITCSTSSSVSYMHWYQQKPGKAPKLLIYSTSNLASGVPSRFSGSGSGTDFTFTISSLQPEDIATYYCHQWSSYPTFGQGTKVEIKLEGQPKANPTVTLFPPSSEELQANKATLVCLISDFYPGAVTVAWKADGSPVKAGVETTKPSKQSNNKYAASSYLSLTPEQWKSHRSYSCQVTHEGSTVEKTVAPTECSGRADCGFTSESYQQGVLSATILYEILLGKATLYAVLVSALVLMAMVKRKDSRGRAKRSGSGVKQTLNFDLLKLAGDVESNPGPTSMDWIWRILFLVGAATGAHSFEGVHSQVQLQESGPGLVRPSQTLSLTCTVSGFTISSGYSWHWVRQPPGRGLEWIGYIQYSGITNYNPSLKSRVTMLVDTSKNQFSLRLSSVTAADTAVYYCAREDYDYHWYFDVWGQGTTVTVSSTRASTKGPSVFPLAPSSKSTSGGTAALGCLVKDYFPEPVTVSWNSGALTSGVHTFPAVLQSSGLYSLSSVVTVPSSSLGTQTYICNVNHKPSNTKVDKRVEPKSCIPEDTFFPSPESSCDVKLVEKSFETDTNLNFQNLSVIGFRILLLKVAGFNLLMTLRLWSS

SEQ ID NO: 19540 - protein, 898 aa, Artificial Sequence
  Synthetic Polypeptide
MALPVTALLLPLALLLHAARPEVQLVESGGGLVQPGGSLRLSCAASGFSFSDFWMSWVRQAPGKGLEWVATISQAGSEKDYVDSVKGRFTISRDNAKKSLYLQMNSLRAEDTAVYYCASGVYSFDYRGQGTLVTVSSGTGGGGSGGGGSGGGGSEFDIQLTQSPSSLSASVGDRVTITCSTSSSVSYMHWYQQKPGKAPKLLIYSTSNLASGVPSRFSGSGSGTDFTFTISSLQPEDIATYYCHQWSSYPTFGQGTKVEIKLEIQNPDPAVYQLRDSKSSDKSVCLFTDFDSQTNVSQSKDSDVYITDKCVLDMRSMDFKSNSAVAWSNKSDFACANAFNNSIIPEDTFFPSPESSCDVKLVEKSFETDTNLNFQNLSVIGFRILLLKVAGFNLLMTLRLWSSRAKRSGSGVKQTLNFDLLKLAGDVESNPGPTSMDWIWRILFLVGAATGAHSGPQLQLQESGPGLVKPSETLSLTCTVSGDSISSGDYYWGWIRQPPGKGLEWIGHIYYSGVTYYNPSLKSRVTISVDTSRNQFSLKLSSVTAADTAVYYCTREDSSNWRSRGQGTLVTVSSGSGGGGSGGGGSGGGGSFEGVHSQVQLQESGPGLVRPSQTLSLTCTVSGFTISSGYSWHWVRQPPGRGLEWIGYIQYSGITNYNPSLKSRVTMLVDTSKNQFSLRLSSVTAADTAVYYCAREDYDYHWYFDVWGQGTTVTVSSTREDLKNVFPPEVAVFEPSEAEISHTQKATLVCLATGFYPDHVELSWWVNGKEVHSGVCTDPQPLKEQPALNDSRYCLSSRLRVSATFWQNPRNHFRCQVQFYGLSENDEWTQDRAKPVTQIVSAEAWGRADCGFTSESYQQGVLSATILYEILLGKATLYAVLVSALVLMAMVKRKDSRG

SEQ ID NO: 19541 - protein, 1090 aa, Artificial Sequence
  Synthetic Polypeptide
MALPVTALLLPLALLLHAARPEVQLVESGGGLVQPGGSLRLSCAASGFSFSDFWMSWVRQAPGKGLEWVATISQAGSEKDYVDSVKGRFTISRDNAKKSLYLQMNSLRAEDTAVYYCASGVYSFDYRGQGTLVTVSSGTGGGGSGGGGSGGGGSEFDIQLTQSPSSLSASVGDRVTITCSTSSSVSYMHWYQQKPGKAPKLLIYSTSNLASGVPSRFSGSGSGTDFTFTISSLQPEDIATYYCHQWSSYPTFGQGTKVEIKLEDLKNVFPPEVAVFEPSEAEISHTQKATLVCLATGFYPDHVELSWWVNGKEVHSGVSTDPQPLKEQPALNDSRYCLSSRLRVSATFWQNPRNHFRCQVQFYGLSENDEWTQDRAKPVTQIVSAEAWGRADCGSQSFGLLDPKLCYLLDGILFIYGVILTALFLRVKFSRSADAPAYQQGQNQLYNELNLGRREEYDVLDKRRGRDPEMGGKPQRRKNPQEGLYNELQKDKMAEAYSEIGMKGERRRGKGHDGLYQGLSTATKDTYDALHMQALPPRRAKRSGSGATNFSLLKQAGDVEENPGPTSMDWIWRILFLVGAATGAHSGPQLQLQESGPGLVKPSETLSLTCTVSGDSISSGDYYWGWIRQPPGKGLEWIGHIYYSGVTYYNPSLKSRVTISVDTSRNQFSLKLSSVTAADTAVYYCTREDSSNWRSRGQGTLVTVSSGSGGGGSGGGGSGGGGSFEGVHSQVQLQESGPGLVRPSQTLSLTCTVSGFTISSGYSWHWVRQPPGRGLEWIGYIQYSGITNYNPSLKSRVTMLVDTSKNQFSLRLSSVTAADTAVYYCAREDYDYHWYFDVWGQGTTVTVSSTRIQNPDPAVYQLRDSKSSDKSVCLFTDFDSQTNVSQSKDSDVYITDKTVLDMRSMDFKSNSAVAWSNKSDFACANAFNNSIIPEDTFFPSPESSCGTQSFGLLDPKLCYLLDGILFIYGVILTALFLRVKFSRSADAPAYQQGQNQLYNELNLGRREEYDVLDKRRGRDPEMGGKPQRRKNPQEGLYNELQKDKMAEAYSEIGMKGERRRGKGHDGLYQGLSTATKDTYDALHMQALPPR

SEQ ID NO: 19542 - protein, 920 aa, Artificial Sequence
  Synthetic Polypeptide
MALPVTALLLPLALLLHAARPEVQLVESGGGLVQPGGSLRLSCAASGFSFSDFWMSWVRQAPGKGLEWVATISQAGSEKDYVDSVKGRFTISRDNAKKSLYLQMNSLRAEDTAVYYCASGVYSFDYRGQGTLVTVSSGTGGGGSGGGGSGGGGSEFDIQLTQSPSSLSASVGDRVTITCSTSSSVSYMHWYQQKPGKAPKLLIYSTSNLASGVPSRFSGSGSGTDFTFTISSLQPEDIATYYCHQWSSYPTFGQGTKVEIKLEGQPKANPTVTLFPPSSEELQANKATLVCLISDFYPGAVTVAWKADGSPVKAGVETTKPSKQSNNKYAASSYLSLTPEQWKSHRSYSCQVTHEGSTVEKTVAPTECSPIKTDVITMDPKDNCSKDANDTLLLQLTNTSAYYMYLLLLLKSVVYFAIITCCLLRRTAFCCNGEKSRAKRSGSGATNFSLLKQAGDVEENPGPTSMDWIWRILFLVGAATGAHSGPQLQLQESGPGLVKPSETLSLTCTVSGDSISSGDYYWGWIRQPPGKGLEWIGHIYYSGVTYYNPSLKSRVTISVDTSRNQFSLKLSSVTAADTAVYYCTREDSSNWRSRGQGTLVTVSSGSGGGGSGGGGSGGGGSFEGVHSQVQLQESGPGLVRPSQTLSLTCTVSGFTISSGYSWHWVRQPPGRGLEWIGYIQYSGITNYNPSLKSRVTMLVDTSKNQFSLRLSSVTAADTAVYYCAREDYDYHWYFDVWGQGTTVTVSSTRASTKGPSVFPLAPSSKSTSGGTAALGCLVKDYFPEPVTVSWNSGALTSGVHTFPAVLQSSGLYSLSSVVTVPSSSLGTQTYICNVNHKPSNTKVDKRVEPKSCEVKTDSTDHVKPKETENTKQPSKSCHKPKAIVHTEKVNMMSLTVLGLRMLFAKTVAVNFLLTAKLFFL

SEQ ID NO: 19543 - protein, 901 aa, Artificial Sequence
  Synthetic Polypeptide
MALPVTALLLPLALLLHAARPEVQLVESGGGLVQPGGSLRLSCAASGFSFSDFWMSWVRQAPGKGLEWVATISQAGSEKDYVDSVKGRFTISRDNAKKSLYLQMNSLRAEDTAVYYCASGVYSFDYRGQGTLVTVSSGTGGGGSGGGGSGGGGSEFDIQLTQSPSSLSASVGDRVTITCSTSSSVSYMHWYQQKPGKAPKLLIYSTSNLASGVPSRFSGSGSGTDFTFTISSLQPEDIATYYCHQWSSYPTFGQGTKVEIKLEGQPKANPTVTLFPPSSEELQANKATLVCLISDFYPGAVTVAWKADGSPVKAGVETTKPSKQSNNKYAASSYLSLTPEQWKSHRSYSCQVTHEGSTVEKTVAPTECSGRADCGFTSESYQQGVLSATILYEILLGKATLYAVLVSALVLMAMVKRKDSRGRAKRSGSGVKQTLNFDLLKLAGDVESNPGPTSMDWIWRILFLVGAATGAHSGPQLQLQESGPGLVKPSETLSLTCTVSGDSISSGDYYWGWIRQPPGKGLEWIGHIYYSGVTYYNPSLKSRVTISVDTSRNQFSLKLSSVTAADTAVYYCTREDSSNWRSRGQGTLVTVSSGSGGGGSGGGGSGGGGSFEGVHSQVQLQESGPGLVRPSQTLSLTCTVSGFTISSGYSWHWVRQPPGRGLEWIGYIQYSGITNYNPSLKSRVTMLVDTSKNQFSLRLSSVTAADTAVYYCAREDYDYHWYFDVWGQGTTVTVSSTRASTKGPSVFPLAPSSKSTSGGTAALGCLVKDYFPEPVTVSWNSGALTSGVHTFPAVLQSSGLYSLSSVVTVPSSSLGTQTYICNVNHKPSNTKVDKRVEPKSCIPEDTFFPSPESSCDVKLVEKSFETDTNLNFQNLSVIGFRILLLKVAGFNLLMTLRLWSS

SEQ ID NO: 19544 - protein, 758 aa, Artificial Sequence
  Synthetic Polypeptide
MALPVTALLLPLALLLHAARPEVQVLESGGGLVQPGGSLRLSCAASGFTFSNFAMSWVRQAPGKGLEWVSTISGSAGTTDYADSVKGRFTISRDNSKKTLYLQMNSLRVEDTAVYYCADGRGPFFDYRGQGTLVTVSSGTGGGGSGGGGSGGGGSEFDIQLTQSPSSLSASVGDRVTITCSTSSSVSYMHWYQQKPGKAPKLLIYSTSNLASGVPSRFSGSGSGTDFTFTISSLQPEDIATYYCHQWSSYPTFGQGTKVEIKLEDLKNVFPPEVAVFEPSEAEISHTQKATLVCLATGFYPDHVELSWWVNGKEVHSGVCTDPQPLKEQPALNDSRYCLSSRLRVSATFWQNPRNHFRCQVQFYGLSENDEWTQDRAKPVTQIVSAEAWGRADCGFTSESYQQGVLSATILYEILLGKATLYAVLVSALVLMAMVKRKDSRGRAKRSGSGATNFSLLKQAGDVEENPGPTSMDWIWRILFLVGAATGAHSFEGVHSQVQLQESGPGLVRPSQTLSLTCTVSGFTISSGYSWHWVRQPPGRGLEWIGYIQYSGITNYNPSLKSRVTMLVDTSKNQFSLRLSSVTAADTAVYYCAREDYDYHWYFDVWGQGTTVTVSSTRIQNPDPAVYQLRDSKSSDKSVCLFTDFDSQTNVSQSKDSDVYITDKCVLDMRSMDFKSNSAVAWSNKSDFACANAFNNSIIPEDTFFPSPESSCDVKLVEKSFETDTNLNFQNLSVIGFRILLLKVAGFNLLMTLRLWSS

SEQ ID NO: 19545 - protein, 759 aa, Artificial Sequence
  Synthetic Polypeptide
MALPVTALLLPLALLLHAARPDIQLTQSPSSLSASVGDRVTITCSTSSSVSYMHWYQQKPGKAPKLLIYSTSNLASGVPSRFSGSGSGTDFTFTISSLQPEDIATYYCHQWSSYPTFGQGTKVEIKLEDLKNVFPPEVAVFEPSEAEISHTQKATLVCLATGFYPDHVELSWWVNGKEVHSGVCTDPQPLKEQPALNDSRYCLSSRLRVSATFWQNPRNHFRCQVQFYGLSENDEWTQDRAKPVTQIVSAEAWGRADCGFTSESYQQGVLSATILYEILLGKATLYAVLVSALVLMAMVKRKDSRGRAKRSGSGATNFSLLKQAGDVEENPGPTSMDWIWRILFLVGAATGAHSGPEVQLVESGGGLVQAGGSLRLSCAASGRTFSMGWFRQAPGKEREFVAAITYSGGSPYYADSVKGRFTISRDNAKNTVYLQMNSLKPEDTAVYYCAANPTYGSDWNAENWGQGTQVTVSSGSGGGGSGGGGSGGGGSFEGVHSQVQLQESGPGLVRPSQTLSLTCTVSGFTISSGYSWHWVRQPPGRGLEWIGYIQYSGITNYNPSLKSRVTMLVDTSKNQFSLRLSSVTAADTAVYYCAREDYDYHWYFDVWGQGTTVTVSSTRIQNPDPAVYQLRDSKSSDKSVCLFTDFDSQTNVSQSKDSDVYITDKCVLDMRSMDFKSNSAVAWSNKSDFACANAFNNSIIPEDTFFPSPESSCDVKLVEKSFETDTNLNFQNLSVIGFRILLLKVAGFNLLMTLRLWSS

SEQ ID NO: 19546 - protein, 886 aa, Artificial Sequence
  Synthetic Polypeptide
MALPVTALLLPLALLLHAARPDIQLTQSPSSLSASVGDRVTITCSTSSSVSYMHWYQQKPGKAPKLLIYSTSNLASGVPSRFSGSGSGTDFTFTISSLQPEDIATYYCHQWSSYPTFGQGTKVEIKLEDLKNVFPPEVAVFEPSEAEISHTQKATLVCLATGFYPDHVELSWWVNGKEVHSGVCTDPQPLKEQPALNDSRYCLSSRLRVSATFWQNPRNHFRCQVQFYGLSENDEWTQDRAKPVTQIVSAEAWGRADCGFTSESYQQGVLSATILYEILLGKATLYAVLVSALVLMAMVKRKDSRGRAKRSGSGATNFSLLKQAGDVEENPGPTSMDWIWRILFLVGAATGAHSQLQLQESGPGLVKPSETLSLTCTVSGGSISSGDYYWGWIRQPPGKGLEWIGSISYSGSTYYNPSLKSRVTISVDTSRNQFSLKLSSVTAADTAVYYCTREDSSNWRSRGQGTLVTVSSSGGGGSGGGGSEVQLVESGGGLVQAGGSLRLSCAASGRTFSMGWFRQAPGKEREFVAAITYSGGSPYYADSVKGRFTISRDNAKNTVYLQMNSLKPEDTAVYYCAANPTYGSDWNAENWGQGTQVTVSSGSGGGGSGGGGSGGGGSFEGVHSQVQLQESGPGLVRPSQTLSLTCTVSGFTISSGYSWHWVRQPPGRGLEWIGYIQYSGITNYNPSLKSRVTMLVDTSKNQFSLRLSSVTAADTAVYYCAREDYDYHWYFDVWGQGTTVTVSSTRIQNPDPAVYQLRDSKSSDKSVCLFTDFDSQTNVSQSKDSDVYITDKCVLDMRSMDFKSNSAVAWSNKSDFACANAFNNSIIPEDTFFPSPESSCDVKLVEKSFETDTNLNFQNLSVIGFRILLLKVAGFNLLMTLRLWSS

SEQ ID NO: 19547 - protein, 895 aa, Artificial Sequence
  Synthetic Polypeptide
MALPVTALLLPLALLLHAARPEVQVLESGGGLVQPGGSLRLSCAASGFTFSNFAMSWVRQAPGKGLEWVSTISGSAGTTDYADSVKGRFTISRDNSKKTLYLQMNSLRVEDTAVYYCADGRGPFFDYRGQGTLVTVSSGTGGGGSGGGGSGGGGSEFDIQLTQSPSSLSASVGDRVTITCSTSSSVSYMHWYQQKPGKAPKLLIYSTSNLASGVPSRFSGSGSGTDFTFTISSLQPEDIATYYCHQWSSYPTFGQGTKVEIKLEDLKNVFPPEVAVFEPSEAEISHTQKATLVCLATGFYPDHVELSWWVNGKEVHSGVCTDPQPLKEQPALNDSRYCLSSRLRVSATFWQNPRNHFRCQVQFYGLSENDEWTQDRAKPVTQIVSAEAWGRADCGFTSESYQQGVLSATILYEILLGKATLYAVLVSALVLMAMVKRKDSRGRAKRSGSGATNFSLLKQAGDVEENPGPTSMDWIWRILFLVGAATGAHSGPEVQLVESGGGLVQAGGSLRLSCAASGRTFSMGWFRQAPGKEREFVAAITYSGGSPYYASSVRGRFTISRDNAKNTVYLQMNSLKPEDTAVYYCAANPTYGSDWNAENWGQGTQVTVSSGSGGGGSGGGGSGGGGSFEGVHSQVQLQESGPGLVRPSQTLSLTCTVSGFTISSGYSWHWVRQPPGRGLEWIGYIQYSGITNYNPSLKSRVTMLVDTSKNQFSLRLSSVTAADTAVYYCAREDYDYHWYFDVWGQGTTVTVSSTRIQNPDPAVYQLRDSKSSDKSVCLFTDFDSQTNVSQSKDSDVYITDKCVLDMRSMDFKSNSAVAWSNKSDFACANAFNNSIIPEDTFFPSPESSCDVKLVEKSFETDTNLNFQNLSVIGFRILLLKVAGFNLLMTLRLWSS

SEQ ID NO: 19548 - protein, 726 aa, Artificial Sequence
  Synthetic Polypeptide
MALPVTALLLPLALLLHAARPDIQMTQSPSSLSASVGDRVTITCRASQDVNTAVAWYQQKPGKAPKLLIYSASFLYSGVPSRFSGSRSGTDFTLTISSLQPEDFATYYCQQAYTTPPTFGQGTKVEIKRTGGGGSGGGGSGGGGSEVQLVESGGGLVQPGGSLRLSCAASGFNIKDTYIHWVRQAPGKGLEWVARIYPTNGYTRYADSVKGRFTISADTSKNTAYLQMNSLRAEDTAVYYCSRWGGAGAYAMDVWGQGTLVTVSSTREQKLISEEDLAKPTTTPAPRPPTPAPTIASQPLSLRPEACRPAAGGAVHTRGLDFACDIYIWAPLAGTCGVLLLSLVITLYCKRGRKKLLYIFKQPFMRPVQTTQEEDGCSCRFPEEEEGGCELRVKFSRSADAPAYQQGQNQLYNELNLGRREEYDVLDKRRGRDPEMGGKPRRKNPQEGLYNELQKDKMAEAYSEIGMKGERRRGKGHDGLYQGLSTATKDTYDALHMQALPPRSSGSGEGRGSLLTCGDVEENPGPHMTEYKPTVRLATRDDVPRAVRTLAAAFADYPATRHTVDPDRHIERVTELQELFLTRVGLDIGKVWVADDGAAVAVWTTPESVEAGAVFAEIGPRMAELSGSRLAAQQQMEGLLAPHRPKEPAWFLATVGVSPDHQGKGLGSAVVLPGVEAAERAGVPAFLETSAPRNLPFYERLGFTVTADVEVPEGPRTWCMTRKPGA

SEQ ID NO: 19549 - protein, 720 aa, Artificial Sequence
  Synthetic Polypeptide
MALPVTALLLPLALLLHAARPDIQMTQSPSSLSASVGDRVTITCRASQDVNTAVAWYQQKPGKAPKLLIYSASFLYSGVPSRFSGSRSGTDFTLTISSLQPEDFATYYCQQAYTTPPTFGQGTKVEIKRTGGGGSGGGGSGGGGSEVQLVESGGGLVQPGGSLRLSCAASGFNIKDTYIHWVRQAPGKGLEWVARIYPTNGYTRYADSVKGRFTISADTSKNTAYLQMNSLRAEDTAVYYCSRWGGAGAYAMDVWGQGTLVTVSSTREQKLISEEDLKIEVMYPPPYLDNEKSNGTIIHVKGKHLCPSPLFPGPSKPFWVLVVVGGVLACYSLLVTVAFIIFWVRSKRSRLLHSDYMNMTPRRPGPTRKHYQPYAPPRDFAAYRSRVKFSRSADAPAYQQGQNQLYNELNLGRREEYDVLDKRRGRDPEMGGKPRRKNPQEGLYNELQKDKMAEAYSEIGMKGERRRGKGHDGLYQGLSTATKDTYDALHMQALPPRSSGSGEGRGSLLTCGDVEENPGPHMTEYKPTVRLATRDDVPRAVRTLAAAFADYPATRHTVDPDRHIERVTELQELFLTRVGLDIGKVWVADDGAAVAVWTTPESVEAGAVFAEIGPRMAELSGSRLAAQQQMEGLLAPHRPKEPAWFLATVGVSPDHQGKGLGSAVVLPGVEAAERAGVPAFLETSAPRNLPFYERLGFTVTADVEVPEGPRTWCMTRKPGA

SEQ ID NO: 19550 - protein, 497 aa, Artificial Sequence
  Synthetic Polypeptide
MALPVTALLLPLALLLHAARPDIQMTQSPSSLSASVGDRVTITCRASQDVNTAVAWYQQKPGKAPKLLIYSASFLYSGVPSRFSGSRSGTDFTLTISSLQPEDFATYYCQQAYTTPPTFGQGTKVEIKRTGGGGSGGGGSGGGGSEVQLVESGGGLVQPGGSLRLSCAASGFNIKDTYIHWVRQAPGKGLEWVARIYPTNGYTRYADSVKGRFTISADTSKNTAYLQMNSLRAEDTAVYYCSRWGGAGAYAMDVWGQGTLVTVSSTREQKLISEEDLKIEVMYPPPYLDNEKSNGTIIHVKGKHLCPSPLFPGPSKPFWVLVVVGGVLACYSLLVTVAFIIFWVRSKRSRLLHSDYMNMTPRRPGPTRKHYQPYAPPRDFAAYRSRVKFSRSADAPAYQQGQNQLYNELNLGRREEYDVLDKRRGRDPEMGGKPRRKNPQEGLYNELQKDKMAEAYSEIGMKGERRRGKGHDGLYQGLSTATKDTYDALHMQALPPR

SEQ ID NO: 19551 - protein, 503 aa, Artificial Sequence
  Synthetic Polypeptide
MALPVTALLLPLALLLHAARPDIQMTQSPSSLSASVGDRVTITCRASQDVNTAVAWYQQKPGKAPKLLIYSASFLYSGVPSRFSGSRSGTDFTLTISSLQPEDFATYYCQQAYTTPPTFGQGTKVEIKRTGGGGSGGGGSGGGGSEVQLVESGGGLVQPGGSLRLSCAASGFNIKDTYIHWVRQAPGKGLEWVARIYPTNGYTRYADSVKGRFTISADTSKNTAYLQMNSLRAEDTAVYYCSRWGGAGAYAMDVWGQGTLVTVSSTREQKLISEEDLAKPTTTPAPRPPTPAPTIASQPLSLRPEACRPAAGGAVHTRGLDFACDIYIWAPLAGTCGVLLLSLVITLYCKRGRKKLLYIFKQPFMRPVQTTQEEDGCSCRFPEEEEGGCELRVKFSRSADAPAYQQGQNQLYNELNLGRREEYDVLDKRRGRDPEMGGKPRRKNPQEGLYNELQKDKMAEAYSEIGMKGERRRGKGHDGLYQGLSTATKDTYDALHMQALPPR

SEQ ID NO: 19552 - protein, 503 aa, Artificial Sequence
  Synthetic Polypeptide
MALPVTALLLPLALLLHAARPEVQLVESGGGLVQPGGSLRLSCAASGFNIKDTYIHWVRQAPGKGLEWVARIYPTNGYTRYADSVKGRFTISADTSKNTAYLQMNSLRAEDTAVYYCSRWGGAGAYAMDVWGQGTLVTVSSGGGGSGGGGSGGGGSDIQMTQSPSSLSASVGDRVTITCRASQDVNTAVAWYQQKPGKAPKLLIYSASFLYSGVPSRFSGSRSGTDFTLTISSLQPEDFATYYCQQAYTTPPTFGQGTKVEIKRTTREQKLISEEDLAKPTTTPAPRPPTPAPTIASQPLSLRPEACRPAAGGAVHTRGLDFACDIYIWAPLAGTCGVLLLSLVITLYCKRGRKKLLYIFKQPFMRPVQTTQEEDGCSCRFPEEEEGGCELRVKFSRSADAPAYQQGQNQLYNELNLGRREEYDVLDKRRGRDPEMGGKPRRKNPQEGLYNELQKDKMAEAYSEIGMKGERRRGKGHDGLYQGLSTATKDTYDALHMQALPPR

SEQ ID NO: 19553 - protein, 916 aa, Artificial Sequence
  Synthetic Polypeptide
MALPVTALLLPLALLLHAARPDIQMTQSPSSLSASVGDRVTITCRASQDVNTAVAWYQQKPGKAPKLLIYSASFLYSGVPSRFSGSRSGTDFTLTISSLQPEDFATYYCQQAYTTPPTFGQGTKVEIKRTGGGGSGGGGSGGGGSEVQLVESGGGLVQPGGSLRLSCAASGFNIKDTYIHWVRQAPGKGLEWVARIYPTNGYTRYADSVKGRFTISADTSKNTAYLQMNSLRAEDTAVYYCSRWGGAGAYAMDVWGQGTLVTVSSTREQKLISEEDLAKPTTTPAPRPPTPAPTIASQPLSLRPEACRPAAGGAVHTRGLDFACDIYIWAPLAGTCGVLLLSLVITLYCGRARVKFSRSADAPAYQQGQNQLYNELNLGRREEYDVLDKRRGRDPEMGGKPRRKNPQEGLYNELQKDKMAEAYSEIGMKGERRRGKGHDGLYQGLSTATKDTYDALHMQALPPRSRGSGATNFSLLKQAGDVEENPGPGIHMATYEVLCEVARKLGTDDREVVLFLLNVFIPQPTLAQLIGALRALKEEGRLTFPLLAECLFRAGRRDLLRDLLHLDPRFLERHLAGTMSYFSPYQLTVLHVDGELCARDIRSLIFLSKDTIGSRSTPQTFLHWVYCMENLDLLGPTDVDALMSMLRSLSRVDLQRQVQTLMGLHLSGPSHSQHYRHTPLETDFYDYKDDDDKTSGSGEGRGSLLTCGDVEENPGPHMTEYKPTVRLATRDDVPRAVRTLAAAFADYPATRHTVDPDRHIERVTELQELFLTRVGLDIGKVWVADDGAAVAVWTTPESVEAGAVFAEIGPRMAELSGSRLAAQQQMEGLLAPHRPKEPAWFLATVGVSPDHQGKGLGSAVVLPGVEAAERAGVPAFLETSAPRNLPFYERLGFTVTADVEVPEGPRTWCMTRKPGA

SEQ ID NO: 19554 - protein, 856 aa, Artificial Sequence
  Synthetic Polypeptide
MALPVTALLLPLALLLHAARPDIQMTQSPSSLSASVGDRVTITCRASQDVNTAVAWYQQKPGKAPKLLIYSASFLYSGVPSRFSGSRSGTDFTLTISSLQPEDFATYYCQQAYTTPPTFGQGTKVEIKRTLEIQNPDPAVYQLRDSKSSDKSVCLFTDFDSQTNVSQSKDSDVYITDKCVLDMRSMDFKSNSAVAWSNKSDFACANAFNNSIIPEDTFFPSSDVPCDVKLVEKSFETDTNLNFQNLSVIGFRILLLKVAGFNLLMTLRLWSSRAKRSGSGVKQTLNFDLLKLAGDVESNPGPTSMDWIWRILFLVGAATGAHSFEEVQLVESGGGLVQPGGSLRLSCAASGFNIKDTYIHWVRQAPGKGLEWVARIYPTNGYTRYADSVKGRFTISADTSKNTAYLQMNSLRAEDTAVYYCSRWGGAGAYAMDVWGQGTLVTVSSTREDLKNVFPPEVAVFEPSKAEIAHTQKATLVCLATGFYPDHVELSWWVNGKEVHSGVCTDPQPLKEQPALNDSRYCLSSRLRVSATFWQNPRNHFRCQVQFYGLSENDEWTQDRAKPVTQIVSAEAWGRADCGITSASYHQGVLSATILYEILLGKATLYAVLVSALVLMAMVKRKDSRGRAKRSGSGATNFSLLKQAGDVEENPGPSRGHMTEYKPTVRLATRDDVPRAVRTLAAAFADYPATRHTVDPDRHIERVTELQELFLTRVGLDIGKVWVADDGAAVAVWTTPESVEAGAVFAEIGPRMAELSGSRLAAQQQMEGLLAPHRPKEPAWFLATVGVSPDHQGKGLGSAVVLPGVEAAERAGVPAFLETSAPRNLPFYERLGFTVTADVEVPEGPRTWCMTRKPGA

SEQ ID NO: 19555 - protein, 855 aa, Artificial Sequence
  Synthetic Polypeptide
MALPVTALLLPLALLLHAARPDIQMTQSPSSLSASVGDRVTITCRASQDVNTAVAWYQQKPGKAPKLLIYSASFLYSGVPSRFSGSRSGTDFTLTISSLQPEDFATYYCQQAYTTPPTFGQGTKVEIKRTLEDLKNVFPPEVAVFEPSKAEIAHTQKATLVCLATGFYPDHVELSWWVNGKEVHSGVCTDPQPLKEQPALNDSRYCLSSRLRVSATFWQNPRNHFRCQVQFYGLSENDEWTQDRAKPVTQIVSAEAWGRADCGITSASYHQGVLSATILYEILLGKATLYAVLVSALVLMAMVKRKDSRGRAKRSGSGATNFSLLKQAGDVEENPGPTSMDWIWRILFLVGAATGAHSFEEVQLVESGGGLVQPGGSLRLSCAASGFNIKDTYIHWVRQAPGKGLEWVARIYPTNGYTRYADSVKGRFTISADTSKNTAYLQMNSLRAEDTAVYYCSRWGGAGAYAMDVWGQGTLVTVSSTRIQNPDPAVYQLRDSKSSDKSVCLFTDFDSQTNVSQSKDSDVYITDKCVLDMRSMDFKSNSAVAWSNKSDFACANAFNNSIIPEDTFFPSSDVPCDVKLVEKSFETDTNLNFQNLSVIGFRILLLKVAGFNLLMTLRLWSSRAKRSGSGVKQTLNFDLLKLAGDVESNPGPSRGHMTEYKPTVRLATRDDVPRAVRTLAAAFADYPATRHTVDPDRHIERVTELQELFLTRVGLDIGKVWVADDGAAVAVWTTPESVEAGAVFAEIGPRMAELSGSRLAAQQQMEGLLAPHRPKEPAWFLATVGVSPDHQGKGLGSAVVLPGVEAAERAGVPAFLETSAPRNLPFYERLGFTVTADVEVPEGPRTWCMTRKPGA

SEQ ID NO: 19556 - protein, 622 aa, Artificial Sequence
  Synthetic Polypeptide
MALPVTALLLPLALLLHAARPDIQMTQSPSSLSASVGDRVTITCRASQDVNTAVAWYQQKPGKAPKLLIYSASFLYSGVPSRFSGSRSGTDFTLTISSLQPEDFATYYCQQAYTTPPTFGQGTKVEIKRTLEDLKNVFPPEVAVFEPSEAEISHTQKATLVCLATGFYPDHVELSWWVNGKEVHSGVCTDPQPLKEQPALNDSRYCLSSRLRVSATFWQNPRNHFRCQVQFYGLSENDEWTQDRAKPVTQIVSAEAWGRADCGFTSESYQQGVLSATILYEILLGKATLYAVLVSALVLMAMVKRKDSRGRAKRSGSGATNFSLLKQAGDVEENPGPTSMDWIWRILFLVGAATGAHSFEEVQLVESGGGLVQPGGSLRLSCAASGFNIKDTYIHWVRQAPGKGLEWVARIYPTNGYTRYADSVKGRFTISADTSKNTAYLQMNSLRAEDTAVYYCSRWGGAGAYAMDVWGQGTLVTVSSTRIQNPDPAVYQLRDSKSSDKSVCLFTDFDSQTNVSQSKDSDVYITDKCVLDMRSMDFKSNSAVAWSNKSDFACANAFNNSIIPEDTFFPSPESSCDVKLVEKSFETDTNLNFQNLSVIGFRILLLKVAGFNLLMTLRLWSS

SEQ ID NO: 19557 - protein, 847 aa, Artificial Sequence
  Synthetic Polypeptide
MALPVTALLLPLALLLHAARPDIQMTQSPSSLSASVGDRVTITCRASQDVNTAVAWYQQKPGKAPKLLIYSASFLYSGVPSRFSGSRSGTDFTLTISSLQPEDFATYYCQQAYTTPPTFGQGTKVEIKRTLEDLKNVFPPEVAVFEPSEAEISHTQKATLVCLATGFYPDHVELSWWVNGKEVHSGVCTDPQPLKEQPALNDSRYCLSSRLRVSATFWQNPRNHFRCQVQFYGLSENDEWTQDRAKPVTQIVSAEAWGRADCGFTSESYQQGVLSATILYEILLGKATLYAVLVSALVLMAMVKRKDSRGRAKRSGSGATNFSLLKQAGDVEENPGPTSMDWIWRILFLVGAATGAHSFEEVQLVESGGGLVQPGGSLRLSCAASGFNIKDTYIHWVRQAPGKGLEWVARIYPTNGYTRYADSVKGRFTISADTSKNTAYLQMNSLRAEDTAVYYCSRWGGAGAYAMDVWGQGTLVTVSSTRIQNPDPAVYQLRDSKSSDKSVCLFTDFDSQTNVSQSKDSDVYITDKCVLDMRSMDFKSNSAVAWSNKSDFACANAFNNSIIPEDTFFPSPESSCDVKLVEKSFETDTNLNFQNLSVIGFRILLLKVAGFNLLMTLRLWSSRAKRSGSGVKQTLNFDLLKLAGDVESNPGPSRGGIHTMATYEVLCEVARKLGTDDREVVLFLLNVFIPQPTLAQLIGALRALKEEGRLTFPLLAECLFRAGRRDLLRDLLHLDPRFLERHLAGTMSYFSPYQLTVLHVDGELCARDIRSLIFLSKDTIGSRSTPQTFLHWVYCMENLDLLGPTDVDALMSMLRSLSRVDLQRQVQTLMGLHLSGPSHSQHYRHTP

SEQ ID NO: 19558 - protein, 626 aa, Artificial Sequence
  Synthetic Polypeptide
MALPVTALLLPLALLLHAARPDIQMTQSPSSLSASVGDRVTITCRASQDVNTAVAWYQQKPGKAPKLLIYSASFLYSGVPSRFSGSRSGTDFTLTISSLQPEDFATYYCQQAYTTPPTFGQGTKVEIKRTLEIQNPDPAVYQLRDSKSSDKSVCLFTDFDSQTNVSQSKDSDVYITDKCVLDMRSMDFKSNSAVAWSNKSDFACANAFNNSIIPEDTFFPSPESSCDVKLVEKSFETDTNLNFQNLSVIGFRILLLKVAGFNLLMTLRLWSSRAKRSGSGVKQTLNFDLLKLAGDVESNPGPTSMDWIWRILFLVGAATGAHSFEEVQLVESGGGLVQPGGSLRLSCAASGFNIKDTYIHWVRQAPGKGLEWVARIYPTNGYTRYADSVKGRFTISADTSKNTAYLQMNSLRAEDTAVYYCSRWGGAGAYAMDVWGQGTLVTVSSTREDLKNVFPPEVAVFEPSEAEISHTQKATLVCLATGFYPDHVELSWWVNGKEVHSGVCTDPQPLKEQPALNDSRYCLSSRLRVSATFWQNPRNHFRCQVQFYGLSENDEWTQDRAKPVTQIVSAEAWGRADCGFTSESYQQGVLSATILYEILLGKATLYAVLVSALVLMAMVKRKDSRG

SEQ ID NO: 19559 - protein, 848 aa, Artificial Sequence
  Synthetic Polypeptide
MALPVTALLLPLALLLHAARPDIQMTQSPSSLSASVGDRVTITCRASQDVNTAVAWYQQKPGKAPKLLIYSASFLYSGVPSRFSGSRSGTDFTLTISSLQPEDFATYYCQQAYTTPPTFGQGTKVEIKRTLEIQNPDPAVYQLRDSKSSDKSVCLFTDFDSQTNVSQSKDSDVYITDKCVLDMRSMDFKSNSAVAWSNKSDFACANAFNNSIIPEDTFFPSPESSCDVKLVEKSFETDTNLNFQNLSVIGFRILLLKVAGFNLLMTLRLWSSRAKRSGSGVKQTLNFDLLKLAGDVESNPGPTSMDWIWRILFLVGAATGAHSFEEVQLVESGGGLVQPGGSLRLSCAASGFNIKDTYIHWVRQAPGKGLEWVARIYPTNGYTRYADSVKGRFTISADTSKNTAYLQMNSLRAEDTAVYYCSRWGGAGAYAMDVWGQGTLVTVSSTREDLKNVFPPEVAVFEPSEAEISHTQKATLVCLATGFYPDHVELSWWVNGKEVHSGVCTDPQPLKEQPALNDSRYCLSSRLRVSATFWQNPRNHFRCQVQFYGLSENDEWTQDRAKPVTQIVSAEAWGRADCGFTSESYQQGVLSATILYEILLGKATLYAVLVSALVLMAMVKRKDSRGRAKRSGSGATNFSLLKQAGDVEENPGPSRGGIHTMATYEVLCEVARKLGTDDREVVLFLLNVFIPQPTLAQLIGALRALKEEGRLTFPLLAECLFRAGRRDLLRDLLHLDPRFLERHLAGTMSYFSPYQLTVLHVDGELCARDIRSLIFLSKDTIGSRSTPQTFLHWVYCMENLDLLGPTDVDALMSMLRSLSRVDLQRQVQTLMGLHLSGPSHSQHYRHTP

SEQ ID NO: 19560 - protein, 900 aa, Artificial Sequence
  Synthetic Polypeptide
MALPVTALLLPLALLLHAARPLEGKPIPNPLLGLDSTGSGEDLKNVFPPEVAVFEPSKAEIAHTQKATLVCLATGFYPDHVELSWWVNGKEVHSGVCTDPQPLKEQPALNDSRYCLSSRLRVSATFWQNPRNHFRCQVQFYGLSENDEWTQDRAKPVTQIVSAEAWGRADCGITSASYHQGVLSATILYEILLGKATLYAVLVSALVLMAMVKRKDSRGRAKRSGSGATNFSLLKQAGDVEENPGPTSMALPVTALLLPLALLLHAARPDIQMTQSPSSLSASVGDRVTITCRASQDVNTAVAWYQQKPGKAPKLLIYSASFLYSGVPSRFSGSRSGTDFTLTISSLQPEDFATYYCQQAYTTPPTFGQGTKVEIKRTGGGGSGGGGSGGGGSEVQLVESGGGLVQPGGSLRLSCAASGFNIKDTYIHWVRQAPGKGLEWVARIYPTNGYTRYADSVKGRFTISADTSKNTAYLQMNSLRAEDTAVYYCSRWGGAGAYAMDVWGQGTLVTVSSTREQKLISEEDGSGIQNPDPAVYQLRDSKSSDKSVCLFTDFDSQTNVSQSKDSDVYITDKCVLDMRSMDFKSNSAVAWSNKSDFACANAFNNSIIPEDTFFPSSDVPCDVKLVEKSFETDTNLNFQNLSVIGFRILLLKVAGFNLLMTLRLWSSRAKRSGSGVKQTLNFDLLKLAGDVESNPGPSRGHMTEYKPTVRLATRDDVPRAVRTLAAAFADYPATRHTVDPDRHIERVTELQELFLTRVGLDIGKVWVADDGAAVAVWTTPESVEAGAVFAEIGPRMAELSGSRLAAQQQMEGLLAPHRPKEPAWFLATVGVSPDHQGKGLGSAVVLPGVEAAERAGVPAFLETSAPRNLPFYERLGFTVTADVEVPEGPRTWCMTRKPGA

SEQ ID NO: 19561 - protein, 901 aa, Artificial Sequence
  Synthetic Polypeptide
MALPVTALLLPLALLLHAARPLEQKLISEEDLGSGDRPDPAVYQLRDSKSSDKSVCLFTDFDSQTNVSQSKDSDVYITDKCVLDMRSMDFKSNSAVAWSNKSDFACANAFNNSIIPEDTFFPSPESSCDVKLVEKSFETDTNLNFQNLSVIGFRILLLKVAGFNLLMTLRLWSSSSRAKRSGSGVKQTLNFDLLKLAGDVESNPGPTSMALPVTALLLPLALLLHAARPDIQMTQSPSSLSASVGDRVTITCRASQDVNTAVAWYQQKPGKAPKLLIYSASFLYSGVPSRFSGSRSGTDFTLTISSLQPEDFATYYCQQAYTTPPTFGQGTKVEIKRTGGGGSGGGGSGGGGSEVQLVESGGGLVQPGGSLRLSCAASGFNIKDTYIHWVRQAPGKGLEWVARIYPTNGYTRYADSVKGRFTISADTSKNTAYLQMNSLRAEDTAVYYCSRWGGAGAYAMDVWGQGTLVTVSSTRGKPIPNPLLGLDSTGSGEDLKNVFPPEVAVFEPSEAEISHTQKATLVCLATGFYPDHVELSWWVNGKEVHSGVCTDPQPLKEQPALNDSRYCLSSRLRVSATFWQNPRNHFRCQVQFYGLSENDEWTQDRAKPVTQIVSAEAWGRADCGFTSESYQQGVLSATILYEILLGKATLYAVLVSALVLMAMVKRKDSRGRAKRSGSGATNFSLLKQAGDVEENPGPSRGHMTEYKPTVRLATRDDVPRAVRTLAAAFADYPATRHTVDPDRHIERVTELQELFLTRVGLDIGKVWVADDGAAVAVWTTPESVEAGAVFAEIGPRMAELSGSRLAAQQQMEGLLAPHRPKEPAWFLATVGVSPDHQGKGLGSAVVLPGVEAAERAGVPAFLETSAPRNLPFYERLGFTVTADVEVPEGPRTWCMTRKPGA

SEQ ID NO: 19562 - protein, 855 aa, Artificial Sequence
  Synthetic Polypeptide
MALPVTALLLPLALLLHAARPDIQMTQSPSSLSASVGDRVTITCRASQDVNTAVAWYQQKPGKAPKLLIYSASFLYSGVPSRFSGSRSGTDFTLTISSLQPEDFATYYCQQAYTTPPTFGQGTKVEIKRTLEDLKNVFPPEVAVFEPSEAEISHTQKATLVCLATGFYPDHVELSWWVNGKEVHSGVSTDPQPLKEQPALNDSRYCLSSRLRVSATFWQNPRNHFRCQVQFYGLSENDEWTQDRAKPVTQIVSAEAWGRADCGFTSESYQQGVLSATILYEILLGKATLYAVLVSALVLMAMVKRKDSRGRAKRSGSGATNFSLLKQAGDVEENPGPTSMDWIWRILFLVGAATGAHSFEEVQLVESGGGLVQPGGSLRLSCAASGFNIKDTYIHWVRQAPGKGLEWVARIYPTNGYTRYADSVKGRFTISADTSKNTAYLQMNSLRAEDTAVYYCSRWGGAGAYAMDVWGQGTLVTVSSTRIQNPDPAVYQLRDSKSSDKSVCLFTDFDSQTNVSQSKDSDVYITDKTVLDMRSMDFKSNSAVAWSNKSDFACANAFNNSIIPEDTFFPSPESSCDVKLVEKSFETDTNLNFQNLSVIGFRILLLKVAGFNLLMTLRLWSSRAKRSGSGVKQTLNFDLLKLAGDVESNPGPSRGHMTEYKPTVRLATRDDVPRAVRTLAAAFADYPATRHTVDPDRHIERVTELQELFLTRVGLDIGKVWVADDGAAVAVWTTPESVEAGAVFAEIGPRMAELSGSRLAAQQQMEGLLAPHRPKEPAWFLATVGVSPDHQGKGLGSAVVLPGVEAAERAGVPAFLETSAPRNLPFYERLGFTVTADVEVPEGPRTWCMTRKPGA

SEQ ID NO: 19563 - protein, 937 aa, Artificial Sequence
  Synthetic Polypeptide
MALPVTALLLPLALLLHAARPDIQMTQSPSSLSASVGDRVTITCRASQDVNTAVAWYQQKPGKAPKLLIYSASFLYSGVPSRFSGSRSGTDFTLTISSLQPEDFATYYCQQAYTTPPTFGQGTKVEIKRTLEDLKNVFPPEVAVFEPSEAEISHTQKATLVCLATGFYPDHVELSWWVNGKEVHSGVSTDPQPLKEQPALNDSRYCLSSRLRVSATFWQNPRNHFRCQVQFYGLSENDEWTQDRAKPVTQIVSAEAWGRADCGFTSESYQQGVLSATILYEILLGKATLYAVLVSALVLMAMVKRKDSRGRAKRSGSGATNFSLLKQAGDVEENPGPTSMDWIWRILFLVGAATGAHSFEEVQLVESGGGLVQPGGSLRLSCAASGFNIKDTYIHWVRQAPGKGLEWVARIYPTNGYTRYADSVKGRFTISADTSKNTAYLQMNSLRAEDTAVYYCSRWGGAGAYAMDVWGQGTLVTVSSTREQKLISEEDGSGTPFPSLAPPIMLLVDGKQQMVVVCLVLDVAPPGLDSPIWFSAGNGSALDAFTYGPSPATDGTWTNLAHLSLPSEELASWEPLVCHTGPGAEGHSRSTQPMHLSGEASTARTCPQEPLRGTPGGALWLGVLRLLLFKLLLFDLLLTCSCLCDPAGPLPSPATTTRLRALGSHRLHPATETGGREATSSPRPQPRDRRWGDTPPGRKPGSPVRAKRSGSGVKQTLNFDLLKLAGDVESNPGPSRGHMTEYKPTVRLATRDDVPRAVRTLAAAFADYPATRHTVDPDRHIERVTELQELFLTRVGLDIGKVWVADDGAAVAVWTTPESVEAGAVFAEIGPRMAELSGSRLAAQQQMEGLLAPHRPKEPAWFLATVGVSPDHQGKGLGSAVVLPGVEAAERAGVPAFLETSAPRNLPFYERLGFTVTADVEVPEGPRTWCMTRKPGA

SEQ ID NO: 19564 - protein, 955 aa, Artificial Sequence
  Synthetic Polypeptide
MALPVTALLLPLALLLHAARPLEDLKNVFPPEVAVFEPSEAEISHTQKATLVCLATGFYPDHVELSWWVNGKEVHSGVSTDPQPLKEQPALNDSRYCLSSRLRVSATFWQNPRNHFRCQVQFYGLSENDEWTQDRAKPVTQIVSAEAWGRADCGFTSESYQQGVLSATILYEILLGKATLYAVLVSALVLMAMVKRKDSRGRAKRSGSGATNFSLLKQAGDVEENPGPTSMALPVTALLLPLALLLHAARPDIQMTQSPSSLSASVGDRVTITCRASQDVNTAVAWYQQKPGKAPKLLIYSASFLYSGVPSRFSGSRSGTDFTLTISSLQPEDFATYYCQQAYTTPPTFGQGTKVEIKRTGGGGSGGGGSGGGGSEVQLVESGGGLVQPGGSLRLSCAASGFNIKDTYIHWVRQAPGKGLEWVARIYPTNGYTRYADSVKGRFTISADTSKNTAYLQMNSLRAEDTAVYYCSRWGGAGAYAMDVWGQGTLVTVSSTREQKLISEEDLGSGTPFPSLAPPIMLLVDGKQQMVVVCLVLDVAPPGLDSPIWFSAGNGSALDAFTYGPSPATDGTWTNLAHLSLPSEELASWEPLVCHTGPGAEGHSRSTQPMHLSGEASTARTCPQEPLRGTPGGALWLGVLRLLLFKLLLFDLLLTCSCLCDPAGPLPSPATTTRLRALGSHRLHPATETGGREATSSPRPQPRDRRWGDTPPGRKPGSPVRAKRSGSGVKQTLNFDLLKLAGDVESNPGPSRSRGHMTEYKPTVRLATRDDVPRAVRTLAAAFADYPATRHTVDPDRHIERVTELQELFLTRVGLDIGKVWVADDGAAVAVWTTPESVEAGAVFAEIGPRMAELSGSRLAAQQQMEGLLAPHRPKEPAWFLATVGVSPDHQGKGLGSAVVLPGVEAAERAGVPAFLETSAPRNLPFYERLGFTVTADVEVPEGPRTWCMTRKPGA

SEQ ID NO: 19565 - protein, 892 aa, Artificial Sequence
  Synthetic Polypeptide
MALPVTALLLPLALLLHAARPDIQMTQSPSSLSASVGDRVTITCRASQDVNTAVAWYQQKPGKAPKLLIYSASFLYSGVPSRFSGSRSGTDFTLTISSLQPEDFATYYCQQAYTTPPTFGQGTKVEIKRTLEGKPIPNPLLGLDSTGSGDKQLDADVSPKPTIFLPSIAETKLQKAGTYLCLLEKFFPDVIKIHWQEKKSNTILGSQEGNTMKTNDTYMKFSWLTVPEKSLDKEHRCIVRHENNKNGVDQEIIFPPIKTDVITMDPKDNCSKDANDTLLLQLTNTSAYYMYLLLLLKSVVYFAIITCCLLRRTAFCCNGEKSRAKRSGSGATNFSLLKQAGDVEENPGPTSMDWIWRILFLVGAATGAHSFEEVQLVESGGGLVQPGGSLRLSCAASGFNIKDTYIHWVRQAPGKGLEWVARIYPTNGYTRYADSVKGRFTISADTSKNTAYLQMNSLRAEDTAVYYCSRWGGAGAYAMDVWGQGTLVTVSSTREQKLISEEDGSGSQPHTKPSVFVMKNGTNVACLVKEFYPKDIRINLVSSKKITEFDPAIVISPSGKYNAVKLGKYEDSNSVTCSVQHDNKTVHSTDFEVKTDSTDHVKPKETENTKQPSKSCHKPKAIVHTEKVNMMSLTVLGLRMLFAKTVAVNFLLTAKLFFLRAKRSGSGVKQTLNFDLLKLAGDVESNPGPSRGHMTEYKPTVRLATRDDVPRAVRTLAAAFADYPATRHTVDPDRHIERVTELQELFLTRVGLDIGKVWVADDGAAVAVWTTPESVEAGAVFAEIGPRMAELSGSRLAAQQQMEGLLAPHRPKEPAWFLATVGVSPDHQGKGLGSAVVLPGVEAAERAGVPAFLETSAPRNLPFYERLGFTVTADVEVPEGPRTWCMTRKPGA

SEQ ID NO: 19566 - protein, 630 aa, Artificial Sequence
  Synthetic Polypeptide
MALPVTALLLPLALLLHAARPDIQMTQSPSSLSASVGDRVTITCRASQDVNTAVAWYQQKPGKAPKLLIYSASFLYSGVPSRFSGSRSGTDFTLTISSLQPEDFATYYCQQAYTTPPTFGQGTKVEIKRTLESQPHTKPSVFVMKNGTNVACLVKEFYPKDIRINLVSSKKITEFDPAIVISPSGKYNAVKLGKYEDSNSVTCSVQHDNKTVHSTDFEVKTDSTDHVKPKETENTKQPSKSCHKPKAIVHTEKVNMMSLTVLGLRMLFAKTVAVNFLLTAKLFFLRAKRSGSGATNFSLLKQAGDVEENPGPTSMDWIWRILFLVGAATGAHSFEEVQLVESGGGLVQPGGSLRLSCAASGFNIKDTYIHWVRQAPGKGLEWVARIYPTNGYTRYADSVKGRFTISADTSKNTAYLQMNSLRAEDTAVYYCSRWGGAGAYAMDVWGQGTLVTVSSTRDKQLDADVSPKPTIFLPSIAETKLQKAGTYLCLLEKFFPDVIKIHWQEKKSNTILGSQEGNTMKTNDTYMKFSWLTVPEKSLDKEHRCIVRHENNKNGVDQEIIFPPIKTDVITMDPKDNCSKDANDTLLLQLTNTSAYYMYLLLLLKSVVYFAIITCCLLRRTAFCCNGEKS

SEQ ID NO: 19567 - protein, 907 aa, Artificial Sequence
  Synthetic Polypeptide
MALPVTALLLPLALLLHAARPLEGKPIPNPLLGLDSTGSGDKQLDADVSPKPTIFLPSIAETKLQKAGTYLCLLEKFFPDVIKIHWQEKKSNTILGSQEGNTMKTNDTYMKFSWLTVPEKSLDKEHRCIVRHENNKNGVDQEIIFPPIKTDVITMDPKDNCSKDANDTLLLQLTNTSAYYMYLLLLLKSVVYFAIITCCLLRRTAFCCNGEKSRAKRSGSGATNFSLLKQAGDVEENPGPTSMALPVTALLLPLALLLHAARPDIQMTQSPSSLSASVGDRVTITCRASQDVNTAVAWYQQKPGKAPKLLIYSASFLYSGVPSRFSGSRSGTDFTLTISSLQPEDFATYYCQQAYTTPPTFGQGTKVEIKRTGGGGSGGGGSGGGGSEVQLVESGGGLVQPGGSLRLSCAASGFNIKDTYIHWVRQAPGKGLEWVARIYPTNGYTRYADSVKGRFTISADTSKNTAYLQMNSLRAEDTAVYYCSRWGGAGAYAMDVWGQGTLVTVSSTREQKLISEEDGSGSQPHTKPSVFVMKNGTNVACLVKEFYPKDIRINLVSSKKITEFDPAIVISPSGKYNAVKLGKYEDSNSVTCSVQHDNKTVHSTDFEVKTDSTDHVKPKETENTKQPSKSCHKPKAIVHTEKVNMMSLTVLGLRMLFAKTVAVNFLLTAKLFFLRAKRSGSGVKQTLNFDLLKLAGDVESNPGPSRGHMTEYKPTVRLATRDDVPRAVRTLAAAFADYPATRHTVDPDRHIERVTELQELFLTRVGLDIGKVWVADDGAAVAVWTTPESVEAGAVFAEIGPRMAELSGSRLAAQQQMEGLLAPHRPKEPAWFLATVGVSPDHQGKGLGSAVVLPGVEAAERAGVPAFLETSAPRNLPFYERLGFTVTADVEVPEGPRTWCMTRKPGA

SEQ ID NO: 19568 - protein, 1032 aa, Artificial Sequence
  Synthetic Polypeptide
MALPVTALLLPLALLLHAARPDIQMTQSPSSLSASVGDRVTITCRASQDVNTAVAWYQQKPGKAPKLLIYSASFLYSGVPSRFSGSRSGTDFTLTISSLQPEDFATYYCQQAYTTPPTFGQGTKVEIKRTGQPKANPTVTLFPPSSEELQANKATLVCLISDFYPGAVTVAWKADGSPVKAGVETTKPSKQSNNKYAASSYLSLTPEQWKSHRSYSCQVTHEGSTVEKTVAPTECSGSQSFGLLDPKLCYLLDGILFIYGVILTALFLRVKFSRSADAPAYQQGQNQLYNELNLGRREEYDVLDKRRGRDPEMGGKPQRRKNPQEGLYNELQKDKMAEAYSEIGMKGERRRGKGHDGLYQGLSTATKDTYDALHMQALPPRRAKRSGSGATNFSLLKQAGDVEENPGPTSMDWIWRILFLVGAATGAHSFEEVQLVESGGGLVQPGGSLRLSCAASGFNIKDTYIHWVRQAPGKGLEWVARIYPTNGYTRYADSVKGRFTISADTSKNTAYLQMNSLRAEDTAVYYCSRWGGAGAYAMDVWGQGTLVTVSSASTKGPSVFPLAPSSKSTSGGTAALGCLVKDYFPEPVTVSWNSGALTSGVHTFPAVLQSSGLYSLSSVVTVPSSSLGTQTYICNVNHKPSNTKVDKRVEPKSCGTQSFGLLDPKLCYLLDGILFIYGVILTALFLRVKFSRSADAPAYQQGQNQLYNELNLGRREEYDVLDKRRGRDPEMGGKPQRRKNPQEGLYNELQKDKMAEAYSEIGMKGERRRGKGHDGLYQGLSTATKDTYDALHMQALPPRRAKRSGSGVKQTLNFDLLKLAGDVESNPGPSRGHMTEYKPTVRLATRDDVPRAVRTLAAAFADYPATRHTVDPDRHIERVTELQELFLTRVGLDIGKVWVADDGAAVAVWTTPESVEAGAVFAEIGPRMAELSGSRLAAQQQMEGLLAPHRPKEPAWFLATVGVSPDHQGKGLGSAVVLPGVEAAERAGVPAFLETSAPRNLPFYERLGFTVTADVEVPEGPRTWCMTRKPGA

SEQ ID NO: 19569 - protein, 818 aa, Artificial Sequence
  Synthetic Polypeptide
MALPVTALLLPLALLLHAARPDIQMTQSPSSLSASVGDRVTITCRASQDVNTAVAWYQQKPGKAPKLLIYSASFLYSGVPSRFSGSRSGTDFTLTISSLQPEDFATYYCQQAYTTPPTFGQGTKVEIKRTLEDLKNVFPPEVAVFEPSEAEISHTQKATLVCLATGFYPDHVELSWWVNGKEVHSGVSTDPQPLKEQPALNDSRYCLSSRLRVSATFWQNPRNHFRCQVQFYGLSENDEWTQDRAKPVTQIVSAEAWGRADCGSQSFGLLDPKLCYLLDGILFIYGVILTALFLRVKFSRSADAPAYQQGQNQLYNELNLGRREEYDVLDKRRGRDPEMGGKPQRRKNPQEGLYNELQKDKMAEAYSEIGMKGERRRGKGHDGLYQGLSTATKDTYDALHMQALPPRRAKRSGSGATNFSLLKQAGDVEENPGPTSMDWIWRILFLVGAATGAHSFEEVQLVESGGGLVQPGGSLRLSCAASGFNIKDTYIHWVRQAPGKGLEWVARIYPTNGYTRYADSVKGRFTISADTSKNTAYLQMNSLRAEDTAVYYCSRWGGAGAYAMDVWGQGTLVTVSSTRIQNPDPAVYQLRDSKSSDKSVCLFTDFDSQTNVSQSKDSDVYITDKTVLDMRSMDFKSNSAVAWSNKSDFACANAFNNSIIPEDTFFPSPESSCGTQSFGLLDPKLCYLLDGILFIYGVILTALFLRVKFSRSADAPAYQQGQNQLYNELNLGRREEYDVLDKRRGRDPEMGGKPQRRKNPQEGLYNELQKDKMAEAYSEIGMKGERRRGKGHDGLYQGLSTATKDTYDALHMQALPPR

SEQ ID NO: 19570 - protein, 818 aa, Artificial Sequence
  Synthetic Polypeptide
MALPVTALLLPLALLLHAARPDIQMTQSPSSLSASVGDRVTITCRASQDVNTAVAWYQQKPGKAPKLLIYSASFLYSGVPSRFSGSRSGTDFTLTISSLQPEDFATYYCQQAYTTPPTFGQGTKVEIKRTLEDLKNVFPPEVAVFEPSKAEIAHTQKATLVCLATGFYPDHVELSWWVNGKEVHSGVCTDPQPLKEQPALNDSRYCLSSRLRVSATFWQNPRNHFRCQVQFYGLSENDEWTQDRAKPVTQIVSAEAWGRADCGSQSFGLLDPKLCYLLDGILFIYGVILTALFLRVKFSRSADAPAYQQGQNQLYNELNLGRREEYDVLDKRRGRDPEMGGKPQRRKNPQEGLYNELQKDKMAEAYSEIGMKGERRRGKGHDGLYQGLSTATKDTYDALHMQALPPRRAKRSGSGATNFSLLKQAGDVEENPGPTSMDWIWRILFLVGAATGAHSFEEVQLVESGGGLVQPGGSLRLSCAASGFNIKDTYIHWVRQAPGKGLEWVARIYPTNGYTRYADSVKGRFTISADTSKNTAYLQMNSLRAEDTAVYYCSRWGGAGAYAMDVWGQGTLVTVSSTRIQNPDPAVYQLRDSKSSDKSVCLFTDFDSQTNVSQSKDSDVYITDKCVLDMRSMDFKSNSAVAWSNKSDFACANAFNNSIIPEDTFFPSSDVPCGTQSFGLLDPKLCYLLDGILFIYGVILTALFLRVKFSRSADAPAYQQGQNQLYNELNLGRREEYDVLDKRRGRDPEMGGKPQRRKNPQEGLYNELQKDKMAEAYSEIGMKGERRRGKGHDGLYQGLSTATKDTYDALHMQALPPR

SEQ ID NO: 19571 - protein, 889 aa, Artificial Sequence
  Synthetic Polypeptide
MALPVTALLLPLALLLHAARPDIQMTQSPSSLSASVGDRVTITCRASQDVNTAVAWYQQKPGKAPKLLIYSASFLYSGVPSRFSGSRSGTDFTLTISSLQPEDFATYYCQQAYTTPPTFGQGTKVEIKRTLEGKPIPNPLLGLDSTGSGEDLKNVFPPEVAVFEPSEAEISHTQKATLVCLATGFYPDHVELSWWVNGKEVHSGVSTDPQPLKEQPALNDSRYCLSSRLRVSATFWQNPRNHFRCQVQFYGLSENDEWTQDRAKPVTQIVSAEAWGRADCGSQSFGLLDPKLCYLLDGILFIYGVILTALFLRVKFSRSADAPAYQQGQNQLYNELNLGRREEYDVLDKRRGRDPEMGGKPQRRKNPQEGLYNELQKDKMAEAYSEIGMKGERRRGKGHDGLYQGLSTATKDTYDALHMQALPPRRAKRSGSGATNFSLLKQAGDVEENPGPTSMDWIWRILFLVGAATGAHSFEEVQLVESGGGLVQPGGSLRLSCAASGFNIKDTYIHWVRQAPGKGLEWVARIYPTNGYTRYADSVKGRFTISADTSKNTAYLQMNSLRAEDTAVYYCSRWGGAGAYAMDVWGQGTLVTVSSTREQKLISEEDGSGIQNPDPAVYQLRDSKSSDKSVCLFTDFDSQTNVSQSKDSDVYITDKTVLDMRSMDFKSNSAVAWSNKSDFACANAFNNSIIPEDTFFPSPESSCGTQSFGLLDPKLCYLLDGILFIYGVILTALFLRSKRSRLLHSDYMNMTPRRPGPTRKHYQPYAPPRDFAAYRSRVKFSRSADAPAYQQGQNQLYNELNLGRREEYDVLDKRRGRDPEMGGKPQRRKNPQEGLYNELQKDKMAEAYSEIGMKGERRRGKGHDGLYQGLSTATKDTYDALHMQALPPR

SEQ ID NO: 19572 - protein, 930 aa, Artificial Sequence
  Synthetic Polypeptide
MALPVTALLLPLALLLHAARPDIQMTQSPSSLSASVGDRVTITCRASQDVNTAVAWYQQKPGKAPKLLIYSASFLYSGVPSRFSGSRSGTDFTLTISSLQPEDFATYYCQQAYTTPPTFGQGTKVEIKRTLEGKPIPNPLLGLDSTGSGEDLKNVFPPEVAVFEPSEAEISHTQKATLVCLATGFYPDHVELSWWVNGKEVHSGVSTDPQPLKEQPALNDSRYCLSSRLRVSATFWQNPRNHFRCQVQFYGLSENDEWTQDRAKPVTQIVSAEAWGRADCGSQSFGLLDPKLCYLLDGILFIYGVILTALFLRSKRSRLLHSDYMNMTPRRPGPTRKHYQPYAPPRDFAAYRSRVKFSRSADAPAYQQGQNQLYNELNLGRREEYDVLDKRRGRDPEMGGKPQRRKNPQEGLYNELQKDKMAEAYSEIGMKGERRRGKGHDGLYQGLSTATKDTYDALHMQALPPRRAKRSGSGATNFSLLKQAGDVEENPGPTSMDWIWRILFLVGAATGAHSFEEVQLVESGGGLVQPGGSLRLSCAASGFNIKDTYIHWVRQAPGKGLEWVARIYPTNGYTRYADSVKGRFTISADTSKNTAYLQMNSLRAEDTAVYYCSRWGGAGAYAMDVWGQGTLVTVSSTREQKLISEEDGSGIQNPDPAVYQLRDSKSSDKSVCLFTDFDSQTNVSQSKDSDVYITDKTVLDMRSMDFKSNSAVAWSNKSDFACANAFNNSIIPEDTFFPSPESSCGTQSFGLLDPKLCYLLDGILFIYGVILTALFLRSKRSRLLHSDYMNMTPRRPGPTRKHYQPYAPPRDFAAYRSRVKFSRSADAPAYQQGQNQLYNELNLGRREEYDVLDKRRGRDPEMGGKPQRRKNPQEGLYNELQKDKMAEAYSEIGMKGERRRGKGHDGLYQGLSTATKDTYDALHMQALPPR

SEQ ID NO: 19573 - protein, 891 aa, Artificial Sequence
  Synthetic Polypeptide
MALPVTALLLPLALLLHAARPDIQMTQSPSSLSASVGDRVTITCRASQDVNTAVAWYQQKPGKAPKLLIYSASFLYSGVPSRFSGSRSGTDFTLTISSLQPEDFATYYCQQAYTTPPTFGQGTKVEIKRTLEGKPIPNPLLGLDSTGSGEDLKNVFPPEVAVFEPSEAEISHTQKATLVCLATGFYPDHVELSWWVNGKEVHSGVSTDPQPLKEQPALNDSRYCLSSRLRVSATFWQNPRNHFRCQVQFYGLSENDEWTQDRAKPVTQIVSAEAWGRADCGSQSFGLLDPKLCYLLDGILFIYGVILTALFLRVKFSRSADAPAYQQGQNQLYNELNLGRREEYDVLDKRRGRDPEMGGKPQRRKNPQEGLYNELQKDKMAEAYSEIGMKGERRRGKGHDGLYQGLSTATKDTYDALHMQALPPRRAKRSGSGATNFSLLKQAGDVEENPGPTSMDWIWRILFLVGAATGAHSFEEVQLVESGGGLVQPGGSLRLSCAASGFNIKDTYIHWVRQAPGKGLEWVARIYPTNGYTRYADSVKGRFTISADTSKNTAYLQMNSLRAEDTAVYYCSRWGGAGAYAMDVWGQGTLVTVSSTREQKLISEEDLGSGIQNPDPAVYQLRDSKSSDKSVCLFTDFDSQTNVSQSKDSDVYITDKTVLDMRSMDFKSNSAVAWSNKSDFACANAFNNSIIPEDTFFPSPESSCGTQSFGLLDPKLCYLLDGILFIYGVILTALFLKRGRKKLLYIFKQPFMRPVQTTQEEDGCSCRFPEEEEGGCELRVKFSRSADAPAYQQGQNQLYNELNLGRREEYDVLDKRRGRDPEMGGKPQRRKNPQEGLYNELQKDKMAEAYSEIGMKGERRRGKGHDGLYQGLSTATKDTYDALHMQALPPR

SEQ ID NO: 19574 - protein, 933 aa, Artificial Sequence
  Synthetic Polypeptide
MALPVTALLLPLALLLHAARPDIQMTQSPSSLSASVGDRVTITCRASQDVNTAVAWYQQKPGKAPKLLIYSASFLYSGVPSRFSGSRSGTDFTLTISSLQPEDFATYYCQQAYTTPPTFGQGTKVEIKRTLEGKPIPNPLLGLDSTGSGEDLKNVFPPEVAVFEPSEAEISHTQKATLVCLATGFYPDHVELSWWVNGKEVHSGVSTDPQPLKEQPALNDSRYCLSSRLRVSATFWQNPRNHFRCQVQFYGLSENDEWTQDRAKPVTQIVSAEAWGRADCGSQSFGLLDPKLCYLLDGILFIYGVILTALFLKRGRKKLLYIFKQPFMRPVQTTQEEDGCSCRFPEEEEGGCELRVKFSRSADAPAYQQGQNQLYNELNLGRREEYDVLDKRRGRDPEMGGKPQRRKNPQEGLYNELQKDKMAEAYSEIGMKGERRRGKGHDGLYQGLSTATKDTYDALHMQALPPRRAKRSGSGATNFSLLKQAGDVEENPGPTSMDWIWRILFLVGAATGAHSFEEVQLVESGGGLVQPGGSLRLSCAASGFNIKDTYIHWVRQAPGKGLEWVARIYPTNGYTRYADSVKGRFTISADTSKNTAYLQMNSLRAEDTAVYYCSRWGGAGAYAMDVWGQGTLVTVSSTREQKLISEEDLGSGIQNPDPAVYQLRDSKSSDKSVCLFTDFDSQTNVSQSKDSDVYITDKTVLDMRSMDFKSNSAVAWSNKSDFACANAFNNSIIPEDTFFPSPESSCGTQSFGLLDPKLCYLLDGILFIYGVILTALFLKRGRKKLLYIFKQPFMRPVQTTQEEDGCSCRFPEEEEGGCELRVKFSRSADAPAYQQGQNQLYNELNLGRREEYDVLDKRRGRDPEMGGKPQRRKNPQEGLYNELQKDKMAEAYSEIGMKGERRRGKGHDGLYQGLSTATKDTYDALHMQALPPR

SEQ ID NO: 19575 - protein, 823 aa, Artificial Sequence
  Synthetic Polypeptide
MALPVTALLLPLALLLHAARPDIQMTQSPSSLSASVGDRVTITCRASQDVNTAVAWYQQKPGKAPKLLIYSASFLYSGVPSRFSGSRSGTDFTLTISSLQPEDFATYYCQQAYTTPPTFGQGTKVEIKRTLEQSFGLLDPKLCYLLDGILFIYGVILTALFLRVKFSRSADAPAYQQGQNQLYNELNLGRREEYDVLDKRRGRDPEMGGKPQRRKNPQEGLYNELQKDKMAEAYSEIGMKGERRRGKGHDGLYQGLSTATKDTYDALHMQALPPRRAKRSGSGATNFSLLKQAGDVEENPGPTSMDWIWRILFLVGAATGAHSFEEVQLVESGGGLVQPGGSLRLSCAASGFNIKDTYIHWVRQAPGKGLEWVARIYPTNGYTRYADSVKGRFTISADTSKNTAYLQMNSLRAEDTAVYYCSRWGGAGAYAMDVWGQGTLVTVSSTRQSFGLLDPKLCYLLDGILFIYGVILTALFLRVKFSRSADAPAYQQGQNQLYNELNLGRREEYDVLDKRRGRDPEMGGKPQRRKNPQEGLYNELQKDKMAEAYSEIGMKGERRRGKGHDGLYQGLSTATKDTYDALHMQALPPRRAKRSGSGVKQTLNFDLLKLAGDVESNPGPSRGHMTEYKPTVRLATRDDVPRAVRTLAAAFADYPATRHTVDPDRHIERVTELQELFLTRVGLDIGKVWVADDGAAVAVWTTPESVEAGAVFAEIGPRMAELSGSRLAAQQQMEGLLAPHRPKEPAWFLATVGVSPDHQGKGLGSAVVLPGVEAAERAGVPAFLETSAPRNLPFYERLGFTVTADVEVPEGPRTWCMTRKPGA

SEQ ID NO: 19576 - protein, 648 aa, Artificial Sequence
  Synthetic Polypeptide
MALPVTALLLPLALLLHAARPDIQMTQSPSSLSASVGDRVTITCRASQDVNTAVAWYQQKPGKAPKLLIYSASFLYSGVPSRFSGSRSGTDFTLTISSLQPEDFATYYCQQAYTTPPTFGQGTKVEIKRTLEGQPKANPTVTLFPPSSEELQANKATLVCLISDFYPGAVTVAWKADGSPVKAGVETTKPSKQSNNKYAASSYLSLTPEQWKSHRSYSCQVTHEGSTVEKTVAPTECSPIKTDVITMDPKDNCSKDANDTLLLQLTNTSAYYMYLLLLLKSVVYFAIITCCLLRRTAFCCNGEKSRAKRSGSGATNFSLLKQAGDVEENPGPTSMDWIWRILFLVGAATGAHSFEEVQLVESGGGLVQPGGSLRLSCAASGFNIKDTYIHWVRQAPGKGLEWVARIYPTNGYTRYADSVKGRFTISADTSKNTAYLQMNSLRAEDTAVYYCSRWGGAGAYAMDVWGQGTLVTVSSTRASTKGPSVFPLAPSSKSTSGGTAALGCLVKDYFPEPVTVSWNSGALTSGVHTFPAVLQSSGLYSLSSVVTVPSSSLGTQTYICNVNHKPSNTKVDKRVEPKSCEVKTDSTDHVKPKETENTKQPSKSCHKPKAIVHTEKVNMMSLTVLGLRMLFAKTVAVNFLLTAKLFFL

SEQ ID NO: 19577 - protein, 626 aa, Artificial Sequence
  Synthetic Polypeptide
MALPVTALLLPLALLLHAARPDIQMTQSPSSLSASVGDRVTITCRASQDVNTAVAWYQQKPGKAPKLLIYSASFLYSGVPSRFSGSRSGTDFTLTISSLQPEDFATYYCQQAYTTPPTFGQGTKVEIKRTLEGQPKANPTVTLFPPSSEELQANKATLVCLISDFYPGAVTVAWKADGSPVKAGVETTKPSKQSNNKYAASSYLSLTPEQWKSHRSYSCQVTHEGSTVEKTVAPTECSGRADCGITSASYHQGVLSATILYEILLGKATLYAVLVSALVLMAMVKRKDSRGRAKRSGSGATNFSLLKQAGDVEENPGPTSMDWIWRILFLVGAATGAHSFEEVQLVESGGGLVQPGGSLRLSCAASGFNIKDTYIHWVRQAPGKGLEWVARIYPTNGYTRYADSVKGRFTISADTSKNTAYLQMNSLRAEDTAVYYCSRWGGAGAYAMDVWGQGTLVTVSSTRASTKGPSVFPLAPSSKSTSGGTAALGCLVKDYFPEPVTVSWNSGALTSGVHTFPAVLQSSGLYSLSSVVTVPSSSLGTQTYICNVNHKPSNTKVDKRVEPKSCIPEDTFFPSSDVPCDVKLVEKSFETDTNLNFQNLSVIGFRILLLKVAGFNLLMTLRLWSS

SEQ ID NO: 19578 - protein, 626 aa, Artificial Sequence
  Synthetic Polypeptide
MALPVTALLLPLALLLHAARPDIQMTQSPSSLSASVGDRVTITCRASQDVNTAVAWYQQKPGKAPKLLIYSASFLYSGVPSRFSGSRSGTDFTLTISSLQPEDFATYYCQQAYTTPPTFGQGTKVEIKRTLEGQPKANPTVTLFPPSSEELQANKATLVCLISDFYPGAVTVAWKADGSPVKAGVETTKPSKQSNNKYAASSYLSLTPEQWKSHRSYSCQVTHEGSTVEKTVAPTECSGRADCGFTSESYQQGVLSATILYEILLGKATLYAVLVSALVLMAMVKRKDSRGRAKRSGSGATNFSLLKQAGDVEENPGPTSMDWIWRILFLVGAATGAHSFEEVQLVESGGGLVQPGGSLRLSCAASGFNIKDTYIHWVRQAPGKGLEWVARIYPTNGYTRYADSVKGRFTISADTSKNTAYLQMNSLRAEDTAVYYCSRWGGAGAYAMDVWGQGTLVTVSSTRASTKGPSVFPLAPSSKSTSGGTAALGCLVKDYFPEPVTVSWNSGALTSGVHTFPAVLQSSGLYSLSSVVTVPSSSLGTQTYICNVNHKPSNTKVDKRVEPKSCIPEDTFFPSPESSCDVKLVEKSFETDTNLNFQNLSVIGFRILLLKVAGFNLLMTLRLWSS

SEQ ID NO: 19579 - protein, 452 aa, Artificial Sequence
  Synthetic Polypeptide
MALPVTALLLPLALLLHAARPDIQMTQSPSSLSASVGDRVTITCRASQDVNTAVAWYQQKPGKAPKLLIYSASFLYSGVPSRFSGSRSGTDFTLTISSLQPEDFATYYCQQAYTTPPTFGQGTKVEIKRTGGGGSGGGGSGGGGSEVQLVESGGGLVQPGGSLRLSCAASGFNIKDTYIHWVRQAPGKGLEWVARIYPTNGYTRYADSVKGRFTISADTSKNTAYLQMNSLRAEDTAVYYCSRWGGAGAYAMDVWGQGTLVTVSSTRDGNEEMGGITQTPYKVSISGTTVILTCPQYPGSEILWQHNDKNIGGDEDDKNIGSDEDHLSLKEFSELEQSGYYVCYPRGSKPEDANFYLYLRARVCENCMEMDVMSVATIVIVDICITGGLLLLVYYWSKNRKAKAKPVTRGAGAGGRQRGQNKERPPPVPNPDYEPIRKGQRDLYSGLNQRRI

SEQ ID NO: 19580 - protein, 417 aa, Artificial Sequence
  Synthetic Polypeptide
MALPVTALLLPLALLLHAARPDIQMTQSPSSLSASVGDRVTITCRASQDVNTAVAWYQQKPGKAPKLLIYSASFLYSGVPSRFSGSRSGTDFTLTISSLQPEDFATYYCQQAYTTPPTFGQGTKVEIKRTGGGGSGGGGSGGGGSEVQLVESGGGLVQPGGSLRLSCAASGFNIKDTYIHWVRQAPGKGLEWVARIYPTNGYTRYADSVKGRFTISADTSKNTAYLQMNSLRAEDTAVYYCSRWGGAGAYAMDVWGQGTLVTVSSTRFKIPIEELEDRVFVNCNTSITWVEGTVGTLLSDITRLDLGKRILDPRGIYRCNGTDIYKDKESTVQVHYRMCQSCVELDPATVAGIIVTDVIATLLLALGVFCFAGHETGRLSGAADTQALLRNDQVYQPLRDRDDAQYSHLGGNWARNK

SEQ ID NO: 19581 - protein, 427 aa, Artificial Sequence
  Synthetic Polypeptide
MALPVTALLLPLALLLHAARPDIQMTQSPSSLSASVGDRVTITCRASQDVNTAVAWYQQKPGKAPKLLIYSASFLYSGVPSRFSGSRSGTDFTLTISSLQPEDFATYYCQQAYTTPPTFGQGTKVEIKRTGGGGSGGGGSGGGGSEVQLVESGGGLVQPGGSLRLSCAASGFNIKDTYIHWVRQAPGKGLEWVARIYPTNGYTRYADSVKGRFTISADTSKNTAYLQMNSLRAEDTAVYYCSRWGGAGAYAMDVWGQGTLVTVSSTRQSIKGNHLVKVYDYQEDGSVLLTCDAEAKNITWFKDGKMIGFLTEDKKKWNLGSNAKDPRGMYQCKGSQNKSKPLQVYYRMCQNCIELNAATISGFLFAEIVSIFVLAVGVYFIAGQDGVRQSRASDKQTLLPNDQLYQPLKDREDDQYSHLQGNQLRRN

SEQ ID NO: 19582 - protein, 410 aa, Artificial Sequence
  Synthetic Polypeptide
MALPVTALLLPLALLLHAARPDIQMTQSPSSLSASVGDRVTITCRASQDVNTAVAWYQQKPGKAPKLLIYSASFLYSGVPSRFSGSRSGTDFTLTISSLQPEDFATYYCQQAYTTPPTFGQGTKVEIKRTGGGGSGGGGSGGGGSEVQLVESGGGLVQPGGSLRLSCAASGFNIKDTYIHWVRQAPGKGLEWVARIYPTNGYTRYADSVKGRFTISADTSKNTAYLQMNSLRAEDTAVYYCSRWGGAGAYAMDVWGQGTLVTVSSTRQSFGLLDPKLCYLLDGILFIYGVILTALFLRVKFSRSADAPAYQQGQNQLYNELNLGRREEYDVLDKRRGRDPEMGGKPQRRKNPQEGLYNELQKDKMAEAYSEIGMKGERRRGKGHDGLYQGLSTATKDTYDALHMQALPPR

SEQ ID NO: 19583 - protein, 452 aa, Artificial Sequence
  Synthetic Polypeptide
MALPVTALLLPLALLLHAARPEVQLVESGGGLVQPGGSLRLSCAASGFNIKDTYIHWVRQAPGKGLEWVARIYPTNGYTRYADSVKGRFTISADTSKNTAYLQMNSLRAEDTAVYYCSRWGGAGAYAMDVWGQGTLVTVSSGGGGSGGGGSGGGGSDIQMTQSPSSLSASVGDRVTITCRASQDVNTAVAWYQQKPGKAPKLLIYSASFLYSGVPSRFSGSRSGTDFTLTISSLQPEDFATYYCQQAYTTPPTFGQGTKVEIKRTTRDGNEEMGGITQTPYKVSISGTTVILTCPQYPGSEILWQHNDKNIGGDEDDKNIGSDEDHLSLKEFSELEQSGYYVCYPRGSKPEDANFYLYLRARVCENCMEMDVMSVATIVIVDICITGGLLLLVYYWSKNRKAKAKPVTRGAGAGGRQRGQNKERPPPVPNPDYEPIRKGQRDLYSGLNQRRI

SEQ ID NO: 19584 - protein, 417 aa, Artificial Sequence
  Synthetic Polypeptide
MALPVTALLLPLALLLHAARPEVQLVESGGGLVQPGGSLRLSCAASGFNIKDTYIHWVRQAPGKGLEWVARIYPTNGYTRYADSVKGRFTISADTSKNTAYLQMNSLRAEDTAVYYCSRWGGAGAYAMDVWGQGTLVTVSSGGGGSGGGGSGGGGSDIQMTQSPSSLSASVGDRVTITCRASQDVNTAVAWYQQKPGKAPKLLIYSASFLYSGVPSRFSGSRSGTDFTLTISSLQPEDFATYYCQQAYTTPPTFGQGTKVEIKRTTRFKIPIEELEDRVFVNCNTSITWVEGTVGTLLSDITRLDLGKRILDPRGIYRCNGTDIYKDKESTVQVHYRMCQSCVELDPATVAGIIVTDVIATLLLALGVFCFAGHETGRLSGAADTQALLRNDQVYQPLRDRDDAQYSHLGGNWARNK

SEQ ID NO: 19585 - protein, 427 aa, Artificial Sequence
  Synthetic Polypeptide
MALPVTALLLPLALLLHAARPEVQLVESGGGLVQPGGSLRLSCAASGFNIKDTYIHWVRQAPGKGLEWVARIYPTNGYTRYADSVKGRFTISADTSKNTAYLQMNSLRAEDTAVYYCSRWGGAGAYAMDVWGQGTLVTVSSGGGGSGGGGSGGGGSDIQMTQSPSSLSASVGDRVTITCRASQDVNTAVAWYQQKPGKAPKLLIYSASFLYSGVPSRFSGSRSGTDFTLTISSLQPEDFATYYCQQAYTTPPTFGQGTKVEIKRTTRQSIKGNHLVKVYDYQEDGSVLLTCDAEAKNITWFKDGKMIGFLTEDKKKWNLGSNAKDPRGMYQCKGSQNKSKPLQVYYRMCQNCIELNAATISGFLFAEIVSIFVLAVGVYFIAGQDGVRQSRASDKQTLLPNDQLYQPLKDREDDQYSHLQGNQLRRN

SEQ ID NO: 19586 - protein, 410 aa, Artificial Sequence
  Synthetic Polypeptide
MALPVTALLLPLALLLHAARPEVQLVESGGGLVQPGGSLRLSCAASGFNIKDTYIHWVRQAPGKGLEWVARIYPTNGYTRYADSVKGRFTISADTSKNTAYLQMNSLRAEDTAVYYCSRWGGAGAYAMDVWGQGTLVTVSSGGGGSGGGGSGGGGSDIQMTQSPSSLSASVGDRVTITCRASQDVNTAVAWYQQKPGKAPKLLIYSASFLYSGVPSRFSGSRSGTDFTLTISSLQPEDFATYYCQQAYTTPPTFGQGTKVEIKRTTRQSFGLLDPKLCYLLDGILFIYGVILTALFLRVKFSRSADAPAYQQGQNQLYNELNLGRREEYDVLDKRRGRDPEMGGKPQRRKNPQEGLYNELQKDKMAEAYSEIGMKGERRRGKGHDGLYQGLSTATKDTYDALHMQALPPR

SEQ ID NO: 19587 - protein, 643 aa, Artificial Sequence
  Synthetic Polypeptide
MALPVTALLLPLALLLHAARPDIQMTQSPSSLSASVGDRVTITCRASQDVNTAVAWYQQKPGKAPKLLIYSASFLYSGVPSRFSGSRSGTDFTLTISSLQPEDFATYYCQQAYTTPPTFGQGTKVEIKRTGGGGSGGGGSGGGGSEVQLVESGGGLVQPGGSLRLSCAASGFNIKDTYIHWVRQAPGKGLEWVARIYPTNGYTRYADSVKGRFTISADTSKNTAYLQMNSLRAEDTAVYYCSRWGGAGAYAMDVWGQGTLVTVSSTRGSGIQNPDPAVYQLRDSKSSDKSVCLFTDFDSQTNVSQSKDSDVYITDKTVLDMRSMDFKSNSAVAWSNKSDFACANAFNNSIIPEDTFFPSPESSCDVKLVEKSFETDTNLNFQNLSVIGFRILLLKVAGFNLLMTLRLWSSRAKRSGSGVKQTLNFDLLKLAGDVESNPGPSRGHMTEYKPTVRLATRDDVPRAVRTLAAAFADYPATRHTVDPDRHIERVTELQELFLTRVGLDIGKVWVADDGAAVAVWTTPESVEAGAVFAEIGPRMAELSGSRLAAQQQMEGLLAPHRPKEPAWFLATVGVSPDHQGKGLGSAVVLPGVEAAERAGVPAFLETSAPRNLPFYERLGFTVTADVEVPEGPRTWCMTRKPGA

SEQ ID NO: 19588 - protein, 675 aa, Artificial Sequence
  Synthetic Polypeptide
MALPVTALLLPLALLLHAARPDIQMTQSPSSLSASVGDRVTITCRASQDVNTAVAWYQQKPGKAPKLLIYSASFLYSGVPSRFSGSRSGTDFTLTISSLQPEDFATYYCQQAYTTPPTFGQGTKVEIKRTGGGGSGGGGSGGGGSEVQLVESGGGLVQPGGSLRLSCAASGFNIKDTYIHWVRQAPGKGLEWVARIYPTNGYTRYADSVKGRFTISADTSKNTAYLQMNSLRAEDTAVYYCSRWGGAGAYAMDVWGQGTLVTVSSLEDLKNVFPPEVAVFEPSEAEISHTQKATLVCLATGFYPDHVELSWWVNGKEVHSGVSTDPQPLKEQPALNDSRYCLSSRLRVSATFWQNPRNHFRCQVQFYGLSENDEWTQDRAKPVTQIVSAEAWGRADCGFTSESYQQGVLSATILYEILLGKATLYAVLVSALVLMAMVKRKDSRGRAKRSGSGATNFSLLKQAGDVEENPGPTRGHMTEYKPTVRLATRDDVPRAVRTLAAAFADYPATRHTVDPDRHIERVTELQELFLTRVGLDIGKVWVADDGAAVAVWTTPESVEAGAVFAEIGPRMAELSGSRLAAQQQMEGLLAPHRPKEPAWFLATVGVSPDHQGKGLGSAVVLPGVEAAERAGVPAFLETSAPRNLPFYERLGFTVTADVEVPEGPRTWCMTRKPGA

SEQ ID NO: 19589 - protein, 725 aa, Artificial Sequence
  Synthetic Polypeptide
MALPVTALLLPLALLLHAARPDIQMTQSPSSLSASVGDRVTITCRASQDVNTAVAWYQQKPGKAPKLLIYSASFLYSGVPSRFSGSRSGTDFTLTISSLQPEDFATYYCQQAYTTPPTFGQGTKVEIKRTGGGGSGGGGSGGGGSEVQLVESGGGLVQPGGSLRLSCAASGFNIKDTYIHWVRQAPGKGLEWVARIYPTNGYTRYADSVKGRFTISADTSKNTAYLQMNSLRAEDTAVYYCSRWGGAGAYAMDVWGQGTLVTVSSTREQKLISEEDLGSGTPFPSLAPPIMLLVDGKQQMVVVCLVLDVAPPGLDSPIWFSAGNGSALDAFTYGPSPATDGTWTNLAHLSLPSEELASWEPLVCHTGPGAEGHSRSTQPMHLSGEASTARTCPQEPLRGTPGGALWLGVLRLLLFKLLLFDLLLTCSCLCDPAGPLPSPATTTRLRALGSHRLHPATETGGREATSSPRPQPRDRRWGDTPPGRKPGSPVRAKRSGSGVKQTLNFDLLKLAGDVESNPGPSRSRGHMTEYKPTVRLATRDDVPRAVRTLAAAFADYPATRHTVDPDRHIERVTELQELFLTRVGLDIGKVWVADDGAAVAVWTTPESVEAGAVFAEIGPRMAELSGSRLAAQQQMEGLLAPHRPKEPAWFLATVGVSPDHQGKGLGSAVVLPGVEAAERAGVPAFLETSAPRNLPFYERLGFTVTADVEVPEGPRTWCMTRKPGA

SEQ ID NO: 19590 - protein, 540 aa, Artificial Sequence
  Synthetic Polypeptide
MALPVTALLLPLALLLHAARPDIQMTQSPSSLSASVGDRVTITCRASQDVNTAVAWYQQKPGKAPKLLIYSASFLYSGVPSRFSGSRSGTDFTLTISSLQPEDFATYYCQQAYTTPPTFGQGTKVEIKRTLEDLKNVFPPEVAVFEPSEAEISHTQKATLVCLATGFYPDHVELSWWVNGKEVHSGVSTDPQPLKEQPALNDSRYCLSSRLRVSATFWQNPRNHFRCQVQFYGLSENDEWTQDRAKPVTQIVSAEAWGRADCGFTSESYQQGVLSATILYEILLGKATLYAVLVSALVLMAMVKRKDSRGRAKRSGSGATNFSLLKQAGDVEENPGPTRGHMTEYKPTVRLATRDDVPRAVRTLAAAFADYPATRHTVDPDRHIERVTELQELFLTRVGLDIGKVWVADDGAAVAVWTTPESVEAGAVFAEIGPRMAELSGSRLAAQQQMEGLLAPHRPKEPAWFLATVGVSPDHQGKGLGSAVVLPGVEAAERAGVPAFLETSAPRNLPFYERLGFTVTADVEVPEGPRTWCMTRKPGA

SEQ ID NO: 19591 - protein, 310 aa, Artificial Sequence
  Synthetic Polypeptide
MALPVTALLLPLALLLHAARPDIQMTQSPSSLSASVGDRVTITCRASQDVNTAVAWYQQKPGKAPKLLIYSASFLYSGVPSRFSGSRSGTDFTLTISSLQPEDFATYYCQQAYTTPPTFGQGTKVEIKRTLEDLKNVFPPEVAVFEPSEAEISHTQKATLVCLATGFYPDHVELSWWVNGKEVHSGVSTDPQPLKEQPALNDSRYCLSSRLRVSATFWQNPRNHFRCQVQFYGLSENDEWTQDRAKPVTQIVSAEAWGRADCGFTSESYQQGVLSATILYEILLGKATLYAVLVSALVLMAMVKRKDSRG

SEQ ID NO: 19592 - protein, 449 aa, Artificial Sequence
  Synthetic Polypeptide
MDWIWRILFLVGAATGAHSFEEVQLVESGGGLVQPGGSLRLSCAASGFNIKDTYIHWVRQAPGKGLEWVARIYPTNGYTRYADSVKGRFTISADTSKNTAYLQMNSLRAEDTAVYYCSRWGGAGAYAMDVWGQGTLVTVSSTRIQNPDPAVYQLRDSKSSDKSVCLFTDFDSQTNVSQSKDSDVYITDKTVLDMRSMDFKSNSAVAWSNKSDFACANAFNNSIIPEDTFFPSPESSCDVKLVEKSFETDTNLNFQNLSVIGFRILLLKVAGFNLLMTLRLWSSRAKRSGSGVKQTLNFDLLKLAGDVESNPGPSRGHMAKPLSQEESTLIERATATINSIPISEDYSVASAALSSDGRIFTGVNVYHFTGGPCAELVVLGTAAAAAAGNLTCIVAIGNENRGILSPCGRCRQVLLDLHPGIKAIVKDSDGQPTAVGIRELLPSGYVWEG

SEQ ID NO: 19593 - protein, 283 aa, Artificial Sequence
  Synthetic Polypeptide
MDWIWRILFLVGAATGAHSFEEVQLVESGGGLVQPGGSLRLSCAASGFNIKDTYIHWVRQAPGKGLEWVARIYPTNGYTRYADSVKGRFTISADTSKNTAYLQMNSLRAEDTAVYYCSRWGGAGAYAMDVWGQGTLVTVSSTRIQNPDPAVYQLRDSKSSDKSVCLFTDFDSQTNVSQSKDSDVYITDKTVLDMRSMDFKSNSAVAWSNKSDFACANAFNNSIIPEDTFFPSPESSCDVKLVEKSFETDTNLNFQNLSVIGFRILLLKVAGFNLLMTLRLWSS

SEQ ID NO: 19594 - protein, 558 aa, Artificial Sequence
  Synthetic Polypeptide
MALPVTALLLPLALLLHAARPDIQMTQSPSSLSASVGDRVTITCRASQDVNTAVAWYQQKPGKAPKLLIYSASFLYSGVPSRFSGSRSGTDFTLTISSLQPEDFATYYCQQAYTTPPTFGQGTKVEIKRTLEGKPIPNPLLGLDSTGSGEDLKNVFPPEVAVFEPSEAEISHTQKATLVCLATGFYPDHVELSWWVNGKEVHSGVCTDPQPLKEQPALNDSRYCLSSRLRVSATFWQNPRNHFRCQVQFYGLSENDEWTQDRAKPVTQIVSAEAWGRADCGFTSESYQQGVLSATILYEILLGKATLYAVLVSALVLMAMVKRKDSRGRAKRSGSGATNFSLLKQAGDVEENPGPTRGHMTEYKPTVRLATRDDVPRAVRTLAAAFADYPATRHTVDPDRHIERVTELQELFLTRVGLDIGKVWVADDGAAVAVWTTPESVEAGAVFAEIGPRMAELSGSRLAAQQQMEGLLAPHRPKEPAWFLATVGVSPDHQGKGLGSAVVLPGVEAAERAGVPAFLETSAPRNLPFYERLGFTVTADVEVPEGPRTWCMTRKPGA

SEQ ID NO: 19595 - protein, 328 aa, Artificial Sequence
  Synthetic Polypeptide
MALPVTALLLPLALLLHAARPDIQMTQSPSSLSASVGDRVTITCRASQDVNTAVAWYQQKPGKAPKLLIYSASFLYSGVPSRFSGSRSGTDFTLTISSLQPEDFATYYCQQAYTTPPTFGQGTKVEIKRTLEGKPIPNPLLGLDSTGSGEDLKNVFPPEVAVFEPSEAEISHTQKATLVCLATGFYPDHVELSWWVNGKEVHSGVCTDPQPLKEQPALNDSRYCLSSRLRVSATFWQNPRNHFRCQVQFYGLSENDEWTQDRAKPVTQIVSAEAWGRADCGFTSESYQQGVLSATILYEILLGKATLYAVLVSALVLMAMVKRKDSRG

SEQ ID NO: 19596 - protein, 461 aa, Artificial Sequence
  Synthetic Polypeptide
MDWIWRILFLVGAATGAHSFEEVQLVESGGGLVQPGGSLRLSCAASGFNIKDTYIHWVRQAPGKGLEWVARIYPTNGYTRYADSVKGRFTISADTSKNTAYLQMNSLRAEDTAVYYCSRWGGAGAYAMDVWGQGTLVTVSSTREQKLISEEDGSGIQNPDPAVYQLRDSKSSDKSVCLFTDFDSQTNVSQSKDSDVYITDKCVLDMRSMDFKSNSAVAWSNKSDFACANAFNNSIIPEDTFFPSPESSCDVKLVEKSFETDTNLNFQNLSVIGFRILLLKVAGFNLLMTLRLWSSRAKRSGSGVKQTLNFDLLKLAGDVESNPGPSRGHMAKPLSQEESTLIERATATINSIPISEDYSVASAALSSDGRIFTGVNVYHFTGGPCAELVVLGTAAAAAAGNLTCIVAIGNENRGILSPCGRCRQVLLDLHPGIKAIVKDSDGQPTAVGIRELLPSGYVWEG

SEQ ID NO: 19597 - protein, 295 aa, Artificial Sequence
  Synthetic Polypeptide
MDWIWRILFLVGAATGAHSFEEVQLVESGGGLVQPGGSLRLSCAASGFNIKDTYIHWVRQAPGKGLEWVARIYPTNGYTRYADSVKGRFTISADTSKNTAYLQMNSLRAEDTAVYYCSRWGGAGAYAMDVWGQGTLVTVSSTREQKLISEEDGSGIQNPDPAVYQLRDSKSSDKSVCLFTDFDSQTNVSQSKDSDVYITDKCVLDMRSMDFKSNSAVAWSNKSDFACANAFNNSIIPEDTFFPSPESSCDVKLVEKSFETDTNLNFQNLSVIGFRILLLKVAGFNLLMTLRLWSS

SEQ ID NO: 19598 - protein, 643 aa, Artificial Sequence
  Synthetic Polypeptide
MALPVTALLLPLALLLHAARPDIQMTQSPSSLSASVGDRVTITCRASQDVNTAVAWYQQKPGKAPKLLIYSASFLYSGVPSRFSGSRSGTDFTLTISSLQPEDFATYYCQQAYTTPPTFGQGTKVEIKRTGGGGSGGGGSGGGGSEVQLVESGGGLVQPGGSLRLSCAASGFNIKDTYIHWVRQAPGKGLEWVARIYPTNGYTRYADSVKGRFTISADTSKNTAYLQMNSLRAEDTAVYYCSRWGGAGAYAMDVWGQGTLVTVSSTRGSGIQNPDPAVYQLRDSKSSDKSVCLFTDFDSQTNVSQSKDSDVYITDKTVLDMRSMDFKSNSAVAWSNKSDFACANAFNNSIIPEDTFFPSSDVPCDVKLVEKSFETDTNLNFQNLSVIGFRILLLKVAGFNLLMTLRLWSSRAKRSGSGVKQTLNFDLLKLAGDVESNPGPSRGHMTEYKPTVRLATRDDVPRAVRTLAAAFADYPATRHTVDPDRHIERVTELQELFLTRVGLDIGKVWVADDGAAVAVWTTPESVEAGAVFAEIGPRMAELSGSRLAAQQQMEGLLAPHRPKEPAWFLATVGVSPDHQGKGLGSAVVLPGVEAAERAGVPAFLETSAPRNLPFYERLGFTVTADVEVPEGPRTWCMTRKPGA

SEQ ID NO: 19599 - protein, 675 aa, Artificial Sequence
  Synthetic Polypeptide
MALPVTALLLPLALLLHAARPDIQMTQSPSSLSASVGDRVTITCRASQDVNTAVAWYQQKPGKAPKLLIYSASFLYSGVPSRFSGSRSGTDFTLTISSLQPEDFATYYCQQAYTTPPTFGQGTKVEIKRTGGGGSGGGGSGGGGSEVQLVESGGGLVQPGGSLRLSCAASGFNIKDTYIHWVRQAPGKGLEWVARIYPTNGYTRYADSVKGRFTISADTSKNTAYLQMNSLRAEDTAVYYCSRWGGAGAYAMDVWGQGTLVTVSSLEDLKNVFPPEVAVFEPSKAEIAHTQKATLVCLATGFYPDHVELSWWVNGKEVHSGVSTDPQPLKEQPALNDSRYCLSSRLRVSATFWQNPRNHFRCQVQFYGLSENDEWTQDRAKPVTQIVSAEAWGRADCGITSASYHQGVLSATILYEILLGKATLYAVLVSALVLMAMVKRKDSRGRAKRSGSGATNFSLLKQAGDVEENPGPTRGHMTEYKPTVRLATRDDVPRAVRTLAAAFADYPATRHTVDPDRHIERVTELQELFLTRVGLDIGKVWVADDGAAVAVWTTPESVEAGAVFAEIGPRMAELSGSRLAAQQQMEGLLAPHRPKEPAWFLATVGVSPDHQGKGLGSAVVLPGVEAAERAGVPAFLETSAPRNLPFYERLGFTVTADVEVPEGPRTWCMTRKPGA

SEQ ID NO: 19600 - protein, 698 aa, Artificial Sequence
  Synthetic Polypeptide
MALPVTALLLPLALLLHAARPDIQMTQSPSSLSASVGDRVTITCRASQDVNTAVAWYQQKPGKAPKLLIYSASFLYSGVPSRFSGSRSGTDFTLTISSLQPEDFATYYCQQAYTTPPTFGQGTKVEIKRTGGGGSGGGGSGGGGSEVQLVESGGGLVQPGGSLRLSCAASGFNIKDTYIHWVRQAPGKGLEWVARIYPTNGYTRYADSVKGRFTISADTSKNTAYLQMNSLRAEDTAVYYCSRWGGAGAYAMDVWGQGTLVTVSSTRGSGGGGSGGGGSGDGNEEMGGITQTPYKVSISGTTVILTCPQYPGSEILWQHNDKNIGGDEDDKNIGSDEDHLSLKEFSELEQSGYYVCYPRGSKPEDANFYLYLRARVCENCMEMDVMSVATIVIVDICITGGLLLLVYYWSKNRKAKAKPVTRGAGAGGRQRGQNKERPPPVPNPDYEPIRKGQRDLYSGLNQRRIRAKRSGSGVKQTLNFDLLKLAGDVESNPGPSRGHMTEYKPTVRLATRDDVPRAVRTLAAAFADYPATRHTVDPDRHIERVTELQELFLTRVGLDIGKVWVADDGAAVAVWTTPESVEAGAVFAEIGPRMAELSGSRLAAQQQMEGLLAPHRPKEPAWFLATVGVSPDHQGKGLGSAVVLPGVEAAERAGVPAFLETSAPRNLPFYERLGFTVTADVEVPEGPRTWCMTRKPGA

SEQ ID NO: 19601 - protein, 663 aa, Artificial Sequence
  Synthetic Polypeptide
MALPVTALLLPLALLLHAARPDIQMTQSPSSLSASVGDRVTITCRASQDVNTAVAWYQQKPGKAPKLLIYSASFLYSGVPSRFSGSRSGTDFTLTISSLQPEDFATYYCQQAYTTPPTFGQGTKVEIKRTGGGGSGGGGSGGGGSEVQLVESGGGLVQPGGSLRLSCAASGFNIKDTYIHWVRQAPGKGLEWVARIYPTNGYTRYADSVKGRFTISADTSKNTAYLQMNSLRAEDTAVYYCSRWGGAGAYAMDVWGQGTLVTVSSTRGSGGGGSGGGGSGFKIPIEELEDRVFVNCNTSITWVEGTVGTLLSDITRLDLGKRILDPRGIYRCNGTDIYKDKESTVQVHYRMCQSCVELDPATVAGIIVTDVIATLLLALGVFCFAGHETGRLSGAADTQALLRNDQVYQPLRDRDDAQYSHLGGNWARNKRAKRSGSGVKQTLNFDLLKLAGDVESNPGPSRGHMTEYKPTVRLATRDDVPRAVRTLAAAFADYPATRHTVDPDRHIERVTELQELFLTRVGLDIGKVWVADDGAAVAVWTTPESVEAGAVFAEIGPRMAELSGSRLAAQQQMEGLLAPHRPKEPAWFLATVGVSPDHQGKGLGSAVVLPGVEAAERAGVPAFLETSAPRNLPFYERLGFTVTADVEVPEGPRTWCMTRKPGA

SEQ ID NO: 19602 - protein, 673 aa, Artificial Sequence
  Synthetic Polypeptide
MALPVTALLLPLALLLHAARPDIQMTQSPSSLSASVGDRVTITCRASQDVNTAVAWYQQKPGKAPKLLIYSASFLYSGVPSRFSGSRSGTDFTLTISSLQPEDFATYYCQQAYTTPPTFGQGTKVEIKRTGGGGSGGGGSGGGGSEVQLVESGGGLVQPGGSLRLSCAASGFNIKDTYIHWVRQAPGKGLEWVARIYPTNGYTRYADSVKGRFTISADTSKNTAYLQMNSLRAEDTAVYYCSRWGGAGAYAMDVWGQGTLVTVSSTRGSGGGGSGGGGSGQSIKGNHLVKVYDYQEDGSVLLTCDAEAKNITWFKDGKMIGFLTEDKKKWNLGSNAKDPRGMYQCKGSQNKSKPLQVYYRMCQNCIELNAATISGFLFAEIVSIFVLAVGVYFIAGQDGVRQSRASDKQTLLPNDQLYQPLKDREDDQYSHLQGNQLRRNRAKRSGSGVKQTLNFDLLKLAGDVESNPGPSRGHMTEYKPTVRLATRDDVPRAVRTLAAAFADYPATRHTVDPDRHIERVTELQELFLTRVGLDIGKVWVADDGAAVAVWTTPESVEAGAVFAEIGPRMAELSGSRLAAQQQMEGLLAPHRPKEPAWFLATVGVSPDHQGKGLGSAVVLPGVEAAERAGVPAFLETSAPRNLPFYERLGFTVTADVEVPEGPRTWCMTRKPGA

SEQ ID NO: 19603 - protein, 656 aa, Artificial Sequence
  Synthetic Polypeptide
MALPVTALLLPLALLLHAARPDIQMTQSPSSLSASVGDRVTITCRASQDVNTAVAWYQQKPGKAPKLLIYSASFLYSGVPSRFSGSRSGTDFTLTISSLQPEDFATYYCQQAYTTPPTFGQGTKVEIKRTGGGGSGGGGSGGGGSEVQLVESGGGLVQPGGSLRLSCAASGFNIKDTYIHWVRQAPGKGLEWVARIYPTNGYTRYADSVKGRFTISADTSKNTAYLQMNSLRAEDTAVYYCSRWGGAGAYAMDVWGQGTLVTVSSTRGSGGGGSGGGGSGQSFGLLDPKLCYLLDGILFIYGVILTALFLRVKFSRSADAPAYQQGQNQLYNELNLGRREEYDVLDKRRGRDPEMGGKPQRRKNPQEGLYNELQKDKMAEAYSEIGMKGERRRGKGHDGLYQGLSTATKDTYDALHMQALPPRRAKRSGSGVKQTLNFDLLKLAGDVESNPGPSRGHMTEYKPTVRLATRDDVPRAVRTLAAAFADYPATRHTVDPDRHIERVTELQELFLTRVGLDIGKVWVADDGAAVAVWTTPESVEAGAVFAEIGPRMAELSGSRLAAQQQMEGLLAPHRPKEPAWFLATVGVSPDHQGKGLGSAVVLPGVEAAERAGVPAFLETSAPRNLPFYERLGFTVTADVEVPEGPRTWCMTRKPGA

SEQ ID NO: 19604 - protein, 757 aa, Artificial Sequence
  Synthetic Polypeptide
MALPVTALLLPLALLLHAARPEVQLVESGGGLVQPGGSLRLSCAASGFSFSDFWMSWVRQAPGKGLEWVATISQAGSEKDYVDSVKGRFTISRDNAKKSLYLQMNSLRAEDTAVYYCASGVYSFDYRGQGTLVTVSSGTGGGGSGGGGSGGGGSEFDIQMTQSPSSLSASVGDRVTITCRASQDVNTAVAWYQQKPGKAPKLLIYSASFLYSGVPSRFSGSRSGTDFTLTISSLQPEDFATYYCQQAYTTPPTFGQGTKVEIKRTLEDLKNVFPPEVAVFEPSEAEISHTQKATLVCLATGFYPDHVELSWWVNGKEVHSGVCTDPQPLKEQPALNDSRYCLSSRLRVSATFWQNPRNHFRCQVQFYGLSENDEWTQDRAKPVTQIVSAEAWGRADCGFTSESYQQGVLSATILYEILLGKATLYAVLVSALVLMAMVKRKDSRGRAKRSGSGATNFSLLKQAGDVEENPGPTSMDWIWRILFLVGAATGAHSFEEVQLVESGGGLVQPGGSLRLSCAASGFNIKDTYIHWVRQAPGKGLEWVARIYPTNGYTRYADSVKGRFTISADTSKNTAYLQMNSLRAEDTAVYYCSRWGGAGAYAMDVWGQGTLVTVSSTRIQNPDPAVYQLRDSKSSDKSVCLFTDFDSQTNVSQSKDSDVYITDKCVLDMRSMDFKSNSAVAWSNKSDFACANAFNNSIIPEDTFFPSPESSCDVKLVEKSFETDTNLNFQNLSVIGFRILLLKVAGFNLLMTLRLWSS

SEQ ID NO: 19605 - protein, 761 aa, Artificial Sequence
  Synthetic Polypeptide
MALPVTALLLPLALLLHAARPEVQLVESGGGLVQPGGSLRLSCAASGFSFSDFWMSWVRQAPGKGLEWVATISQAGSEKDYVDSVKGRFTISRDNAKKSLYLQMNSLRAEDTAVYYCASGVYSFDYRGQGTLVTVSSGTGGGGSGGGGSGGGGSEFDIQMTQSPSSLSASVGDRVTITCRASQDVNTAVAWYQQKPGKAPKLLIYSASFLYSGVPSRFSGSRSGTDFTLTISSLQPEDFATYYCQQAYTTPPTFGQGTKVEIKRTLEIQNPDPAVYQLRDSKSSDKSVCLFTDFDSQTNVSQSKDSDVYITDKCVLDMRSMDFKSNSAVAWSNKSDFACANAFNNSIIPEDTFFPSPESSCDVKLVEKSFETDTNLNFQNLSVIGFRILLLKVAGFNLLMTLRLWSSRAKRSGSGVKQTLNFDLLKLAGDVESNPGPTSMDWIWRILFLVGAATGAHSFEEVQLVESGGGLVQPGGSLRLSCAASGFNIKDTYIHWVRQAPGKGLEWVARIYPTNGYTRYADSVKGRFTISADTSKNTAYLQMNSLRAEDTAVYYCSRWGGAGAYAMDVWGQGTLVTVSSTREDLKNVFPPEVAVFEPSEAEISHTQKATLVCLATGFYPDHVELSWWVNGKEVHSGVCTDPQPLKEQPALNDSRYCLSSRLRVSATFWQNPRNHFRCQVQFYGLSENDEWTQDRAKPVTQIVSAEAWGRADCGFTSESYQQGVLSATILYEILLGKATLYAVLVSALVLMAMVKRKDSRG

SEQ ID NO: 19606 - protein, 953 aa, Artificial Sequence
  Synthetic Polypeptide
MALPVTALLLPLALLLHAARPEVQLVESGGGLVQPGGSLRLSCAASGFSFSDFWMSWVRQAPGKGLEWVATISQAGSEKDYVDSVKGRFTISRDNAKKSLYLQMNSLRAEDTAVYYCASGVYSFDYRGQGTLVTVSSGTGGGGSGGGGSGGGGSEFDIQMTQSPSSLSASVGDRVTITCRASQDVNTAVAWYQQKPGKAPKLLIYSASFLYSGVPSRFSGSRSGTDFTLTISSLQPEDFATYYCQQAYTTPPTFGQGTKVEIKRTLEDLKNVFPPEVAVFEPSEAEISHTQKATLVCLATGFYPDHVELSWWVNGKEVHSGVSTDPQPLKEQPALNDSRYCLSSRLRVSATFWQNPRNHFRCQVQFYGLSENDEWTQDRAKPVTQIVSAEAWGRADCGSQSFGLLDPKLCYLLDGILFIYGVILTALFLRVKFSRSADAPAYQQGQNQLYNELNLGRREEYDVLDKRRGRDPEMGGKPQRRKNPQEGLYNELQKDKMAEAYSEIGMKGERRRGKGHDGLYQGLSTATKDTYDALHMQALPPRRAKRSGSGATNFSLLKQAGDVEENPGPTSMDWIWRILFLVGAATGAHSFEEVQLVESGGGLVQPGGSLRLSCAASGFNIKDTYIHWVRQAPGKGLEWVARIYPTNGYTRYADSVKGRFTISADTSKNTAYLQMNSLRAEDTAVYYCSRWGGAGAYAMDVWGQGTLVTVSSTRIQNPDPAVYQLRDSKSSDKSVCLFTDFDSQTNVSQSKDSDVYITDKTVLDMRSMDFKSNSAVAWSNKSDFACANAFNNSIIPEDTFFPSPESSCGTQSFGLLDPKLCYLLDGILFIYGVILTALFLRVKFSRSADAPAYQQGQNQLYNELNLGRREEYDVLDKRRGRDPEMGGKPQRRKNPQEGLYNELQKDKMAEAYSEIGMKGERRRGKGHDGLYQGLSTATKDTYDALHMQALPPR

SEQ ID NO: 19607 - protein, 783 aa, Artificial Sequence
  Synthetic Polypeptide
MALPVTALLLPLALLLHAARPEVQLVESGGGLVQPGGSLRLSCAASGFSFSDFWMSWVRQAPGKGLEWVATISQAGSEKDYVDSVKGRFTISRDNAKKSLYLQMNSLRAEDTAVYYCASGVYSFDYRGQGTLVTVSSGTGGGGSGGGGSGGGGSEFDIQMTQSPSSLSASVGDRVTITCRASQDVNTAVAWYQQKPGKAPKLLIYSASFLYSGVPSRFSGSRSGTDFTLTISSLQPEDFATYYCQQAYTTPPTFGQGTKVEIKRTLEGQPKANPTVTLFPPSSEELQANKATLVCLISDFYPGAVTVAWKADGSPVKAGVETTKPSKQSNNKYAASSYLSLTPEQWKSHRSYSCQVTHEGSTVEKTVAPTECSPIKTDVITMDPKDNCSKDANDTLLLQLTNTSAYYMYLLLLLKSVVYFAIITCCLLRRTAFCCNGEKSRAKRSGSGATNFSLLKQAGDVEENPGPTSMDWIWRILFLVGAATGAHSFEEVQLVESGGGLVQPGGSLRLSCAASGFNIKDTYIHWVRQAPGKGLEWVARIYPTNGYTRYADSVKGRFTISADTSKNTAYLQMNSLRAEDTAVYYCSRWGGAGAYAMDVWGQGTLVTVSSTRASTKGPSVFPLAPSSKSTSGGTAALGCLVKDYFPEPVTVSWNSGALTSGVHTFPAVLQSSGLYSLSSVVTVPSSSLGTQTYICNVNHKPSNTKVDKRVEPKSCEVKTDSTDHVKPKETENTKQPSKSCHKPKAIVHTEKVNMMSLTVLGLRMLFAKTVAVNFLLTAKLFFL

SEQ ID NO: 19608 - protein, 764 aa, Artificial Sequence
  Synthetic Polypeptide
MALPVTALLLPLALLLHAARPEVQLVESGGGLVQPGGSLRLSCAASGFSFSDFWMSWVRQAPGKGLEWVATISQAGSEKDYVDSVKGRFTISRDNAKKSLYLQMNSLRAEDTAVYYCASGVYSFDYRGQGTLVTVSSGTGGGGSGGGGSGGGGSEFDIQMTQSPSSLSASVGDRVTITCRASQDVNTAVAWYQQKPGKAPKLLIYSASFLYSGVPSRFSGSRSGTDFTLTISSLQPEDFATYYCQQAYTTPPTFGQGTKVEIKRTLEGQPKANPTVTLFPPSSEELQANKATLVCLISDFYPGAVTVAWKADGSPVKAGVETTKPSKQSNNKYAASSYLSLTPEQWKSHRSYSCQVTHEGSTVEKTVAPTECSGRADCGFTSESYQQGVLSATILYEILLGKATLYAVLVSALVLMAMVKRKDSRGRAKRSGSGVKQTLNFDLLKLAGDVESNPGPTSMDWIWRILFLVGAATGAHSFEEVQLVESGGGLVQPGGSLRLSCAASGFNIKDTYIHWVRQAPGKGLEWVARIYPTNGYTRYADSVKGRFTISADTSKNTAYLQMNSLRAEDTAVYYCSRWGGAGAYAMDVWGQGTLVTVSSTRASTKGPSVFPLAPSSKSTSGGTAALGCLVKDYFPEPVTVSWNSGALTSGVHTFPAVLQSSGLYSLSSVVTVPSSSLGTQTYICNVNHKPSNTKVDKRVEPKSCIPEDTFFPSPESSCDVKLVEKSFETDTNLNFQNLSVIGFRILLLKVAGFNLLMTLRLWSS

SEQ ID NO: 19609 - protein, 898 aa, Artificial Sequence
  Synthetic Polypeptide
MALPVTALLLPLALLLHAARPEVQLVESGGGLVQPGGSLRLSCAASGFSFSDFWMSWVRQAPGKGLEWVATISQAGSEKDYVDSVKGRFTISRDNAKKSLYLQMNSLRAEDTAVYYCASGVYSFDYRGQGTLVTVSSGTGGGGSGGGGSGGGGSEFDIQMTQSPSSLSASVGDRVTITCRASQDVNTAVAWYQQKPGKAPKLLIYSASFLYSGVPSRFSGSRSGTDFTLTISSLQPEDFATYYCQQAYTTPPTFGQGTKVEIKRTLEIQNPDPAVYQLRDSKSSDKSVCLFTDFDSQTNVSQSKDSDVYITDKCVLDMRSMDFKSNSAVAWSNKSDFACANAFNNSIIPEDTFFPSPESSCDVKLVEKSFETDTNLNFQNLSVIGFRILLLKVAGFNLLMTLRLWSSRAKRSGSGVKQTLNFDLLKLAGDVESNPGPTSMDWIWRILFLVGAATGAHSGPQLQLQESGPGLVKPSETLSLTCTVSGDSISSGDYYWGWIRQPPGKGLEWIGHIYYSGVTYYNPSLKSRVTISVDTSRNQFSLKLSSVTAADTAVYYCTREDSSNWRSRGQGTLVTVSSGSGGGGSGGGGSGGGGSFEEVQLVESGGGLVQPGGSLRLSCAASGFNIKDTYIHWVRQAPGKGLEWVARIYPTNGYTRYADSVKGRFTISADTSKNTAYLQMNSLRAEDTAVYYCSRWGGAGAYAMDVWGQGTLVTVSSTREDLKNVFPPEVAVFEPSEAEISHTQKATLVCLATGFYPDHVELSWWVNGKEVHSGVCTDPQPLKEQPALNDSRYCLSSRLRVSATFWQNPRNHFRCQVQFYGLSENDEWTQDRAKPVTQIVSAEAWGRADCGFTSESYQQGVLSATILYEILLGKATLYAVLVSALVLMAMVKRKDSRG

SEQ ID NO: 19610 - protein, 1090 aa, Artificial Sequence
  Synthetic Polypeptide
MALPVTALLLPLALLLHAARPEVQLVESGGGLVQPGGSLRLSCAASGFSFSDFWMSWVRQAPGKGLEWVATISQAGSEKDYVDSVKGRFTISRDNAKKSLYLQMNSLRAEDTAVYYCASGVYSFDYRGQGTLVTVSSGTGGGGSGGGGSGGGGSEFDIQMTQSPSSLSASVGDRVTITCRASQDVNTAVAWYQQKPGKAPKLLIYSASFLYSGVPSRFSGSRSGTDFTLTISSLQPEDFATYYCQQAYTTPPTFGQGTKVEIKRTLEDLKNVFPPEVAVFEPSEAEISHTQKATLVCLATGFYPDHVELSWWVNGKEVHSGVSTDPQPLKEQPALNDSRYCLSSRLRVSATFWQNPRNHFRCQVQFYGLSENDEWTQDRAKPVTQIVSAEAWGRADCGSQSFGLLDPKLCYLLDGILFIYGVILTALFLRVKFSRSADAPAYQQGQNQLYNELNLGRREEYDVLDKRRGRDPEMGGKPQRRKNPQEGLYNELQKDKMAEAYSEIGMKGERRRGKGHDGLYQGLSTATKDTYDALHMQALPPRRAKRSGSGATNFSLLKQAGDVEENPGPTSMDWIWRILFLVGAATGAHSGPQLQLQESGPGLVKPSETLSLTCTVSGDSISSGDYYWGWIRQPPGKGLEWIGHIYYSGVTYYNPSLKSRVTISVDTSRNQFSLKLSSVTAADTAVYYCTREDSSNWRSRGQGTLVTVSSGSGGGGSGGGGSGGGGSFEEVQLVESGGGLVQPGGSLRLSCAASGFNIKDTYIHWVRQAPGKGLEWVARIYPTNGYTRYADSVKGRFTISADTSKNTAYLQMNSLRAEDTAVYYCSRWGGAGAYAMDVWGQGTLVTVSSTRIQNPDPAVYQLRDSKSSDKSVCLFTDFDSQTNVSQSKDSDVYITDKTVLDMRSMDFKSNSAVAWSNKSDFACANAFNNSIIPEDTFFPSPESSCGTQSFGLLDPKLCYLLDGILFIYGVILTALFLRVKFSRSADAPAYQQGQNQLYNELNLGRREEYDVLDKRRGRDPEMGGKPQRRKNPQEGLYNELQKDKMAEAYSEIGMKGERRRGKGHDGLYQGLSTATKDTYDALHMQALPPR

SEQ ID NO: 19611 - protein, 920 aa, Artificial Sequence
  Synthetic Polypeptide
MALPVTALLLPLALLLHAARPEVQLVESGGGLVQPGGSLRLSCAASGFSFSDFWMSWVRQAPGKGLEWVATISQAGSEKDYVDSVKGRFTISRDNAKKSLYLQMNSLRAEDTAVYYCASGVYSFDYRGQGTLVTVSSGTGGGGSGGGGSGGGGSEFDIQMTQSPSSLSASVGDRVTITCRASQDVNTAVAWYQQKPGKAPKLLIYSASFLYSGVPSRFSGSRSGTDFTLTISSLQPEDFATYYCQQAYTTPPTFGQGTKVEIKRTLEGQPKANPTVTLFPPSSEELQANKATLVCLISDFYPGAVTVAWKADGSPVKAGVETTKPSKQSNNKYAASSYLSLTPEQWKSHRSYSCQVTHEGSTVEKTVAPTECSPIKTDVITMDPKDNCSKDANDTLLLQLTNTSAYYMYLLLLLKSVVYFAIITCCLLRRTAFCCNGEKSRAKRSGSGATNFSLLKQAGDVEENPGPTSMDWIWRILFLVGAATGAHSGPQLQLQESGPGLVKPSETLSLTCTVSGDSISSGDYYWGWIRQPPGKGLEWIGHIYYSGVTYYNPSLKSRVTISVDTSRNQFSLKLSSVTAADTAVYYCTREDSSNWRSRGQGTLVTVSSGSGGGGSGGGGSGGGGSFEEVQLVESGGGLVQPGGSLRLSCAASGFNIKDTYIHWVRQAPGKGLEWVARIYPTNGYTRYADSVKGRFTISADTSKNTAYLQMNSLRAEDTAVYYCSRWGGAGAYAMDVWGQGTLVTVSSTRASTKGPSVFPLAPSSKSTSGGTAALGCLVKDYFPEPVTVSWNSGALTSGVHTFPAVLQSSGLYSLSSVVTVPSSSLGTQTYICNVNHKPSNTKVDKRVEPKSCEVKTDSTDHVKPKETENTKQPSKSCHKPKAIVHTEKVNMMSLTVLGLRMLFAKTVAVNFLLTAKLFFL

SEQ ID NO: 19612 - protein, 901 aa, Artificial Sequence
  Synthetic Polypeptide
MALPVTALLLPLALLLHAARPEVQLVESGGGLVQPGGSLRLSCAASGFSFSDFWMSWVRQAPGKGLEWVATISQAGSEKDYVDSVKGRFTISRDNAKKSLYLQMNSLRAEDTAVYYCASGVYSFDYRGQGTLVTVSSGTGGGGSGGGGSGGGGSEFDIQMTQSPSSLSASVGDRVTITCRASQDVNTAVAWYQQKPGKAPKLLIYSASFLYSGVPSRFSGSRSGTDFTLTISSLQPEDFATYYCQQAYTTPPTFGQGTKVEIKRTLEGQPKANPTVTLFPPSSEELQANKATLVCLISDFYPGAVTVAWKADGSPVKAGVETTKPSKQSNNKYAASSYLSLTPEQWKSHRSYSCQVTHEGSTVEKTVAPTECSGRADCGFTSESYQQGVLSATILYEILLGKATLYAVLVSALVLMAMVKRKDSRGRAKRSGSGVKQTLNFDLLKLAGDVESNPGPTSMDWIWRILFLVGAATGAHSGPQLQLQESGPGLVKPSETLSLTCTVSGDSISSGDYYWGWIRQPPGKGLEWIGHIYYSGVTYYNPSLKSRVTISVDTSRNQFSLKLSSVTAADTAVYYCTREDSSNWRSRGQGTLVTVSSGSGGGGSGGGGSGGGGSFEEVQLVESGGGLVQPGGSLRLSCAASGFNIKDTYIHWVRQAPGKGLEWVARIYPTNGYTRYADSVKGRFTISADTSKNTAYLQMNSLRAEDTAVYYCSRWGGAGAYAMDVWGQGTLVTVSSTRASTKGPSVFPLAPSSKSTSGGTAALGCLVKDYFPEPVTVSWNSGALTSGVHTFPAVLQSSGLYSLSSVVTVPSSSLGTQTYICNVNHKPSNTKVDKRVEPKSCIPEDTFFPSPESSCDVKLVEKSFETDTNLNFQNLSVIGFRILLLKVAGFNLLMTLRLWSS

SEQ ID NO: 19613 - protein, 758 aa, Artificial Sequence
  Synthetic Polypeptide
MALPVTALLLPLALLLHAARPEVQVLESGGGLVQPGGSLRLSCAASGFTFSNFAMSWVRQAPGKGLEWVSTISGSAGTTDYADSVKGRFTISRDNSKKTLYLQMNSLRVEDTAVYYCADGRGPFFDYRGQGTLVTVSSGTGGGGSGGGGSGGGGSEFDIQMTQSPSSLSASVGDRVTITCRASQDVNTAVAWYQQKPGKAPKLLIYSASFLYSGVPSRFSGSRSGTDFTLTISSLQPEDFATYYCQQAYTTPPTFGQGTKVEIKRTLEDLKNVFPPEVAVFEPSEAEISHTQKATLVCLATGFYPDHVELSWWVNGKEVHSGVCTDPQPLKEQPALNDSRYCLSSRLRVSATFWQNPRNHFRCQVQFYGLSENDEWTQDRAKPVTQIVSAEAWGRADCGFTSESYQQGVLSATILYEILLGKATLYAVLVSALVLMAMVKRKDSRGRAKRSGSGATNFSLLKQAGDVEENPGPTSMDWIWRILFLVGAATGAHSFEEVQLVESGGGLVQPGGSLRLSCAASGFNIKDTYIHWVRQAPGKGLEWVARIYPTNGYTRYADSVKGRFTISADTSKNTAYLQMNSLRAEDTAVYYCSRWGGAGAYAMDVWGQGTLVTVSSTRIQNPDPAVYQLRDSKSSDKSVCLFTDFDSQTNVSQSKDSDVYITDKCVLDMRSMDFKSNSAVAWSNKSDFACANAFNNSIIPEDTFFPSPESSCDVKLVEKSFETDTNLNFQNLSVIGFRILLLKVAGFNLLMTLRLWSS

SEQ ID NO: 19614 - protein, 759 aa, Artificial Sequence
  Synthetic Polypeptide
MALPVTALLLPLALLLHAARPDIQMTQSPSSLSASVGDRVTITCRASQDVNTAVAWYQQKPGKAPKLLIYSASFLYSGVPSRFSGSRSGTDFTLTISSLQPEDFATYYCQQAYTTPPTFGQGTKVEIKRTLEDLKNVFPPEVAVFEPSEAEISHTQKATLVCLATGFYPDHVELSWWVNGKEVHSGVCTDPQPLKEQPALNDSRYCLSSRLRVSATFWQNPRNHFRCQVQFYGLSENDEWTQDRAKPVTQIVSAEAWGRADCGFTSESYQQGVLSATILYEILLGKATLYAVLVSALVLMAMVKRKDSRGRAKRSGSGATNFSLLKQAGDVEENPGPTSMDWIWRILFLVGAATGAHSGPEVQLVESGGGLVQAGGSLRLSCAASGRTFSMGWFRQAPGKEREFVAAITYSGGSPYYADSVKGRFTISRDNAKNTVYLQMNSLKPEDTAVYYCAANPTYGSDWNAENWGQGTQVTVSSGSGGGGSGGGGSGGGGSFEEVQLVESGGGLVQPGGSLRLSCAASGFNIKDTYIHWVRQAPGKGLEWVARIYPTNGYTRYADSVKGRFTISADTSKNTAYLQMNSLRAEDTAVYYCSRWGGAGAYAMDVWGQGTLVTVSSTRIQNPDPAVYQLRDSKSSDKSVCLFTDFDSQTNVSQSKDSDVYITDKCVLDMRSMDFKSNSAVAWSNKSDFACANAFNNSIIPEDTFFPSPESSCDVKLVEKSFETDTNLNFQNLSVIGFRILLLKVAGFNLLMTLRLWSS

SEQ ID NO: 19615 - protein, 886 aa, Artificial Sequence
  Synthetic Polypeptide
MALPVTALLLPLALLLHAARPDIQMTQSPSSLSASVGDRVTITCRASQDVNTAVAWYQQKPGKAPKLLIYSASFLYSGVPSRFSGSRSGTDFTLTISSLQPEDFATYYCQQAYTTPPTFGQGTKVEIKRTLEDLKNVFPPEVAVFEPSEAEISHTQKATLVCLATGFYPDHVELSWWVNGKEVHSGVCTDPQPLKEQPALNDSRYCLSSRLRVSATFWQNPRNHFRCQVQFYGLSENDEWTQDRAKPVTQIVSAEAWGRADCGFTSESYQQGVLSATILYEILLGKATLYAVLVSALVLMAMVKRKDSRGRAKRSGSGATNFSLLKQAGDVEENPGPTSMDWIWRILFLVGAATGAHSQLQLQESGPGLVKPSETLSLTCTVSGGSISSGDYYWGWIRQPPGKGLEWIGSISYSGSTYYNPSLKSRVTISVDTSRNQFSLKLSSVTAADTAVYYCTREDSSNWRSRGQGTLVTVSSSGGGGSGGGGSEVQLVESGGGLVQAGGSLRLSCAASGRTFSMGWFRQAPGKEREFVAAITYSGGSPYYADSVKGRFTISRDNAKNTVYLQMNSLKPEDTAVYYCAANPTYGSDWNAENWGQGTQVTVSSGSGGGGSGGGGSGGGGSFEEVQLVESGGGLVQPGGSLRLSCAASGFNIKDTYIHWVRQAPGKGLEWVARIYPTNGYTRYADSVKGRFTISADTSKNTAYLQMNSLRAEDTAVYYCSRWGGAGAYAMDVWGQGTLVTVSSTRIQNPDPAVYQLRDSKSSDKSVCLFTDFDSQTNVSQSKDSDVYITDKCVLDMRSMDFKSNSAVAWSNKSDFACANAFNNSIIPEDTFFPSPESSCDVKLVEKSFETDTNLNFQNLSVIGFRILLLKVAGFNLLMTLRLWSS

SEQ ID NO: 19616 - protein, 895 aa, Artificial Sequence
  Synthetic Polypeptide
MALPVTALLLPLALLLHAARPEVQVLESGGGLVQPGGSLRLSCAASGFTFSNFAMSWVRQAPGKGLEWVSTISGSAGTTDYADSVKGRFTISRDNSKKTLYLQMNSLRVEDTAVYYCADGRGPFFDYRGQGTLVTVSSGTGGGGSGGGGSGGGGSEFDIQMTQSPSSLSASVGDRVTITCRASQDVNTAVAWYQQKPGKAPKLLIYSASFLYSGVPSRFSGSRSGTDFTLTISSLQPEDFATYYCQQAYTTPPTFGQGTKVEIKRTLEDLKNVFPPEVAVFEPSEAEISHTQKATLVCLATGFYPDHVELSWWVNGKEVHSGVCTDPQPLKEQPALNDSRYCLSSRLRVSATFWQNPRNHFRCQVQFYGLSENDEWTQDRAKPVTQIVSAEAWGRADCGFTSESYQQGVLSATILYEILLGKATLYAVLVSALVLMAMVKRKDSRGRAKRSGSGATNFSLLKQAGDVEENPGPTSMDWIWRILFLVGAATGAHSGPEVQLVESGGGLVQAGGSLRLSCAASGRTFSMGWFRQAPGKEREFVAAITYSGGSPYYASSVRGRFTISRDNAKNTVYLQMNSLKPEDTAVYYCAANPTYGSDWNAENWGQGTQVTVSSGSGGGGSGGGGSGGGGSFEEVQLVESGGGLVQPGGSLRLSCAASGFNIKDTYIHWVRQAPGKGLEWVARIYPTNGYTRYADSVKGRFTISADTSKNTAYLQMNSLRAEDTAVYYCSRWGGAGAYAMDVWGQGTLVTVSSTRIQNPDPAVYQLRDSKSSDKSVCLFTDFDSQTNVSQSKDSDVYITDKCVLDMRSMDFKSNSAVAWSNKSDFACANAFNNSIIPEDTFFPSPESSCDVKLVEKSFETDTNLNFQNLSVIGFRILLLKVAGFNLLMTLRLWSS

SEQ ID NO: 19617 - protein, 729 aa, Artificial Sequence
  Synthetic Polypeptide
MALPVTALLLPLALLLHAARPEIVLTQSPGTLSLSPGERATLSCRASQSVSSDYLAWYQQKPGQAPRLLIYGASSRATGIPDRFSGSGSGTDFTLTISRLPEDFAVYYCQQYVSYWTFGGGTKVEIKRTVAAGGGGSGGGGSGGGGSQVQLVESGGGVVQPGRSLRLSCAASGFTFSSYAMHWVRQAPGKGLEWVAVISYDGSNKYYADSVKGRFTISRDNSKNTLYLQMNSLRAEDTAVYYCAKEAPYYAKDYMDVWGKGTTVTVSSTREQKLISEEDLAKPTTTPAPRPPTPAPTIASQPLSLRPEACRPAAGGAVHTRGLDFACDIYIWAPLAGTCGVLLLSLVITLYCKRGRKKLLYIFKQPFMRPVQTTQEEDGCSCRFPEEEEGGCELRVKFSRSADAPAYQQGQNQLYNELNLGRREEYDVLDKRRGRDPEMGGKPRRKNPQEGLYNELQKDKMAEAYSEIGMKGERRRGKGHDGLYQGLSTATKDTYDALHMQALPPRSSGSGEGRGSLLTCGDVEENPGPHMTEYKPTVRLATRDDVPRAVRTLAAAFADYPATRHTVDPDRHIERVTELQELFLTRVGLDIGKVWVADDGAAVAVWTTPESVEAGAVFAEIGPRMAELSGSRLAAQQQMEGLLAPHRPKEPAWFLATVGVSPDHQGKGLGSAVVLPGVEAAERAGVPAFLETSAPRNLPFYERLGFTVTADVEVPEGPRTWCMTRKPGA

SEQ ID NO: 19618 - protein, 723 aa, Artificial Sequence
  Synthetic Polypeptide
MALPVTALLLPLALLLHAARPEIVLTQSPGTLSLSPGERATLSCRASQSVSSDYLAWYQQKPGQAPRLLIYGASSRATGIPDRFSGSGSGTDFTLTISRLPEDFAVYYCQQYVSYWTFGGGTKVEIKRTVAAGGGGSGGGGSGGGGSQVQLVESGGGVVQPGRSLRLSCAASGFTFSSYAMHWVRQAPGKGLEWVAVISYDGSNKYYADSVKGRFTISRDNSKNTLYLQMNSLRAEDTAVYYCAKEAPYYAKDYMDVWGKGTTVTVSSTREQKLISEEDLKIEVMYPPPYLDNEKSNGTIIHVKGKHLCPSPLFPGPSKPFWVLVVVGGVLACYSLLVTVAFIIFWVRSKRSRLLHSDYMNMTPRRPGPTRKHYQPYAPPRDFAAYRSRVKFSRSADAPAYQQGQNQLYNELNLGRREEYDVLDKRRGRDPEMGGKPRRKNPQEGLYNELQKDKMAEAYSEIGMKGERRRGKGHDGLYQGLSTATKDTYDALHMQALPPRSSGSGEGRGSLLTCGDVEENPGPHMTEYKPTVRLATRDDVPRAVRTLAAAFADYPATRHTVDPDRHIERVTELQELFLTRVGLDIGKVWVADDGAAVAVWTTPESVEAGAVFAEIGPRMAELSGSRLAAQQQMEGLLAPHRPKEPAWFLATVGVSPDHQGKGLGSAVVLPGVEAAERAGVPAFLETSAPRNLPFYERLGFTVTADVEVPEGPRTWCMTRKPGA

SEQ ID NO: 19619 - protein, 500 aa, Artificial Sequence
  Synthetic Polypeptide
MALPVTALLLPLALLLHAARPEIVLTQSPGTLSLSPGERATLSCRASQSVSSDYLAWYQQKPGQAPRLLIYGASSRATGIPDRFSGSGSGTDFTLTISRLPEDFAVYYCQQYVSYWTFGGGTKVEIKRTVAAGGGGSGGGGSGGGGSQVQLVESGGGVVQPGRSLRLSCAASGFTFSSYAMHWVRQAPGKGLEWVAVISYDGSNKYYADSVKGRFTISRDNSKNTLYLQMNSLRAEDTAVYYCAKEAPYYAKDYMDVWGKGTTVTVSSTREQKLISEEDLKIEVMYPPPYLDNEKSNGTIIHVKGKHLCPSPLFPGPSKPFWVLVVVGGVLACYSLLVTVAFIIFWVRSKRSRLLHSDYMNMTPRRPGPTRKHYQPYAPPRDFAAYRSRVKFSRSADAPAYQQGQNQLYNELNLGRREEYDVLDKRRGRDPEMGGKPRRKNPQEGLYNELQKDKMAEAYSEIGMKGERRRGKGHDGLYQGLSTATKDTYDALHMQALPPR

SEQ ID NO: 19620 - protein, 506 aa, Artificial Sequence
  Synthetic Polypeptide
MALPVTALLLPLALLLHAARPEIVLTQSPGTLSLSPGERATLSCRASQSVSSDYLAWYQQKPGQAPRLLIYGASSRATGIPDRFSGSGSGTDFTLTISRLPEDFAVYYCQQYVSYWTFGGGTKVEIKRTVAAGGGGSGGGGSGGGGSQVQLVESGGGVVQPGRSLRLSCAASGFTFSSYAMHWVRQAPGKGLEWVAVISYDGSNKYYADSVKGRFTISRDNSKNTLYLQMNSLRAEDTAVYYCAKEAPYYAKDYMDVWGKGTTVTVSSTREQKLISEEDLAKPTTTPAPRPPTPAPTIASQPLSLRPEACRPAAGGAVHTRGLDFACDIYIWAPLAGTCGVLLLSLVITLYCKRGRKKLLYIFKQPFMRPVQTTQEEDGCSCRFPEEEEGGCELRVKFSRSADAPAYQQGQNQLYNELNLGRREEYDVLDKRRGRDPEMGGKPRRKNPQEGLYNELQKDKMAEAYSEIGMKGERRRGKGHDGLYQGLSTATKDTYDALHMQALPPR

SEQ ID NO: 19621 - protein, 506 aa, Artificial Sequence
  Synthetic Polypeptide
MALPVTALLLPLALLLHAARPQVQLVESGGGVVQPGRSLRLSCAASGFTFSSYAMHWVRQAPGKGLEWVAVISYDGSNKYYADSVKGRFTISRDNSKNTLYLQMNSLRAEDTAVYYCAKEAPYYAKDYMDVWGKGTTVTVSSGGGGSGGGGSGGGGSEIVLTQSPGTLSLSPGERATLSCRASQSVSSDYLAWYQQKPGQAPRLLIYGASSRATGIPDRFSGSGSGTDFTLTISRLPEDFAVYYCQQYVSYWTFGGGTKVEIKRTVAATREQKLISEEDLAKPTTTPAPRPPTPAPTIASQPLSLRPEACRPAAGGAVHTRGLDFACDIYIWAPLAGTCGVLLLSLVITLYCKRGRKKLLYIFKQPFMRPVQTTQEEDGCSCRFPEEEEGGCELRVKFSRSADAPAYQQGQNQLYNELNLGRREEYDVLDKRRGRDPEMGGKPRRKNPQEGLYNELQKDKMAEAYSEIGMKGERRRGKGHDGLYQGLSTATKDTYDALHMQALPPR

SEQ ID NO: 19622 - protein, 919 aa, Artificial Sequence
  Synthetic Polypeptide
MALPVTALLLPLALLLHAARPEIVLTQSPGTLSLSPGERATLSCRASQSVSSDYLAWYQQKPGQAPRLLIYGASSRATGIPDRFSGSGSGTDFTLTISRLPEDFAVYYCQQYVSYWTFGGGTKVEIKRTVAAGGGGSGGGGSGGGGSQVQLVESGGGVVQPGRSLRLSCAASGFTFSSYAMHWVRQAPGKGLEWVAVISYDGSNKYYADSVKGRFTISRDNSKNTLYLQMNSLRAEDTAVYYCAKEAPYYAKDYMDVWGKGTTVTVSSTREQKLISEEDLAKPTTTPAPRPPTPAPTIASQPLSLRPEACRPAAGGAVHTRGLDFACDIYIWAPLAGTCGVLLLSLVITLYCGRARVKFSRSADAPAYQQGQNQLYNELNLGRREEYDVLDKRRGRDPEMGGKPRRKNPQEGLYNELQKDKMAEAYSEIGMKGERRRGKGHDGLYQGLSTATKDTYDALHMQALPPRSRGSGATNFSLLKQAGDVEENPGPGIHMATYEVLCEVARKLGTDDREVVLFLLNVFIPQPTLAQLIGALRALKEEGRLTFPLLAECLFRAGRRDLLRDLLHLDPRFLERHLAGTMSYFSPYQLTVLHVDGELCARDIRSLIFLSKDTIGSRSTPQTFLHWVYCMENLDLLGPTDVDALMSMLRSLSRVDLQRQVQTLMGLHLSGPSHSQHYRHTPLETDFYDYKDDDDKTSGSGEGRGSLLTCGDVEENPGPHMTEYKPTVRLATRDDVPRAVRTLAAAFADYPATRHTVDPDRHIERVTELQELFLTRVGLDIGKVWVADDGAAVAVWTTPESVEAGAVFAEIGPRMAELSGSRLAAQQQMEGLLAPHRPKEPAWFLATVGVSPDHQGKGLGSAVVLPGVEAAERAGVPAFLETSAPRNLPFYERLGFTVTADVEVPEGPRTWCMTRKPGA

SEQ ID NO: 19623 - protein, 859 aa, Artificial Sequence
  Synthetic Polypeptide
MALPVTALLLPLALLLHAARPEIVLTQSPGTLSLSPGERATLSCRASQSVSSDYLAWYQQKPGQAPRLLIYGASSRATGIPDRFSGSGSGTDFTLTISRLPEDFAVYYCQQYVSYWTFGGGTKVEIKRTVAALEIQNPDPAVYQLRDSKSSDKSVCLFTDFDSQTNVSQSKDSDVYITDKCVLDMRSMDFKSNSAVAWSNKSDFACANAFNNSIIPEDTFFPSSDVPCDVKLVEKSFETDTNLNFQNLSVIGFRILLLKVAGFNLLMTLRLWSSRAKRSGSGVKQTLNFDLLKLAGDVESNPGPTSMDWIWRILFLVGAATGAHSFEQVQLVESGGGVVQPGRSLRLSCAASGFTFSSYAMHWVRQAPGKGLEWVAVISYDGSNKYYADSVKGRFTISRDNSKNTLYLQMNSLRAEDTAVYYCAKEAPYYAKDYMDVWGKGTTVTVSSTREDLKNVFPPEVAVFEPSKAEIAHTQKATLVCLATGFYPDHVELSWWVNGKEVHSGVCTDPQPLKEQPALNDSRYCLSSRLRVSATFWQNPRNHFRCQVQFYGLSENDEWTQDRAKPVTQIVSAEAWGRADCGITSASYHQGVLSATILYEILLGKATLYAVLVSALVLMAMVKRKDSRGRAKRSGSGATNFSLLKQAGDVEENPGPSRGHMTEYKPTVRLATRDDVPRAVRTLAAAFADYPATRHTVDPDRHIERVTELQELFLTRVGLDIGKVWVADDGAAVAVWTTPESVEAGAVFAEIGPRMAELSGSRLAAQQQMEGLLAPHRPKEPAWFLATVGVSPDHQGKGLGSAVVLPGVEAAERAGVPAFLETSAPRNLPFYERLGFTVTADVEVPEGPRTWCMTRKPGA

SEQ ID NO: 19624 - protein, 858 aa, Artificial Sequence
  Synthetic Polypeptide
MALPVTALLLPLALLLHAARPEIVLTQSPGTLSLSPGERATLSCRASQSVSSDYLAWYQQKPGQAPRLLIYGASSRATGIPDRFSGSGSGTDFTLTISRLPEDFAVYYCQQYVSYWTFGGGTKVEIKRTVAALEDLKNVFPPEVAVFEPSKAEIAHTQKATLVCLATGFYPDHVELSWWVNGKEVHSGVCTDPQPLKEQPALNDSRYCLSSRLRVSATFWQNPRNHFRCQVQFYGLSENDEWTQDRAKPVTQIVSAEAWGRADCGITSASYHQGVLSATILYEILLGKATLYAVLVSALVLMAMVKRKDSRGRAKRSGSGATNFSLLKQAGDVEENPGPTSMDWIWRILFLVGAATGAHSFEQVQLVESGGGVVQPGRSLRLSCAASGFTFSSYAMHWVRQAPGKGLEWVAVISYDGSNKYYADSVKGRFTISRDNSKNTLYLQMNSLRAEDTAVYYCAKEAPYYAKDYMDVWGKGTTVTVSSTRIQNPDPAVYQLRDSKSSDKSVCLFTDFDSQTNVSQSKDSDVYITDKCVLDMRSMDFKSNSAVAWSNKSDFACANAFNNSIIPEDTFFPSSDVPCDVKLVEKSFETDTNLNFQNLSVIGFRILLLKVAGFNLLMTLRLWSSRAKRSGSGVKQTLNFDLLKLAGDVESNPGPSRGHMTEYKPTVRLATRDDVPRAVRTLAAAFADYPATRHTVDPDRHIERVTELQELFLTRVGLDIGKVWVADDGAAVAVWTTPESVEAGAVFAEIGPRMAELSGSRLAAQQQMEGLLAPHRPKEPAWFLATVGVSPDHQGKGLGSAVVLPGVEAAERAGVPAFLETSAPRNLPFYERLGFTVTADVEVPEGPRTWCMTRKPGA

SEQ ID NO: 19625 - protein, 625 aa, Artificial Sequence
  Synthetic Polypeptide
MALPVTALLLPLALLLHAARPEIVLTQSPGTLSLSPGERATLSCRASQSVSSDYLAWYQQKPGQAPRLLIYGASSRATGIPDRFSGSGSGTDFTLTISRLPEDFAVYYCQQYVSYWTFGGGTKVEIKRTVAALEDLKNVFPPEVAVFEPSEAEISHTQKATLVCLATGFYPDHVELSWWVNGKEVHSGVCTDPQPLKEQPALNDSRYCLSSRLRVSATFWQNPRNHFRCQVQFYGLSENDEWTQDRAKPVTQIVSAEAWGRADCGFTSESYQQGVLSATILYEILLGKATLYAVLVSALVLMAMVKRKDSRGRAKRSGSGATNFSLLKQAGDVEENPGPTSMDWIWRILFLVGAATGAHSFEQVQLVESGGGVVQPGRSLRLSCAASGFTFSSYAMHWVRQAPGKGLEWVAVISYDGSNKYYADSVKGRFTISRDNSKNTLYLQMNSLRAEDTAVYYCAKEAPYYAKDYMDVWGKGTTVTVSSTRIQNPDPAVYQLRDSKSSDKSVCLFTDFDSQTNVSQSKDSDVYITDKCVLDMRSMDFKSNSAVAWSNKSDFACANAFNNSIIPEDTFFPSPESSCDVKLVEKSFETDTNLNFQNLSVIGFRILLLKVAGFNLLMTLRLWSS

SEQ ID NO: 19626 - protein, 850 aa, Artificial Sequence
  Synthetic Polypeptide
MALPVTALLLPLALLLHAARPEIVLTQSPGTLSLSPGERATLSCRASQSVSSDYLAWYQQKPGQAPRLLIYGASSRATGIPDRFSGSGSGTDFTLTISRLPEDFAVYYCQQYVSYWTFGGGTKVEIKRTVAALEDLKNVFPPEVAVFEPSEAEISHTQKATLVCLATGFYPDHVELSWWVNGKEVHSGVCTDPQPLKEQPALNDSRYCLSSRLRVSATFWQNPRNHFRCQVQFYGLSENDEWTQDRAKPVTQIVSAEAWGRADCGFTSESYQQGVLSATILYEILLGKATLYAVLVSALVLMAMVKRKDSRGRAKRSGSGATNFSLLKQAGDVEENPGPTSMDWIWRILFLVGAATGAHSFEQVQLVESGGGVVQPGRSLRLSCAASGFTFSSYAMHWVRQAPGKGLEWVAVISYDGSNKYYADSVKGRFTISRDNSKNTLYLQMNSLRAEDTAVYYCAKEAPYYAKDYMDVWGKGTTVTVSSTRIQNPDPAVYQLRDSKSSDKSVCLFTDFDSQTNVSQSKDSDVYITDKCVLDMRSMDFKSNSAVAWSNKSDFACANAFNNSIIPEDTFFPSPESSCDVKLVEKSFETDTNLNFQNLSVIGFRILLLKVAGFNLLMTLRLWSSRAKRSGSGVKQTLNFDLLKLAGDVESNPGPSRGGIHTMATYEVLCEVARKLGTDDREVVLFLLNVFIPQPTLAQLIGALRALKEEGRLTFPLLAECLFRAGRRDLLRDLLHLDPRFLERHLAGTMSYFSPYQLTVLHVDGELCARDIRSLIFLSKDTIGSRSTPQTFLHWVYCMENLDLLGPTDVDALMSMLRSLSRVDLQRQVQTLMGLHLSGPSHSQHYRHTP

SEQ ID NO: 19627 - protein, 629 aa, Artificial Sequence
  Synthetic Polypeptide
MALPVTALLLPLALLLHAARPEIVLTQSPGTLSLSPGERATLSCRASQSVSSDYLAWYQQKPGQAPRLLIYGASSRATGIPDRFSGSGSGTDFTLTISRLPEDFAVYYCQQYVSYWTFGGGTKVEIKRTVAALEIQNPDPAVYQLRDSKSSDKSVCLFTDFDSQTNVSQSKDSDVYITDKCVLDMRSMDFKSNSAVAWSNKSDFACANAFNNSIIPEDTFFPSPESSCDVKLVEKSFETDTNLNFQNLSVIGFRILLLKVAGFNLLMTLRLWSSRAKRSGSGVKQTLNFDLLKLAGDVESNPGPTSMDWIWRILFLVGAATGAHSFEQVQLVESGGGVVQPGRSLRLSCAASGFTFSSYAMHWVRQAPGKGLEWVAVISYDGSNKYYADSVKGRFTISRDNSKNTLYLQMNSLRAEDTAVYYCAKEAPYYAKDYMDVWGKGTTVTVSSTREDLKNVFPPEVAVFEPSEAEISHTQKATLVCLATGFYPDHVELSWWVNGKEVHSGVCTDPQPLKEQPALNDSRYCLSSRLRVSATFWQNPRNHFRCQVQFYGLSENDEWTQDRAKPVTQIVSAEAWGRADCGFTSESYQQGVLSATILYEILLGKATLYAVLVSALVLMAMVKRKDSRG

SEQ ID NO: 19628 - protein, 851 aa, Artificial Sequence
  Synthetic Polypeptide
MALPVTALLLPLALLLHAARPEIVLTQSPGTLSLSPGERATLSCRASQSVSSDYLAWYQQKPGQAPRLLIYGASSRATGIPDRFSGSGSGTDFTLTISRLPEDFAVYYCQQYVSYWTFGGGTKVEIKRTVAALEIQNPDPAVYQLRDSKSSDKSVCLFTDFDSQTNVSQSKDSDVYITDKCVLDMRSMDFKSNSAVAWSNKSDFACANAFNNSIIPEDTFFPSPESSCDVKLVEKSFETDTNLNFQNLSVIGFRILLLKVAGFNLLMTLRLWSSRAKRSGSGVKQTLNFDLLKLAGDVESNPGPTSMDWIWRILFLVGAATGAHSFEQVQLVESGGGVVQPGRSLRLSCAASGFTFSSYAMHWVRQAPGKGLEWVAVISYDGSNKYYADSVKGRFTISRDNSKNTLYLQMNSLRAEDTAVYYCAKEAPYYAKDYMDVWGKGTTVTVSSTREDLKNVFPPEVAVFEPSEAEISHTQKATLVCLATGFYPDHVELSWWVNGKEVHSGVCTDPQPLKEQPALNDSRYCLSSRLRVSATFWQNPRNHFRCQVQFYGLSENDEWTQDRAKPVTQIVSAEAWGRADCGFTSESYQQGVLSATILYEILLGKATLYAVLVSALVLMAMVKRKDSRGRAKRSGSGATNFSLLKQAGDVEENPGPSRGGIHTMATYEVLCEVARKLGTDDREVVLFLLNVFIPQPTLAQLIGALRALKEEGRLTFPLLAECLFRAGRRDLLRDLLHLDPRFLERHLAGTMSYFSPYQLTVLHVDGELCARDIRSLIFLSKDTIGSRSTPQTFLHWVYCMENLDLLGPTDVDALMSMLRSLSRVDLQRQVQTLMGLHLSGPSHSQHYRHTP

SEQ ID NO: 19629 - protein, 903 aa, Artificial Sequence
  Synthetic Polypeptide
MALPVTALLLPLALLLHAARPLEGKPIPNPLLGLDSTGSGEDLKNVFPPEVAVFEPSKAEIAHTQKATLVCLATGFYPDHVELSWWVNGKEVHSGVCTDPQPLKEQPALNDSRYCLSSRLRVSATFWQNPRNHFRCQVQFYGLSENDEWTQDRAKPVTQIVSAEAWGRADCGITSASYHQGVLSATILYEILLGKATLYAVLVSALVLMAMVKRKDSRGRAKRSGSGATNFSLLKQAGDVEENPGPTSMALPVTALLLPLALLLHAARPEIVLTQSPGTLSLSPGERATLSCRASQSVSSDYLAWYQQKPGQAPRLLIYGASSRATGIPDRFSGSGSGTDFTLTISRLPEDFAVYYCQQYVSYWTFGGGTKVEIKRTVAAGGGGSGGGGSGGGGSQVQLVESGGGVVQPGRSLRLSCAASGFTFSSYAMHWVRQAPGKGLEWVAVISYDGSNKYYADSVKGRFTISRDNSKNTLYLQMNSLRAEDTAVYYCAKEAPYYAKDYMDVWGKGTTVTVSSTREQKLISEEDGSGIQNPDPAVYQLRDSKSSDKSVCLFTDFDSQTNVSQSKDSDVYITDKCVLDMRSMDFKSNSAVAWSNKSDFACANAFNNSIIPEDTFFPSSDVPCDVKLVEKSFETDTNLNFQNLSVIGFRILLLKVAGFNLLMTLRLWSSRAKRSGSGVKQTLNFDLLKLAGDVESNPGPSRGHMTEYKPTVRLATRDDVPRAVRTLAAAFADYPATRHTVDPDRHIERVTELQELFLTRVGLDIGKVWVADDGAAVAVWTTPESVEAGAVFAEIGPRMAELSGSRLAAQQQMEGLLAPHRPKEPAWFLATVGVSPDHQGKGLGSAVVLPGVEAAERAGVPAFLETSAPRNLPFYERLGFTVTADVEVPEGPRTWCMTRKPGA

SEQ ID NO: 19630 - protein, 904 aa, Artificial Sequence
  Synthetic Polypeptide
MALPVTALLLPLALLLHAARPLEQKLISEEDLGSGDRPDPAVYQLRDSKSSDKSVCLFTDFDSQTNVSQSKDSDVYITDKCVLDMRSMDFKSNSAVAWSNKSDFACANAFNNSIIPEDTFFPSPESSCDVKLVEKSFETDTNLNFQNLSVIGFRILLLKVAGFNLLMTLRLWSSSSRAKRSGSGVKQTLNFDLLKLAGDVESNPGPTSMALPVTALLLPLALLLHAARPEIVLTQSPGTLSLSPGERATLSCRASQSVSSDYLAWYQQKPGQAPRLLIYGASSRATGIPDRFSGSGSGTDFTLTISRLPEDFAVYYCQQYVSYWTFGGGTKVEIKRTVAAGGGGSGGGGSGGGGSQVQLVESGGGVVQPGRSLRLSCAASGFTFSSYAMHWVRQAPGKGLEWVAVISYDGSNKYYADSVKGRFTISRDNSKNTLYLQMNSLRAEDTAVYYCAKEAPYYAKDYMDVWGKGTTVTVSSTRGKPIPNPLLGLDSTGSGEDLKNVFPPEVAVFEPSEAEISHTQKATLVCLATGFYPDHVELSWWVNGKEVHSGVCTDPQPLKEQPALNDSRYCLSSRLRVSATFWQNPRNHFRCQVQFYGLSENDEWTQDRAKPVTQIVSAEAWGRADCGFTSESYQQGVLSATILYEILLGKATLYAVLVSALVLMAMVKRKDSRGRAKRSGSGATNFSLLKQAGDVEENPGPSRGHMTEYKPTVRLATRDDVPRAVRTLAAAFADYPATRHTVDPDRHIERVTELQELFLTRVGLDIGKVWVADDGAAVAVWTTPESVEAGAVFAEIGPRMAELSGSRLAAQQQMEGLLAPHRPKEPAWFLATVGVSPDHQGKGLGSAVVLPGVEAAERAGVPAFLETSAPRNLPFYERLGFTVTADVEVPEGPRTWCMTRKPGA

SEQ ID NO: 19631 - protein, 858 aa, Artificial Sequence
  Synthetic Polypeptide
MALPVTALLLPLALLLHAARPEIVLTQSPGTLSLSPGERATLSCRASQSVSSDYLAWYQQKPGQAPRLLIYGASSRATGIPDRFSGSGSGTDFTLTISRLPEDFAVYYCQQYVSYWTFGGGTKVEIKRTVAALEDLKNVFPPEVAVFEPSEAEISHTQKATLVCLATGFYPDHVELSWWVNGKEVHSGVSTDPQPLKEQPALNDSRYCLSSRLRVSATFWQNPRNHFRCQVQFYGLSENDEWTQDRAKPVTQIVSAEAWGRADCGFTSESYQQGVLSATILYEILLGKATLYAVLVSALVLMAMVKRKDSRGRAKRSGSGATNFSLLKQAGDVEENPGPTSMDWIWRILFLVGAATGAHSFEQVQLVESGGGVVQPGRSLRLSCAASGFTFSSYAMHWVRQAPGKGLEWVAVISYDGSNKYYADSVKGRFTISRDNSKNTLYLQMNSLRAEDTAVYYCAKEAPYYAKDYMDVWGKGTTVTVSSTRIQNPDPAVYQLRDSKSSDKSVCLFTDFDSQTNVSQSKDSDVYITDKTVLDMRSMDFKSNSAVAWSNKSDFACANAFNNSIIPEDTFFPSPESSCDVKLVEKSFETDTNLNFQNLSVIGFRILLLKVAGFNLLMTLRLWSSRAKRSGSGVKQTLNFDLLKLAGDVESNPGPSRGHMTEYKPTVRLATRDDVPRAVRTLAAAFADYPATRHTVDPDRHIERVTELQELFLTRVGLDIGKVWVADDGAAVAVWTTPESVEAGAVFAEIGPRMAELSGSRLAAQQQMEGLLAPHRPKEPAWFLATVGVSPDHQGKGLGSAVVLPGVEAAERAGVPAFLETSAPRNLPFYERLGFTVTADVEVPEGPRTWCMTRKPGA

SEQ ID NO: 19632 - protein, 940 aa, Artificial Sequence
  Synthetic Polypeptide
MALPVTALLLPLALLLHAARPEIVLTQSPGTLSLSPGERATLSCRASQSVSSDYLAWYQQKPGQAPRLLIYGASSRATGIPDRFSGSGSGTDFTLTISRLPEDFAVYYCQQYVSYWTFGGGTKVEIKRTVAALEDLKNVFPPEVAVFEPSEAEISHTQKATLVCLATGFYPDHVELSWWVNGKEVHSGVSTDPQPLKEQPALNDSRYCLSSRLRVSATFWQNPRNHFRCQVQFYGLSENDEWTQDRAKPVTQIVSAEAWGRADCGFTSESYQQGVLSATILYEILLGKATLYAVLVSALVLMAMVKRKDSRGRAKRSGSGATNFSLLKQAGDVEENPGPTSMDWIWRILFLVGAATGAHSFEQVQLVESGGGVVQPGRSLRLSCAASGFTFSSYAMHWVRQAPGKGLEWVAVISYDGSNKYYADSVKGRFTISRDNSKNTLYLQMNSLRAEDTAVYYCAKEAPYYAKDYMDVWGKGTTVTVSSTREQKLISEEDGSGTPFPSLAPPIMLLVDGKQQMVVVCLVLDVAPPGLDSPIWFSAGNGSALDAFTYGPSPATDGTWTNLAHLSLPSEELASWEPLVCHTGPGAEGHSRSTQPMHLSGEASTARTCPQEPLRGTPGGALWLGVLRLLLFKLLLFDLLLTCSCLCDPAGPLPSPATTTRLRALGSHRLHPATETGGREATSSPRPQPRDRRWGDTPPGRKPGSPVRAKRSGSGVKQTLNFDLLKLAGDVESNPGPSRGHMTEYKPTVRLATRDDVPRAVRTLAAAFADYPATRHTVDPDRHIERVTELQELFLTRVGLDIGKVWVADDGAAVAVWTTPESVEAGAVFAEIGPRMAELSGSRLAAQQQMEGLLAPHRPKEPAWFLATVGVSPDHQGKGLGSAVVLPGVEAAERAGVPAFLETSAPRNLPFYERLGFTVTADVEVPEGPRTWCMTRKPGA

SEQ ID NO: 19633 - protein, 958 aa, Artificial Sequence
  Synthetic Polypeptide
MALPVTALLLPLALLLHAARPLEDLKNVFPPEVAVFEPSEAEISHTQKATLVCLATGFYPDHVELSWWVNGKEVHSGVSTDPQPLKEQPALNDSRYCLSSRLRVSATFWQNPRNHFRCQVQFYGLSENDEWTQDRAKPVTQIVSAEAWGRADCGFTSESYQQGVLSATILYEILLGKATLYAVLVSALVLMAMVKRKDSRGRAKRSGSGATNFSLLKQAGDVEENPGPTSMALPVTALLLPLALLLHAARPEIVLTQSPGTLSLSPGERATLSCRASQSVSSDYLAWYQQKPGQAPRLLIYGASSRATGIPDRFSGSGSGTDFTLTISRLPEDFAVYYCQQYVSYWTFGGGTKVEIKRTVAAGGGGSGGGGSGGGGSQVQLVESGGGVVQPGRSLRLSCAASGFTFSSYAMHWVRQAPGKGLEWVAVISYDGSNKYYADSVKGRFTISRDNSKNTLYLQMNSLRAEDTAVYYCAKEAPYYAKDYMDVWGKGTTVTVSSTREQKLISEEDLGSGTPFPSLAPPIMLLVDGKQQMVVVCLVLDVAPPGLDSPIWFSAGNGSALDAFTYGPSPATDGTWTNLAHLSLPSEELASWEPLVCHTGPGAEGHSRSTQPMHLSGEASTARTCPQEPLRGTPGGALWLGVLRLLLFKLLLFDLLLTCSCLCDPAGPLPSPATTTRLRALGSHRLHPATETGGREATSSPRPQPRDRRWGDTPPGRKPGSPVRAKRSGSGVKQTLNFDLLKLAGDVESNPGPSRSRGHMTEYKPTVRLATRDDVPRAVRTLAAAFADYPATRHTVDPDRHIERVTELQELFLTRVGLDIGKVWVADDGAAVAVWTTPESVEAGAVFAEIGPRMAELSGSRLAAQQQMEGLLAPHRPKEPAWFLATVGVSPDHQGKGLGSAVVLPGVEAAERAGVPAFLETSAPRNLPFYERLGFTVTADVEVPEGPRTWCMTRKPGA

SEQ ID NO: 19634 - protein, 895 aa, Artificial Sequence
  Synthetic Polypeptide
MALPVTALLLPLALLLHAARPEIVLTQSPGTLSLSPGERATLSCRASQSVSSDYLAWYQQKPGQAPRLLIYGASSRATGIPDRFSGSGSGTDFTLTISRLPEDFAVYYCQQYVSYWTFGGGTKVEIKRTVAALEGKPIPNPLLGLDSTGSGDKQLDADVSPKPTIFLPSIAETKLQKAGTYLCLLEKFFPDVIKIHWQEKKSNTILGSQEGNTMKTNDTYMKFSWLTVPEKSLDKEHRCIVRHENNKNGVDQEIIFPPIKTDVITMDPKDNCSKDANDTLLLQLTNTSAYYMYLLLLLKSVVYFAIITCCLLRRTAFCCNGEKSRAKRSGSGATNFSLLKQAGDVEENPGPTSMDWIWRILFLVGAATGAHSFEQVQLVESGGGVVQPGRSLRLSCAASGFTFSSYAMHWVRQAPGKGLEWVAVISYDGSNKYYADSVKGRFTISRDNSKNTLYLQMNSLRAEDTAVYYCAKEAPYYAKDYMDVWGKGTTVTVSSTREQKLISEEDGSGSQPHTKPSVFVMKNGTNVACLVKEFYPKDIRINLVSSKKITEFDPAIVISPSGKYNAVKLGKYEDSNSVTCSVQHDNKTVHSTDFEVKTDSTDHVKPKETENTKQPSKSCHKPKAIVHTEKVNMMSLTVLGLRMLFAKTVAVNFLLTAKLFFLRAKRSGSGVKQTLNFDLLKLAGDVESNPGPSRGHMTEYKPTVRLATRDDVPRAVRTLAAAFADYPATRHTVDPDRHIERVTELQELFLTRVGLDIGKVWVADDGAAVAVWTTPESVEAGAVFAEIGPRMAELSGSRLAAQQQMEGLLAPHRPKEPAWFLATVGVSPDHQGKGLGSAVVLPGVEAAERAGVPAFLETSAPRNLPFYERLGFTVTADVEVPEGPRTWCMTRKPGA

SEQ ID NO: 19635 - protein, 633 aa, Artificial Sequence
  Synthetic Polypeptide
MALPVTALLLPLALLLHAARPEIVLTQSPGTLSLSPGERATLSCRASQSVSSDYLAWYQQKPGQAPRLLIYGASSRATGIPDRFSGSGSGTDFTLTISRLPEDFAVYYCQQYVSYWTFGGGTKVEIKRTVAALESQPHTKPSVFVMKNGTNVACLVKEFYPKDIRINLVSSKKITEFDPAIVISPSGKYNAVKLGKYEDSNSVTCSVQHDNKTVHSTDFEVKTDSTDHVKPKETENTKQPSKSCHKPKAIVHTEKVNMMSLTVLGLRMLFAKTVAVNFLLTAKLFFLRAKRSGSGATNFSLLKQAGDVEENPGPTSMDWIWRILFLVGAATGAHSFEQVQLVESGGGVVQPGRSLRLSCAASGFTFSSYAMHWVRQAPGKGLEWVAVISYDGSNKYYADSVKGRFTISRDNSKNTLYLQMNSLRAEDTAVYYCAKEAPYYAKDYMDVWGKGTTVTVSSTRDKQLDADVSPKPTIFLPSIAETKLQKAGTYLCLLEKFFPDVIKIHWQEKKSNTILGSQEGNTMKTNDTYMKFSWLTVPEKSLDKEHRCIVRHENNKNGVDQEIIFPPIKTDVITMDPKDNCSKDANDTLLLQLTNTSAYYMYLLLLLKSVVYFAIITCCLLRRTAFCCNGEKS

SEQ ID NO: 19636 - protein, 910 aa, Artificial Sequence
  Synthetic Polypeptide
MALPVTALLLPLALLLHAARPLEGKPIPNPLLGLDSTGSGDKQLDADVSPKPTIFLPSIAETKLQKAGTYLCLLEKFFPDVIKIHWQEKKSNTILGSQEGNTMKTNDTYMKFSWLTVPEKSLDKEHRCIVRHENNKNGVDQEIIFPPIKTDVITMDPKDNCSKDANDTLLLQLTNTSAYYMYLLLLLKSVVYFAIITCCLLRRTAFCCNGEKSRAKRSGSGATNFSLLKQAGDVEENPGPTSMALPVTALLLPLALLLHAARPEIVLTQSPGTLSLSPGERATLSCRASQSVSSDYLAWYQQKPGQAPRLLIYGASSRATGIPDRFSGSGSGTDFTLTISRLPEDFAVYYCQQYVSYWTFGGGTKVEIKRTVAAGGGGSGGGGSGGGGSQVQLVESGGGVVQPGRSLRLSCAASGFTFSSYAMHWVRQAPGKGLEWVAVISYDGSNKYYADSVKGRFTISRDNSKNTLYLQMNSLRAEDTAVYYCAKEAPYYAKDYMDVWGKGTTVTVSSTREQKLISEEDGSGSQPHTKPSVFVMKNGTNVACLVKEFYPKDIRINLVSSKKITEFDPAIVISPSGKYNAVKLGKYEDSNSVTCSVQHDNKTVHSTDFEVKTDSTDHVKPKETENTKQPSKSCHKPKAIVHTEKVNMMSLTVLGLRMLFAKTVAVNFLLTAKLFFLRAKRSGSGVKQTLNFDLLKLAGDVESNPGPSRGHMTEYKPTVRLATRDDVPRAVRTLAAAFADYPATRHTVDPDRHIERVTELQELFLTRVGLDIGKVWVADDGAAVAVWTTPESVEAGAVFAEIGPRMAELSGSRLAAQQQMEGLLAPHRPKEPAWFLATVGVSPDHQGKGLGSAVVLPGVEAAERAGVPAFLETSAPRNLPFYERLGFTVTADVEVPEGPRTWCMTRKPGA

SEQ ID NO: 19637 - protein, 1035 aa, Artificial Sequence
  Synthetic Polypeptide
MALPVTALLLPLALLLHAARPEIVLTQSPGTLSLSPGERATLSCRASQSVSSDYLAWYQQKPGQAPRLLIYGASSRATGIPDRFSGSGSGTDFTLTISRLPEDFAVYYCQQYVSYWTFGGGTKVEIKRTVAAGQPKANPTVTLFPPSSEELQANKATLVCLISDFYPGAVTVAWKADGSPVKAGVETTKPSKQSNNKYAASSYLSLTPEQWKSHRSYSCQVTHEGSTVEKTVAPTECSGSQSFGLLDPKLCYLLDGILFIYGVILTALFLRVKFSRSADAPAYQQGQNQLYNELNLGRREEYDVLDKRRGRDPEMGGKPQRRKNPQEGLYNELQKDKMAEAYSEIGMKGERRRGKGHDGLYQGLSTATKDTYDALHMQALPPRRAKRSGSGATNFSLLKQAGDVEENPGPTSMDWIWRILFLVGAATGAHSFEQVQLVESGGGVVQPGRSLRLSCAASGFTFSSYAMHWVRQAPGKGLEWVAVISYDGSNKYYADSVKGRFTISRDNSKNTLYLQMNSLRAEDTAVYYCAKEAPYYAKDYMDVWGKGTTVTVSSASTKGPSVFPLAPSSKSTSGGTAALGCLVKDYFPEPVTVSWNSGALTSGVHTFPAVLQSSGLYSLSSVVTVPSSSLGTQTYICNVNHKPSNTKVDKRVEPKSCGTQSFGLLDPKLCYLLDGILFIYGVILTALFLRVKFSRSADAPAYQQGQNQLYNELNLGRREEYDVLDKRRGRDPEMGGKPQRRKNPQEGLYNELQKDKMAEAYSEIGMKGERRRGKGHDGLYQGLSTATKDTYDALHMQALPPRRAKRSGSGVKQTLNFDLLKLAGDVESNPGPSRGHMTEYKPTVRLATRDDVPRAVRTLAAAFADYPATRHTVDPDRHIERVTELQELFLTRVGLDIGKVWVADDGAAVAVWTTPESVEAGAVFAEIGPRMAELSGSRLAAQQQMEGLLAPHRPKEPAWFLATVGVSPDHQGKGLGSAVVLPGVEAAERAGVPAFLETSAPRNLPFYERLGFTVTADVEVPEGPRTWCMTRKPGA

SEQ ID NO: 19638 - protein, 821 aa, Artificial Sequence
  Synthetic Polypeptide
MALPVTALLLPLALLLHAARPEIVLTQSPGTLSLSPGERATLSCRASQSVSSDYLAWYQQKPGQAPRLLIYGASSRATGIPDRFSGSGSGTDFTLTISRLPEDFAVYYCQQYVSYWTFGGGTKVEIKRTVAALEDLKNVFPPEVAVFEPSEAEISHTQKATLVCLATGFYPDHVELSWWVNGKEVHSGVSTDPQPLKEQPALNDSRYCLSSRLRVSATFWQNPRNHFRCQVQFYGLSENDEWTQDRAKPVTQIVSAEAWGRADCGSQSFGLLDPKLCYLLDGILFIYGVILTALFLRVKFSRSADAPAYQQGQNQLYNELNLGRREEYDVLDKRRGRDPEMGGKPQRRKNPQEGLYNELQKDKMAEAYSEIGMKGERRRGKGHDGLYQGLSTATKDTYDALHMQALPPRRAKRSGSGATNFSLLKQAGDVEENPGPTSMDWIWRILFLVGAATGAHSFEQVQLVESGGGVVQPGRSLRLSCAASGFTFSSYAMHWVRQAPGKGLEWVAVISYDGSNKYYADSVKGRFTISRDNSKNTLYLQMNSLRAEDTAVYYCAKEAPYYAKDYMDVWGKGTTVTVSSTRIQNPDPAVYQLRDSKSSDKSVCLFTDFDSQTNVSQSKDSDVYITDKTVLDMRSMDFKSNSAVAWSNKSDFACANAFNNSIIPEDTFFPSPESSCGTQSFGLLDPKLCYLLDGILFIYGVILTALFLRVKFSRSADAPAYQQGQNQLYNELNLGRREEYDVLDKRRGRDPEMGGKPQRRKNPQEGLYNELQKDKMAEAYSEIGMKGERRRGKGHDGLYQGLSTATKDTYDALHMQALPPR

SEQ ID NO: 19639 - protein, 821 aa, Artificial Sequence
  Synthetic Polypeptide
MALPVTALLLPLALLLHAARPEIVLTQSPGTLSLSPGERATLSCRASQSVSSDYLAWYQQKPGQAPRLLIYGASSRATGIPDRFSGSGSGTDFTLTISRLPEDFAVYYCQQYVSYWTFGGGTKVEIKRTVAALEDLKNVFPPEVAVFEPSKAEIAHTQKATLVCLATGFYPDHVELSWWVNGKEVHSGVCTDPQPLKEQPALNDSRYCLSSRLRVSATFWQNPRNHFRCQVQFYGLSENDEWTQDRAKPVTQIVSAEAWGRADCGSQSFGLLDPKLCYLLDGILFIYGVILTALFLRVKFSRSADAPAYQQGQNQLYNELNLGRREEYDVLDKRRGRDPEMGGKPQRRKNPQEGLYNELQKDKMAEAYSEIGMKGERRRGKGHDGLYQGLSTATKDTYDALHMQALPPRRAKRSGSGATNFSLLKQAGDVEENPGPTSMDWIWRILFLVGAATGAHSFEQVQLVESGGGVVQPGRSLRLSCAASGFTFSSYAMHWVRQAPGKGLEWVAVISYDGSNKYYADSVKGRFTISRDNSKNTLYLQMNSLRAEDTAVYYCAKEAPYYAKDYMDVWGKGTTVTVSSTRIQNPDPAVYQLRDSKSSDKSVCLFTDFDSQTNVSQSKDSDVYITDKCVLDMRSMDFKSNSAVAWSNKSDFACANAFNNSIIPEDTFFPSSDVPCGTQSFGLLDPKLCYLLDGILFIYGVILTALFLRVKFSRSADAPAYQQGQNQLYNELNLGRREEYDVLDKRRGRDPEMGGKPQRRKNPQEGLYNELQKDKMAEAYSEIGMKGERRRGKGHDGLYQGLSTATKDTYDALHMQALPPR

SEQ ID NO: 19640 - protein, 892 aa, Artificial Sequence
  Synthetic Polypeptide
MALPVTALLLPLALLLHAARPEIVLTQSPGTLSLSPGERATLSCRASQSVSSDYLAWYQQKPGQAPRLLIYGASSRATGIPDRFSGSGSGTDFTLTISRLPEDFAVYYCQQYVSYWTFGGGTKVEIKRTVAALEGKPIPNPLLGLDSTGSGEDLKNVFPPEVAVFEPSEAEISHTQKATLVCLATGFYPDHVELSWWVNGKEVHSGVSTDPQPLKEQPALNDSRYCLSSRLRVSATFWQNPRNHFRCQVQFYGLSENDEWTQDRAKPVTQIVSAEAWGRADCGSQSFGLLDPKLCYLLDGILFIYGVILTALFLRVKFSRSADAPAYQQGQNQLYNELNLGRREEYDVLDKRRGRDPEMGGKPQRRKNPQEGLYNELQKDKMAEAYSEIGMKGERRRGKGHDGLYQGLSTATKDTYDALHMQALPPRRAKRSGSGATNFSLLKQAGDVEENPGPTSMDWIWRILFLVGAATGAHSFEQVQLVESGGGVVQPGRSLRLSCAASGFTFSSYAMHWVRQAPGKGLEWVAVISYDGSNKYYADSVKGRFTISRDNSKNTLYLQMNSLRAEDTAVYYCAKEAPYYAKDYMDVWGKGTTVTVSSTREQKLISEEDGSGIQNPDPAVYQLRDSKSSDKSVCLFTDFDSQTNVSQSKDSDVYITDKTVLDMRSMDFKSNSAVAWSNKSDFACANAFNNSIIPEDTFFPSPESSCGTQSFGLLDPKLCYLLDGILFIYGVILTALFLRSKRSRLLHSDYMNMTPRRPGPTRKHYQPYAPPRDFAAYRSRVKFSRSADAPAYQQGQNQLYNELNLGRREEYDVLDKRRGRDPEMGGKPQRRKNPQEGLYNELQKDKMAEAYSEIGMKGERRRGKGHDGLYQGLSTATKDTYDALHMQALPPR

SEQ ID NO: 19641 - protein, 933 aa, Artificial Sequence
  Synthetic Polypeptide
MALPVTALLLPLALLLHAARPEIVLTQSPGTLSLSPGERATLSCRASQSVSSDYLAWYQQKPGQAPRLLIYGASSRATGIPDRFSGSGSGTDFTLTISRLPEDFAVYYCQQYVSYWTFGGGTKVEIKRTVAALEGKPIPNPLLGLDSTGSGEDLKNVFPPEVAVFEPSEAEISHTQKATLVCLATGFYPDHVELSWWVNGKEVHSGVSTDPQPLKEQPALNDSRYCLSSRLRVSATFWQNPRNHFRCQVQFYGLSENDEWTQDRAKPVTQIVSAEAWGRADCGSQSFGLLDPKLCYLLDGILFIYGVILTALFLRSKRSRLLHSDYMNMTPRRPGPTRKHYQPYAPPRDFAAYRSRVKFSRSADAPAYQQGQNQLYNELNLGRREEYDVLDKRRGRDPEMGGKPQRRKNPQEGLYNELQKDKMAEAYSEIGMKGERRRGKGHDGLYQGLSTATKDTYDALHMQALPPRRAKRSGSGATNFSLLKQAGDVEENPGPTSMDWIWRILFLVGAATGAHSFEQVQLVESGGGVVQPGRSLRLSCAASGFTFSSYAMHWVRQAPGKGLEWVAVISYDGSNKYYADSVKGRFTISRDNSKNTLYLQMNSLRAEDTAVYYCAKEAPYYAKDYMDVWGKGTTVTVSSTREQKLISEEDGSGIQNPDPAVYQLRDSKSSDKSVCLFTDFDSQTNVSQSKDSDVYITDKTVLDMRSMDFKSNSAVAWSNKSDFACANAFNNSIIPEDTFFPSPESSCGTQSFGLLDPKLCYLLDGILFIYGVILTALFLRSKRSRLLHSDYMNMTPRRPGPTRKHYQPYAPPRDFAAYRSRVKFSRSADAPAYQQGQNQLYNELNLGRREEYDVLDKRRGRDPEMGGKPQRRKNPQEGLYNELQKDKMAEAYSEIGMKGERRRGKGHDGLYQGLSTATKDTYDALHMQALPPR

SEQ ID NO: 19642 - protein, 894 aa, Artificial Sequence
  Synthetic Polypeptide
MALPVTALLLPLALLLHAARPEIVLTQSPGTLSLSPGERATLSCRASQSVSSDYLAWYQQKPGQAPRLLIYGASSRATGIPDRFSGSGSGTDFTLTISRLPEDFAVYYCQQYVSYWTFGGGTKVEIKRTVAALEGKPIPNPLLGLDSTGSGEDLKNVFPPEVAVFEPSEAEISHTQKATLVCLATGFYPDHVELSWWVNGKEVHSGVSTDPQPLKEQPALNDSRYCLSSRLRVSATFWQNPRNHFRCQVQFYGLSENDEWTQDRAKPVTQIVSAEAWGRADCGSQSFGLLDPKLCYLLDGILFIYGVILTALFLRVKFSRSADAPAYQQGQNQLYNELNLGRREEYDVLDKRRGRDPEMGGKPQRRKNPQEGLYNELQKDKMAEAYSEIGMKGERRRGKGHDGLYQGLSTATKDTYDALHMQALPPRRAKRSGSGATNFSLLKQAGDVEENPGPTSMDWIWRILFLVGAATGAHSFEQVQLVESGGGVVQPGRSLRLSCAASGFTFSSYAMHWVRQAPGKGLEWVAVISYDGSNKYYADSVKGRFTISRDNSKNTLYLQMNSLRAEDTAVYYCAKEAPYYAKDYMDVWGKGTTVTVSSTREQKLISEEDLGSGIQNPDPAVYQLRDSKSSDKSVCLFTDFDSQTNVSQSKDSDVYITDKTVLDMRSMDFKSNSAVAWSNKSDFACANAFNNSIIPEDTFFPSPESSCGTQSFGLLDPKLCYLLDGILFIYGVILTALFLKRGRKKLLYIFKQPFMRPVQTTQEEDGCSCRFPEEEEGGCELRVKFSRSADAPAYQQGQNQLYNELNLGRREEYDVLDKRRGRDPEMGGKPQRRKNPQEGLYNELQKDKMAEAYSEIGMKGERRRGKGHDGLYQGLSTATKDTYDALHMQALPPR

SEQ ID NO: 19643 - protein, 936 aa, Artificial Sequence
  Synthetic Polypeptide
MALPVTALLLPLALLLHAARPEIVLTQSPGTLSLSPGERATLSCRASQSVSSDYLAWYQQKPGQAPRLLIYGASSRATGIPDRFSGSGSGTDFTLTISRLPEDFAVYYCQQYVSYWTFGGGTKVEIKRTVAALEGKPIPNPLLGLDSTGSGEDLKNVFPPEVAVFEPSEAEISHTQKATLVCLATGFYPDHVELSWWVNGKEVHSGVSTDPQPLKEQPALNDSRYCLSSRLRVSATFWQNPRNHFRCQVQFYGLSENDEWTQDRAKPVTQIVSAEAWGRADCGSQSFGLLDPKLCYLLDGILFIYGVILTALFLKRGRKKLLYIFKQPFMRPVQTTQEEDGCSCRFPEEEEGGCELRVKFSRSADAPAYQQGQNQLYNELNLGRREEYDVLDKRRGRDPEMGGKPQRRKNPQEGLYNELQKDKMAEAYSEIGMKGERRRGKGHDGLYQGLSTATKDTYDALHMQALPPRRAKRSGSGATNFSLLKQAGDVEENPGPTSMDWIWRILFLVGAATGAHSFEQVQLVESGGGVVQPGRSLRLSCAASGFTFSSYAMHWVRQAPGKGLEWVAVISYDGSNKYYADSVKGRFTISRDNSKNTLYLQMNSLRAEDTAVYYCAKEAPYYAKDYMDVWGKGTTVTVSSTREQKLISEEDLGSGIQNPDPAVYQLRDSKSSDKSVCLFTDFDSQTNVSQSKDSDVYITDKTVLDMRSMDFKSNSAVAWSNKSDFACANAFNNSIIPEDTFFPSPESSCGTQSFGLLDPKLCYLLDGILFIYGVILTALFLKRGRKKLLYIFKQPFMRPVQTTQEEDGCSCRFPEEEEGGCELRVKFSRSADAPAYQQGQNQLYNELNLGRREEYDVLDKRRGRDPEMGGKPQRRKNPQEGLYNELQKDKMAEAYSEIGMKGERRRGKGHDGLYQGLSTATKDTYDALHMQALPPR

SEQ ID NO: 19644 - protein, 826 aa, Artificial Sequence
  Synthetic Polypeptide
MALPVTALLLPLALLLHAARPEIVLTQSPGTLSLSPGERATLSCRASQSVSSDYLAWYQQKPGQAPRLLIYGASSRATGIPDRFSGSGSGTDFTLTISRLPEDFAVYYCQQYVSYWTFGGGTKVEIKRTVAALEQSFGLLDPKLCYLLDGILFIYGVILTALFLRVKFSRSADAPAYQQGQNQLYNELNLGRREEYDVLDKRRGRDPEMGGKPQRRKNPQEGLYNELQKDKMAEAYSEIGMKGERRRGKGHDGLYQGLSTATKDTYDALHMQALPPRRAKRSGSGATNFSLLKQAGDVEENPGPTSMDWIWRILFLVGAATGAHSFEQVQLVESGGGVVQPGRSLRLSCAASGFTFSSYAMHWVRQAPGKGLEWVAVISYDGSNKYYADSVKGRFTISRDNSKNTLYLQMNSLRAEDTAVYYCAKEAPYYAKDYMDVWGKGTTVTVSSTRQSFGLLDPKLCYLLDGILFIYGVILTALFLRVKFSRSADAPAYQQGQNQLYNELNLGRREEYDVLDKRRGRDPEMGGKPQRRKNPQEGLYNELQKDKMAEAYSEIGMKGERRRGKGHDGLYQGLSTATKDTYDALHMQALPPRRAKRSGSGVKQTLNFDLLKLAGDVESNPGPSRGHMTEYKPTVRLATRDDVPRAVRTLAAAFADYPATRHTVDPDRHIERVTELQELFLTRVGLDIGKVWVADDGAAVAVWTTPESVEAGAVFAEIGPRMAELSGSRLAAQQQMEGLLAPHRPKEPAWFLATVGVSPDHQGKGLGSAVVLPGVEAAERAGVPAFLETSAPRNLPFYERLGFTVTADVEVPEGPRTWCMTRKPGA

SEQ ID NO: 19645 - protein, 651 aa, Artificial Sequence
  Synthetic Polypeptide
MALPVTALLLPLALLLHAARPEIVLTQSPGTLSLSPGERATLSCRASQSVSSDYLAWYQQKPGQAPRLLIYGASSRATGIPDRFSGSGSGTDFTLTISRLPEDFAVYYCQQYVSYWTFGGGTKVEIKRTVAALEGQPKANPTVTLFPPSSEELQANKATLVCLISDFYPGAVTVAWKADGSPVKAGVETTKPSKQSNNKYAASSYLSLTPEQWKSHRSYSCQVTHEGSTVEKTVAPTECSPIKTDVITMDPKDNCSKDANDTLLLQLTNTSAYYMYLLLLLKSVVYFAIITCCLLRRTAFCCNGEKSRAKRSGSGATNFSLLKQAGDVEENPGPTSMDWIWRILFLVGAATGAHSFEQVQLVESGGGVVQPGRSLRLSCAASGFTFSSYAMHWVRQAPGKGLEWVAVISYDGSNKYYADSVKGRFTISRDNSKNTLYLQMNSLRAEDTAVYYCAKEAPYYAKDYMDVWGKGTTVTVSSTRASTKGPSVFPLAPSSKSTSGGTAALGCLVKDYFPEPVTVSWNSGALTSGVHTFPAVLQSSGLYSLSSVVTVPSSSLGTQTYICNVNHKPSNTKVDKRVEPKSCEVKTDSTDHVKPKETENTKQPSKSCHKPKAIVHTEKVNMMSLTVLGLRMLFAKTVAVNFLLTAKLFFL

SEQ ID NO: 19646 - protein, 629 aa, Artificial Sequence
  Synthetic Polypeptide
MALPVTALLLPLALLLHAARPEIVLTQSPGTLSLSPGERATLSCRASQSVSSDYLAWYQQKPGQAPRLLIYGASSRATGIPDRFSGSGSGTDFTLTISRLPEDFAVYYCQQYVSYWTFGGGTKVEIKRTVAALEGQPKANPTVTLFPPSSEELQANKATLVCLISDFYPGAVTVAWKADGSPVKAGVETTKPSKQSNNKYAASSYLSLTPEQWKSHRSYSCQVTHEGSTVEKTVAPTECSGRADCGITSASYHQGVLSATILYEILLGKATLYAVLVSALVLMAMVKRKDSRGRAKRSGSGATNFSLLKQAGDVEENPGPTSMDWIWRILFLVGAATGAHSFEQVQLVESGGGVVQPGRSLRLSCAASGFTFSSYAMHWVRQAPGKGLEWVAVISYDGSNKYYADSVKGRFTISRDNSKNTLYLQMNSLRAEDTAVYYCAKEAPYYAKDYMDVWGKGTTVTVSSTRASTKGPSVFPLAPSSKSTSGGTAALGCLVKDYFPEPVTVSWNSGALTSGVHTFPAVLQSSGLYSLSSVVTVPSSSLGTQTYICNVNHKPSNTKVDKRVEPKSCIPEDTFFPSSDVPCDVKLVEKSFETDTNLNFQNLSVIGFRILLLKVAGFNLLMTLRLWSS

SEQ ID NO: 19647 - protein, 629 aa, Artificial Sequence
  Synthetic Polypeptide
MALPVTALLLPLALLLHAARPEIVLTQSPGTLSLSPGERATLSCRASQSVSSDYLAWYQQKPGQAPRLLIYGASSRATGIPDRFSGSGSGTDFTLTISRLPEDFAVYYCQQYVSYWTFGGGTKVEIKRTVAALEGQPKANPTVTLFPPSSEELQANKATLVCLISDFYPGAVTVAWKADGSPVKAGVETTKPSKQSNNKYAASSYLSLTPEQWKSHRSYSCQVTHEGSTVEKTVAPTECSGRADCGFTSESYQQGVLSATILYEILLGKATLYAVLVSALVLMAMVKRKDSRGRAKRSGSGATNFSLLKQAGDVEENPGPTSMDWIWRILFLVGAATGAHSFEQVQLVESGGGVVQPGRSLRLSCAASGFTFSSYAMHWVRQAPGKGLEWVAVISYDGSNKYYADSVKGRFTISRDNSKNTLYLQMNSLRAEDTAVYYCAKEAPYYAKDYMDVWGKGTTVTVSSTRASTKGPSVFPLAPSSKSTSGGTAALGCLVKDYFPEPVTVSWNSGALTSGVHTFPAVLQSSGLYSLSSVVTVPSSSLGTQTYICNVNHKPSNTKVDKRVEPKSCIPEDTFFPSPESSCDVKLVEKSFETDTNLNFQNLSVIGFRILLLKVAGFNLLMTLRLWSS

SEQ ID NO: 19648 - protein, 455 aa, Artificial Sequence
  Synthetic Polypeptide
MALPVTALLLPLALLLHAARPEIVLTQSPGTLSLSPGERATLSCRASQSVSSDYLAWYQQKPGQAPRLLIYGASSRATGIPDRFSGSGSGTDFTLTISRLPEDFAVYYCQQYVSYWTFGGGTKVEIKRTVAAGGGGSGGGGSGGGGSQVQLVESGGGVVQPGRSLRLSCAASGFTFSSYAMHWVRQAPGKGLEWVAVISYDGSNKYYADSVKGRFTISRDNSKNTLYLQMNSLRAEDTAVYYCAKEAPYYAKDYMDVWGKGTTVTVSSTRDGNEEMGGITQTPYKVSISGTTVILTCPQYPGSEILWQHNDKNIGGDEDDKNIGSDEDHLSLKEFSELEQSGYYVCYPRGSKPEDANFYLYLRARVCENCMEMDVMSVATIVIVDICITGGLLLLVYYWSKNRKAKAKPVTRGAGAGGRQRGQNKERPPPVPNPDYEPIRKGQRDLYSGLNQRRI

SEQ ID NO: 19649 - protein, 420 aa, Artificial Sequence
  Synthetic Polypeptide
MALPVTALLLPLALLLHAARPEIVLTQSPGTLSLSPGERATLSCRASQSVSSDYLAWYQQKPGQAPRLLIYGASSRATGIPDRFSGSGSGTDFTLTISRLPEDFAVYYCQQYVSYWTFGGGTKVEIKRTVAAGGGGSGGGGSGGGGSQVQLVESGGGVVQPGRSLRLSCAASGFTFSSYAMHWVRQAPGKGLEWVAVISYDGSNKYYADSVKGRFTISRDNSKNTLYLQMNSLRAEDTAVYYCAKEAPYYAKDYMDVWGKGTTVTVSSTRFKIPIEELEDRVFVNCNTSITWVEGTVGTLLSDITRLDLGKRILDPRGIYRCNGTDIYKDKESTVQVHYRMCQSCVELDPATVAGIIVTDVIATLLLALGVFCFAGHETGRLSGAADTQALLRNDQVYQPLRDRDDAQYSHLGGNWARNK

SEQ ID NO: 19650 - protein, 430 aa, Artificial Sequence
  Synthetic Polypeptide
MALPVTALLLPLALLLHAARPEIVLTQSPGTLSLSPGERATLSCRASQSVSSDYLAWYQQKPGQAPRLLIYGASSRATGIPDRFSGSGSGTDFTLTISRLPEDFAVYYCQQYVSYWTFGGGTKVEIKRTVAAGGGGSGGGGSGGGGSQVQLVESGGGVVQPGRSLRLSCAASGFTFSSYAMHWVRQAPGKGLEWVAVISYDGSNKYYADSVKGRFTISRDNSKNTLYLQMNSLRAEDTAVYYCAKEAPYYAKDYMDVWGKGTTVTVSSTRQSIKGNHLVKVYDYQEDGSVLLTCDAEAKNITWFKDGKMIGFLTEDKKKWNLGSNAKDPRGMYQCKGSQNKSKPLQVYYRMCQNCIELNAATISGFLFAEIVSIFVLAVGVYFIAGQDGVRQSRASDKQTLLPNDQLYQPLKDREDDQYSHLQGNQLRRN

SEQ ID NO: 19651 - protein, 413 aa, Artificial Sequence
  Synthetic Polypeptide
MALPVTALLLPLALLLHAARPEIVLTQSPGTLSLSPGERATLSCRASQSVSSDYLAWYQQKPGQAPRLLIYGASSRATGIPDRFSGSGSGTDFTLTISRLPEDFAVYYCQQYVSYWTFGGGTKVEIKRTVAAGGGGSGGGGSGGGGSQVQLVESGGGVVQPGRSLRLSCAASGFTFSSYAMHWVRQAPGKGLEWVAVISYDGSNKYYADSVKGRFTISRDNSKNTLYLQMNSLRAEDTAVYYCAKEAPYYAKDYMDVWGKGTTVTVSSTRQSFGLLDPKLCYLLDGILFIYGVILTALFLRVKFSRSADAPAYQQGQNQLYNELNLGRREEYDVLDKRRGRDPEMGGKPQRRKNPQEGLYNELQKDKMAEAYSEIGMKGERRRGKGHDGLYQGLSTATKDTYDALHMQALPPR

SEQ ID NO: 19652 - protein, 455 aa, Artificial Sequence
  Synthetic Polypeptide
MALPVTALLLPLALLLHAARPQVQLVESGGGVVQPGRSLRLSCAASGFTFSSYAMHWVRQAPGKGLEWVAVISYDGSNKYYADSVKGRFTISRDNSKNTLYLQMNSLRAEDTAVYYCAKEAPYYAKDYMDVWGKGTTVTVSSGGGGSGGGGSGGGGSEIVLTQSPGTLSLSPGERATLSCRASQSVSSDYLAWYQQKPGQAPRLLIYGASSRATGIPDRFSGSGSGTDFTLTISRLPEDFAVYYCQQYVSYWTFGGGTKVEIKRTVAATRDGNEEMGGITQTPYKVSISGTTVILTCPQYPGSEILWQHNDKNIGGDEDDKNIGSDEDHLSLKEFSELEQSGYYVCYPRGSKPEDANFYLYLRARVCENCMEMDVMSVATIVIVDICITGGLLLLVYYWSKNRKAKAKPVTRGAGAGGRQRGQNKERPPPVPNPDYEPIRKGQRDLYSGLNQRRI

SEQ ID NO: 19653 - protein, 420 aa, Artificial Sequence
  Synthetic Polypeptide
MALPVTALLLPLALLLHAARPQVQLVESGGGVVQPGRSLRLSCAASGFTFSSYAMHWVRQAPGKGLEWVAVISYDGSNKYYADSVKGRFTISRDNSKNTLYLQMNSLRAEDTAVYYCAKEAPYYAKDYMDVWGKGTTVTVSSGGGGSGGGGSGGGGSEIVLTQSPGTLSLSPGERATLSCRASQSVSSDYLAWYQQKPGQAPRLLIYGASSRATGIPDRFSGSGSGTDFTLTISRLPEDFAVYYCQQYVSYWTFGGGTKVEIKRTVAATRFKIPIEELEDRVFVNCNTSITWVEGTVGTLLSDITRLDLGKRILDPRGIYRCNGTDIYKDKESTVQVHYRMCQSCVELDPATVAGIIVTDVIATLLLALGVFCFAGHETGRLSGAADTQALLRNDQVYQPLRDRDDAQYSHLGGNWARNK

SEQ ID NO: 19654 - protein, 430 aa, Artificial Sequence
  Synthetic Polypeptide
MALPVTALLLPLALLLHAARPQVQLVESGGGVVQPGRSLRLSCAASGFTFSSYAMHWVRQAPGKGLEWVAVISYDGSNKYYADSVKGRFTISRDNSKNTLYLQMNSLRAEDTAVYYCAKEAPYYAKDYMDVWGKGTTVTVSSGGGGSGGGGSGGGGSEIVLTQSPGTLSLSPGERATLSCRASQSVSSDYLAWYQQKPGQAPRLLIYGASSRATGIPDRFSGSGSGTDFTLTISRLPEDFAVYYCQQYVSYWTFGGGTKVEIKRTVAATRQSIKGNHLVKVYDYQEDGSVLLTCDAEAKNITWFKDGKMIGFLTEDKKKWNLGSNAKDPRGMYQCKGSQNKSKPLQVYYRMCQNCIELNAATISGFLFAEIVSIFVLAVGVYFIAGQDGVRQSRASDKQTLLPNDQLYQPLKDREDDQYSHLQGNQLRRN

SEQ ID NO: 19655 - protein, 413 aa, Artificial Sequence
  Synthetic Polypeptide
MALPVTALLLPLALLLHAARPQVQLVESGGGVVQPGRSLRLSCAASGFTFSSYAMHWVRQAPGKGLEWVAVISYDGSNKYYADSVKGRFTISRDNSKNTLYLQMNSLRAEDTAVYYCAKEAPYYAKDYMDVWGKGTTVTVSSGGGGSGGGGSGGGGSEIVLTQSPGTLSLSPGERATLSCRASQSVSSDYLAWYQQKPGQAPRLLIYGASSRATGIPDRFSGSGSGTDFTLTISRLPEDFAVYYCQQYVSYWTFGGGTKVEIKRTVAATRQSFGLLDPKLCYLLDGILFIYGVILTALFLRVKFSRSADAPAYQQGQNQLYNELNLGRREEYDVLDKRRGRDPEMGGKPQRRKNPQEGLYNELQKDKMAEAYSEIGMKGERRRGKGHDGLYQGLSTATKDTYDALHMQALPPR

SEQ ID NO: 19656 - protein, 646 aa, Artificial Sequence
  Synthetic Polypeptide
MALPVTALLLPLALLLHAARPEIVLTQSPGTLSLSPGERATLSCRASQSVSSDYLAWYQQKPGQAPRLLIYGASSRATGIPDRFSGSGSGTDFTLTISRLPEDFAVYYCQQYVSYWTFGGGTKVEIKRTVAAGGGGSGGGGSGGGGSQVQLVESGGGVVQPGRSLRLSCAASGFTFSSYAMHWVRQAPGKGLEWVAVISYDGSNKYYADSVKGRFTISRDNSKNTLYLQMNSLRAEDTAVYYCAKEAPYYAKDYMDVWGKGTTVTVSSTRGSGIQNPDPAVYQLRDSKSSDKSVCLFTDFDSQTNVSQSKDSDVYITDKTVLDMRSMDFKSNSAVAWSNKSDFACANAFNNSIIPEDTFFPSPESSCDVKLVEKSFETDTNLNFQNLSVIGFRILLLKVAGFNLLMTLRLWSSRAKRSGSGVKQTLNFDLLKLAGDVESNPGPSRGHMTEYKPTVRLATRDDVPRAVRTLAAAFADYPATRHTVDPDRHIERVTELQELFLTRVGLDIGKVWVADDGAAVAVWTTPESVEAGAVFAEIGPRMAELSGSRLAAQQQMEGLLAPHRPKEPAWFLATVGVSPDHQGKGLGSAVVLPGVEAAERAGVPAFLETSAPRNLPFYERLGFTVTADVEVPEGPRTWCMTRKPGA

SEQ ID NO: 19657 - protein, 678 aa, Artificial Sequence
  Synthetic Polypeptide
MALPVTALLLPLALLLHAARPEIVLTQSPGTLSLSPGERATLSCRASQSVSSDYLAWYQQKPGQAPRLLIYGASSRATGIPDRFSGSGSGTDFTLTISRLPEDFAVYYCQQYVSYWTFGGGTKVEIKRTVAAGGGGSGGGGSGGGGSQVQLVESGGGVVQPGRSLRLSCAASGFTFSSYAMHWVRQAPGKGLEWVAVISYDGSNKYYADSVKGRFTISRDNSKNTLYLQMNSLRAEDTAVYYCAKEAPYYAKDYMDVWGKGTTVTVSSLEDLKNVFPPEVAVFEPSEAEISHTQKATLVCLATGFYPDHVELSWWVNGKEVHSGVSTDPQPLKEQPALNDSRYCLSSRLRVSATFWQNPRNHFRCQVQFYGLSENDEWTQDRAKPVTQIVSAEAWGRADCGFTSESYQQGVLSATILYEILLGKATLYAVLVSALVLMAMVKRKDSRGRAKRSGSGATNFSLLKQAGDVEENPGPTRGHMTEYKPTVRLATRDDVPRAVRTLAAAFADYPATRHTVDPDRHIERVTELQELFLTRVGLDIGKVWVADDGAAVAVWTTPESVEAGAVFAEIGPRMAELSGSRLAAQQQMEGLLAPHRPKEPAWFLATVGVSPDHQGKGLGSAVVLPGVEAAERAGVPAFLETSAPRNLPFYERLGFTVTADVEVPEGPRTWCMTRKPGA

SEQ ID NO: 19658 - protein, 728 aa, Artificial Sequence
  Synthetic Polypeptide
MALPVTALLLPLALLLHAARPEIVLTQSPGTLSLSPGERATLSCRASQSVSSDYLAWYQQKPGQAPRLLIYGASSRATGIPDRFSGSGSGTDFTLTISRLPEDFAVYYCQQYVSYWTFGGGTKVEIKRTVAAGGGGSGGGGSGGGGSQVQLVESGGGVVQPGRSLRLSCAASGFTFSSYAMHWVRQAPGKGLEWVAVISYDGSNKYYADSVKGRFTISRDNSKNTLYLQMNSLRAEDTAVYYCAKEAPYYAKDYMDVWGKGTTVTVSSTREQKLISEEDLGSGTPFPSLAPPIMLLVDGKQQMVVVCLVLDVAPPGLDSPIWFSAGNGSALDAFTYGPSPATDGTWTNLAHLSLPSEELASWEPLVCHTGPGAEGHSRSTQPMHLSGEASTARTCPQEPLRGTPGGALWLGVLRLLLFKLLLFDLLLTCSCLCDPAGPLPSPATTTRLRALGSHRLHPATETGGREATSSPRPQPRDRRWGDTPPGRKPGSPVRAKRSGSGVKQTLNFDLLKLAGDVESNPGPSRSRGHMTEYKPTVRLATRDDVPRAVRTLAAAFADYPATRHTVDPDRHIERVTELQELFLTRVGLDIGKVWVADDGAAVAVWTTPESVEAGAVFAEIGPRMAELSGSRLAAQQQMEGLLAPHRPKEPAWFLATVGVSPDHQGKGLGSAVVLPGVEAAERAGVPAFLETSAPRNLPFYERLGFTVTADVEVPEGPRTWCMTRKPGA

SEQ ID NO: 19659 - protein, 542 aa, Artificial Sequence
  Synthetic Polypeptide
MALPVTALLLPLALLLHAARPEIVLTQSPGTLSLSPGERATLSCRASQSVSSDYLAWYQQKPGQAPRLLIYGASSRATGIPDRFSGSGSGTDFTLTISRLPEDFAVYYCQQYVSYWTFGGGTKVEIKRTVAALEDLKNVFPPEVAVFEPSEAEISHTQKATLVCLATGFYPDHVELSWWVNGKEVHSGVSTDPQPLKEQPALNDSRYCLSSRLRVSATFWQNPRNHFRCQVQFYGLSENDEWTQDRAKPVTQIVSAEAWGRADCGFTSESYQQGVLSATILYEILLGKATLYAVLVSALVLMAMVKRKDSRGRAKRSGSGATNFSLLKQAGDVEENPGPTRGHMTEYKPTVRLATRDDVPRAVRTLAAAFADYPATRHTVDPDRHIERVTELQELFLTRVGLDIGKVWVADDGAAVAVWTTPESVEAGAVFAEIGPRMAELSGSRLAAQQQMEGLLAPHRPKEPAWFLATVGVSPDHQGKGLGSAVVLPGVEAAERAGVPAFLETSAPRNLPFYERLGFTVTADVEVPEGPRTWCMTRKPGA

SEQ ID NO: 19660 - protein, 312 aa, Artificial Sequence
  Synthetic Polypeptide
MALPVTALLLPLALLLHAARPEIVLTQSPGTLSLSPGERATLSCRASQSVSSDYLAWYQQKPGQAPRLLIYGASSRATGIPDRFSGSGSGTDFTLTISRLPEDFAVYYCQQYVSYWTFGGGTKVEIKRTVAALEDLKNVFPPEVAVFEPSEAEISHTQKATLVCLATGFYPDHVELSWWVNGKEVHSGVSTDPQPLKEQPALNDSRYCLSSRLRVSATFWQNPRNHFRCQVQFYGLSENDEWTQDRAKPVTQIVSAEAWGRADCGFTSESYQQGVLSATILYEILLGKATLYAVLVSALVLMAMVKRKDSRG

SEQ ID NO: 19661 - protein, 450 aa, Artificial Sequence
  Synthetic Polypeptide
MDWIWRILFLVGAATGAHSFEQVQLVESGGGVVQPGRSLRLSCAASGFTFSSYAMHWVRQAPGKGLEWVAVISYDGSNKYYADSVKGRFTISRDNSKNTLYLQMNSLRAEDTAVYYCAKEAPYYAKDYMDVWGKGTTVTVSSTRIQNPDPAVYQLRDSKSSDKSVCLFTDFDSQTNVSQSKDSDVYITDKTVLDMRSMDFKSNSAVAWSNKSDFACANAFNNSIIPEDTFFPSPESSCDVKLVEKSFETDTNLNFQNLSVIGFRILLLKVAGFNLLMTLRLWSSRAKRSGSGVKQTLNFDLLKLAGDVESNPGPSRGHMAKPLSQEESTLIERATATINSIPISEDYSVASAALSSDGRIFTGVNVYHFTGGPCAELVVLGTAAAAAAGNLTCIVAIGNENRGILSPCGRCRQVLLDLHPGIKAIVKDSDGQPTAVGIRELLPSGYVWEG

SEQ ID NO: 19662 - protein, 284 aa, Artificial Sequence
  Synthetic Polypeptide
MDWIWRILFLVGAATGAHSFEQVQLVESGGGVVQPGRSLRLSCAASGFTFSSYAMHWVRQAPGKGLEWVAVISYDGSNKYYADSVKGRFTISRDNSKNTLYLQMNSLRAEDTAVYYCAKEAPYYAKDYMDVWGKGTTVTVSSTRIQNPDPAVYQLRDSKSSDKSVCLFTDFDSQTNVSQSKDSDVYITDKTVLDMRSMDFKSNSAVAWSNKSDFACANAFNNSIIPEDTFFPSPESSCDVKLVEKSFETDTNLNFQNLSVIGFRILLLKVAGFNLLMTLRLWSS

SEQ ID NO: 19663 - protein, 560 aa, Artificial Sequence
  Synthetic Polypeptide
MALPVTALLLPLALLLHAARPEIVLTQSPGTLSLSPGERATLSCRASQSVSSDYLAWYQQKPGQAPRLLIYGASSRATGIPDRFSGSGSGTDFTLTISRLPEDFAVYYCQQYVSYWTFGGGTKVEIKRTVAALEGKPIPNPLLGLDSTGSGEDLKNVFPPEVAVFEPSEAEISHTQKATLVCLATGFYPDHVELSWWVNGKEVHSGVCTDPQPLKEQPALNDSRYCLSSRLRVSATFWQNPRNHFRCQVQFYGLSENDEWTQDRAKPVTQIVSAEAWGRADCGFTSESYQQGVLSATILYEILLGKATLYAVLVSALVLMAMVKRKDSRGRAKRSGSGATNFSLLKQAGDVEENPGPTRGHMTEYKPTVRLATRDDVPRAVRTLAAAFADYPATRHTVDPDRHIERVTELQELFLTRVGLDIGKVWVADDGAAVAVWTTPESVEAGAVFAEIGPRMAELSGSRLAAQQQMEGLLAPHRPKEPAWFLATVGVSPDHQGKGLGSAVVLPGVEAAERAGVPAFLETSAPRNLPFYERLGFTVTADVEVPEGPRTWCMTRKPGA

SEQ ID NO: 19664 - protein, 330 aa, Artificial Sequence
  Synthetic Polypeptide
MALPVTALLLPLALLLHAARPEIVLTQSPGTLSLSPGERATLSCRASQSVSSDYLAWYQQKPGQAPRLLIYGASSRATGIPDRFSGSGSGTDFTLTISRLPEDFAVYYCQQYVSYWTFGGGTKVEIKRTVAALEGKPIPNPLLGLDSTGSGEDLKNVFPPEVAVFEPSEAEISHTQKATLVCLATGFYPDHVELSWWVNGKEVHSGVCTDPQPLKEQPALNDSRYCLSSRLRVSATFWQNPRNHFRCQVQFYGLSENDEWTQDRAKPVTQIVSAEAWGRADCGFTSESYQQGVLSATILYEILLGKATLYAVLVSALVLMAMVKRKDSRG

SEQ ID NO: 19665 - protein, 462 aa, Artificial Sequence
  Synthetic Polypeptide
MDWIWRILFLVGAATGAHSFEQVQLVESGGGVVQPGRSLRLSCAASGFTFSSYAMHWVRQAPGKGLEWVAVISYDGSNKYYADSVKGRFTISRDNSKNTLYLQMNSLRAEDTAVYYCAKEAPYYAKDYMDVWGKGTTVTVSSTREQKLISEEDGSGIQNPDPAVYQLRDSKSSDKSVCLFTDFDSQTNVSQSKDSDVYITDKCVLDMRSMDFKSNSAVAWSNKSDFACANAFNNSIIPEDTFFPSPESSCDVKLVEKSFETDTNLNFQNLSVIGFRILLLKVAGFNLLMTLRLWSSRAKRSGSGVKQTLNFDLLKLAGDVESNPGPSRGHMAKPLSQEESTLIERATATINSIPISEDYSVASAALSSDGRIFTGVNVYHFTGGPCAELVVLGTAAAAAAGNLTCIVAIGNENRGILSPCGRCRQVLLDLHPGIKAIVKDSDGQPTAVGIRELLPSGYVWEG

SEQ ID NO: 19666 - protein, 296 aa, Artificial Sequence
  Synthetic Polypeptide
MDWIWRILFLVGAATGAHSFEQVQLVESGGGVVQPGRSLRLSCAASGFTFSSYAMHWVRQAPGKGLEWVAVISYDGSNKYYADSVKGRFTISRDNSKNTLYLQMNSLRAEDTAVYYCAKEAPYYAKDYMDVWGKGTTVTVSSTREQKLISEEDGSGIQNPDPAVYQLRDSKSSDKSVCLFTDFDSQTNVSQSKDSDVYITDKCVLDMRSMDFKSNSAVAWSNKSDFACANAFNNSIIPEDTFFPSPESSCDVKLVEKSFETDTNLNFQNLSVIGFRILLLKVAGFNLLMTLRLWSS

SEQ ID NO: 19667 - protein, 646 aa, Artificial Sequence
  Synthetic Polypeptide
MALPVTALLLPLALLLHAARPEIVLTQSPGTLSLSPGERATLSCRASQSVSSDYLAWYQQKPGQAPRLLIYGASSRATGIPDRFSGSGSGTDFTLTISRLPEDFAVYYCQQYVSYWTFGGGTKVEIKRTVAAGGGGSGGGGSGGGGSQVQLVESGGGVVQPGRSLRLSCAASGFTFSSYAMHWVRQAPGKGLEWVAVISYDGSNKYYADSVKGRFTISRDNSKNTLYLQMNSLRAEDTAVYYCAKEAPYYAKDYMDVWGKGTTVTVSSTRGSGIQNPDPAVYQLRDSKSSDKSVCLFTDFDSQTNVSQSKDSDVYITDKTVLDMRSMDFKSNSAVAWSNKSDFACANAFNNSIIPEDTFFPSSDVPCDVKLVEKSFETDTNLNFQNLSVIGFRILLLKVAGFNLLMTLRLWSSRAKRSGSGVKQTLNFDLLKLAGDVESNPGPSRGHMTEYKPTVRLATRDDVPRAVRTLAAAFADYPATRHTVDPDRHIERVTELQELFLTRVGLDIGKVWVADDGAAVAVWTTPESVEAGAVFAEIGPRMAELSGSRLAAQQQMEGLLAPHRPKEPAWFLATVGVSPDHQGKGLGSAVVLPGVEAAERAGVPAFLETSAPRNLPFYERLGFTVTADVEVPEGPRTWCMTRKPGA

SEQ ID NO: 19668 - protein, 678 aa, Artificial Sequence
  Synthetic Polypeptide
MALPVTALLLPLALLLHAARPEIVLTQSPGTLSLSPGERATLSCRASQSVSSDYLAWYQQKPGQAPRLLIYGASSRATGIPDRFSGSGSGTDFTLTISRLPEDFAVYYCQQYVSYWTFGGGTKVEIKRTVAAGGGGSGGGGSGGGGSQVQLVESGGGVVQPGRSLRLSCAASGFTFSSYAMHWVRQAPGKGLEWVAVISYDGSNKYYADSVKGRFTISRDNSKNTLYLQMNSLRAEDTAVYYCAKEAPYYAKDYMDVWGKGTTVTVSSLEDLKNVFPPEVAVFEPSKAEIAHTQKATLVCLATGFYPDHVELSWWVNGKEVHSGVSTDPQPLKEQPALNDSRYCLSSRLRVSATFWQNPRNHFRCQVQFYGLSENDEWTQDRAKPVTQIVSAEAWGRADCGITSASYHQGVLSATILYEILLGKATLYAVLVSALVLMAMVKRKDSRGRAKRSGSGATNFSLLKQAGDVEENPGPTRGHMTEYKPTVRLATRDDVPRAVRTLAAAFADYPATRHTVDPDRHIERVTELQELFLTRVGLDIGKVWVADDGAAVAVWTTPESVEAGAVFAEIGPRMAELSGSRLAAQQQMEGLLAPHRPKEPAWFLATVGVSPDHQGKGLGSAVVLPGVEAAERAGVPAFLETSAPRNLPFYERLGFTVTADVEVPEGPRTWCMTRKPGA

SEQ ID NO: 19669 - protein, 701 aa, Artificial Sequence
  Synthetic Polypeptide
MALPVTALLLPLALLLHAARPEIVLTQSPGTLSLSPGERATLSCRASQSVSSDYLAWYQQKPGQAPRLLIYGASSRATGIPDRFSGSGSGTDFTLTISRLPEDFAVYYCQQYVSYWTFGGGTKVEIKRTVAAGGGGSGGGGSGGGGSQVQLVESGGGVVQPGRSLRLSCAASGFTFSSYAMHWVRQAPGKGLEWVAVISYDGSNKYYADSVKGRFTISRDNSKNTLYLQMNSLRAEDTAVYYCAKEAPYYAKDYMDVWGKGTTVTVSSTRGSGGGGSGGGGSGDGNEEMGGITQTPYKVSISGTTVILTCPQYPGSEILWQHNDKNIGGDEDDKNIGSDEDHLSLKEFSELEQSGYYVCYPRGSKPEDANFYLYLRARVCENCMEMDVMSVATIVIVDICITGGLLLLVYYWSKNRKAKAKPVTRGAGAGGRQRGQNKERPPPVPNPDYEPIRKGQRDLYSGLNQRRIRAKRSGSGVKQTLNFDLLKLAGDVESNPGPSRGHMTEYKPTVRLATRDDVPRAVRTLAAAFADYPATRHTVDPDRHIERVTELQELFLTRVGLDIGKVWVADDGAAVAVWTTPESVEAGAVFAEIGPRMAELSGSRLAAQQQMEGLLAPHRPKEPAWFLATVGVSPDHQGKGLGSAVVLPGVEAAERAGVPAFLETSAPRNLPFYERLGFTVTADVEVPEGPRTWCMTRKPGA

SEQ ID NO: 19670 - protein, 666 aa, Artificial Sequence
  Synthetic Polypeptide
MALPVTALLLPLALLLHAARPEIVLTQSPGTLSLSPGERATLSCRASQSVSSDYLAWYQQKPGQAPRLLIYGASSRATGIPDRFSGSGSGTDFTLTISRLPEDFAVYYCQQYVSYWTFGGGTKVEIKRTVAAGGGGSGGGGSGGGGSQVQLVESGGGVVQPGRSLRLSCAASGFTFSSYAMHWVRQAPGKGLEWVAVISYDGSNKYYADSVKGRFTISRDNSKNTLYLQMNSLRAEDTAVYYCAKEAPYYAKDYMDVWGKGTTVTVSSTRGSGGGGSGGGGSGFKIPIEELEDRVFVNCNTSITWVEGTVGTLLSDITRLDLGKRILDPRGIYRCNGTDIYKDKESTVQVHYRMCQSCVELDPATVAGIIVTDVIATLLLALGVFCFAGHETGRLSGAADTQALLRNDQVYQPLRDRDDAQYSHLGGNWARNKRAKRSGSGVKQTLNFDLLKLAGDVESNPGPSRGHMTEYKPTVRLATRDDVPRAVRTLAAAFADYPATRHTVDPDRHIERVTELQELFLTRVGLDIGKVWVADDGAAVAVWTTPESVEAGAVFAEIGPRMAELSGSRLAAQQQMEGLLAPHRPKEPAWFLATVGVSPDHQGKGLGSAVVLPGVEAAERAGVPAFLETSAPRNLPFYERLGFTVTADVEVPEGPRTWCMTRKPGA

SEQ ID NO: 19671 - protein, 676 aa, Artificial Sequence
  Synthetic Polypeptide
MALPVTALLLPLALLLHAARPEIVLTQSPGTLSLSPGERATLSCRASQSVSSDYLAWYQQKPGQAPRLLIYGASSRATGIPDRFSGSGSGTDFTLTISRLPEDFAVYYCQQYVSYWTFGGGTKVEIKRTVAAGGGGSGGGGSGGGGSQVQLVESGGGVVQPGRSLRLSCAASGFTFSSYAMHWVRQAPGKGLEWVAVISYDGSNKYYADSVKGRFTISRDNSKNTLYLQMNSLRAEDTAVYYCAKEAPYYAKDYMDVWGKGTTVTVSSTRGSGGGGSGGGGSGQSIKGNHLVKVYDYQEDGSVLLTCDAEAKNITWFKDGKMIGFLTEDKKKWNLGSNAKDPRGMYQCKGSQNKSKPLQVYYRMCQNCIELNAATISGFLFAEIVSIFVLAVGVYFIAGQDGVRQSRASDKQTLLPNDQLYQPLKDREDDQYSHLQGNQLRRNRAKRSGSGVKQTLNFDLLKLAGDVESNPGPSRGHMTEYKPTVRLATRDDVPRAVRTLAAAFADYPATRHTVDPDRHIERVTELQELFLTRVGLDIGKVWVADDGAAVAVWTTPESVEAGAVFAEIGPRMAELSGSRLAAQQQMEGLLAPHRPKEPAWFLATVGVSPDHQGKGLGSAVVLPGVEAAERAGVPAFLETSAPRNLPFYERLGFTVTADVEVPEGPRTWCMTRKPGA

SEQ ID NO: 19672 - protein, 659 aa, Artificial Sequence
  Synthetic Polypeptide
MALPVTALLLPLALLLHAARPEIVLTQSPGTLSLSPGERATLSCRASQSVSSDYLAWYQQKPGQAPRLLIYGASSRATGIPDRFSGSGSGTDFTLTISRLPEDFAVYYCQQYVSYWTFGGGTKVEIKRTVAAGGGGSGGGGSGGGGSQVQLVESGGGVVQPGRSLRLSCAASGFTFSSYAMHWVRQAPGKGLEWVAVISYDGSNKYYADSVKGRFTISRDNSKNTLYLQMNSLRAEDTAVYYCAKEAPYYAKDYMDVWGKGTTVTVSSTRGSGGGGSGGGGSGQSFGLLDPKLCYLLDGILFIYGVILTALFLRVKFSRSADAPAYQQGQNQLYNELNLGRREEYDVLDKRRGRDPEMGGKPQRRKNPQEGLYNELQKDKMAEAYSEIGMKGERRRGKGHDGLYQGLSTATKDTYDALHMQALPPRRAKRSGSGVKQTLNFDLLKLAGDVESNPGPSRGHMTEYKPTVRLATRDDVPRAVRTLAAAFADYPATRHTVDPDRHIERVTELQELFLTRVGLDIGKVWVADDGAAVAVWTTPESVEAGAVFAEIGPRMAELSGSRLAAQQQMEGLLAPHRPKEPAWFLATVGVSPDHQGKGLGSAVVLPGVEAAERAGVPAFLETSAPRNLPFYERLGFTVTADVEVPEGPRTWCMTRKPGA

SEQ ID NO: 19673 - protein, 760 aa, Artificial Sequence
  Synthetic Polypeptide
MALPVTALLLPLALLLHAARPEVQLVESGGGLVQPGGSLRLSCAASGFSFSDFWMSWVRQAPGKGLEWVATISQAGSEKDYVDSVKGRFTISRDNAKKSLYLQMNSLRAEDTAVYYCASGVYSFDYRGQGTLVTVSSGTGGGGSGGGGSGGGGSEFEIVLTQSPGTLSLSPGERATLSCRASQSVSSDYLAWYQQKPGQAPRLLIYGASSRATGIPDRFSGSGSGTDFTLTISRLPEDFAVYYCQQYVSYWTFGGGTKVEIKRTVAALEDLKNVFPPEVAVFEPSEAEISHTQKATLVCLATGFYPDHVELSWWVNGKEVHSGVCTDPQPLKEQPALNDSRYCLSSRLRVSATFWQNPRNHFRCQVQFYGLSENDEWTQDRAKPVTQIVSAEAWGRADCGFTSESYQQGVLSATILYEILLGKATLYAVLVSALVLMAMVKRKDSRGRAKRSGSGATNFSLLKQAGDVEENPGPTSMDWIWRILFLVGAATGAHSFEQVQLVESGGGVVQPGRSLRLSCAASGFTFSSYAMHWVRQAPGKGLEWVAVISYDGSNKYYADSVKGRFTISRDNSKNTLYLQMNSLRAEDTAVYYCAKEAPYYAKDYMDVWGKGTTVTVSSTRIQNPDPAVYQLRDSKSSDKSVCLFTDFDSQTNVSQSKDSDVYITDKCVLDMRSMDFKSNSAVAWSNKSDFACANAFNNSIIPEDTFFPSPESSCDVKLVEKSFETDTNLNFQNLSVIGFRILLLKVAGFNLLMTLRLWSS

SEQ ID NO: 19674 - protein, 764 aa, Artificial Sequence
  Synthetic Polypeptide
MALPVTALLLPLALLLHAARPEVQLVESGGGLVQPGGSLRLSCAASGFSFSDFWMSWVRQAPGKGLEWVATISQAGSEKDYVDSVKGRFTISRDNAKKSLYLQMNSLRAEDTAVYYCASGVYSFDYRGQGTLVTVSSGTGGGGSGGGGSGGGGSEFEIVLTQSPGTLSLSPGERATLSCRASQSVSSDYLAWYQQKPGQAPRLLIYGASSRATGIPDRFSGSGSGTDFTLTISRLPEDFAVYYCQQYVSYWTFGGGTKVEIKRTVAALEIQNPDPAVYQLRDSKSSDKSVCLFTDFDSQTNVSQSKDSDVYITDKCVLDMRSMDFKSNSAVAWSNKSDFACANAFNNSIIPEDTFFPSPESSCDVKLVEKSFETDTNLNFQNLSVIGFRILLLKVAGFNLLMTLRLWSSRAKRSGSGVKQTLNFDLLKLAGDVESNPGPTSMDWIWRILFLVGAATGAHSFEQVQLVESGGGVVQPGRSLRLSCAASGFTFSSYAMHWVRQAPGKGLEWVAVISYDGSNKYYADSVKGRFTISRDNSKNTLYLQMNSLRAEDTAVYYCAKEAPYYAKDYMDVWGKGTTVTVSSTREDLKNVFPPEVAVFEPSEAEISHTQKATLVCLATGFYPDHVELSWWVNGKEVHSGVCTDPQPLKEQPALNDSRYCLSSRLRVSATFWQNPRNHFRCQVQFYGLSENDEWTQDRAKPVTQIVSAEAWGRADCGFTSESYQQGVLSATILYEILLGKATLYAVLVSALVLMAMVKRKDSRG

SEQ ID NO: 19675 - protein, 956 aa, Artificial Sequence
  Synthetic Polypeptide
MALPVTALLLPLALLLHAARPEVQLVESGGGLVQPGGSLRLSCAASGFSFSDFWMSWVRQAPGKGLEWVATISQAGSEKDYVDSVKGRFTISRDNAKKSLYLQMNSLRAEDTAVYYCASGVYSFDYRGQGTLVTVSSGTGGGGSGGGGSGGGGSEFEIVLTQSPGTLSLSPGERATLSCRASQSVSSDYLAWYQQKPGQAPRLLIYGASSRATGIPDRFSGSGSGTDFTLTISRLPEDFAVYYCQQYVSYWTFGGGTKVEIKRTVAALEDLKNVFPPEVAVFEPSEAEISHTQKATLVCLATGFYPDHVELSWWVNGKEVHSGVSTDPQPLKEQPALNDSRYCLSSRLRVSATFWQNPRNHFRCQVQFYGLSENDEWTQDRAKPVTQIVSAEAWGRADCGSQSFGLLDPKLCYLLDGILFIYGVILTALFLRVKFSRSADAPAYQQGQNQLYNELNLGRREEYDVLDKRRGRDPEMGGKPQRRKNPQEGLYNELQKDKMAEAYSEIGMKGERRRGKGHDGLYQGLSTATKDTYDALHMQALPPRRAKRSGSGATNFSLLKQAGDVEENPGPTSMDWIWRILFLVGAATGAHSFEQVQLVESGGGVVQPGRSLRLSCAASGFTFSSYAMHWVRQAPGKGLEWVAVISYDGSNKYYADSVKGRFTISRDNSKNTLYLQMNSLRAEDTAVYYCAKEAPYYAKDYMDVWGKGTTVTVSSTRIQNPDPAVYQLRDSKSSDKSVCLFTDFDSQTNVSQSKDSDVYITDKTVLDMRSMDFKSNSAVAWSNKSDFACANAFNNSIIPEDTFFPSPESSCGTQSFGLLDPKLCYLLDGILFIYGVILTALFLRVKFSRSADAPAYQQGQNQLYNELNLGRREEYDVLDKRRGRDPEMGGKPQRRKNPQEGLYNELQKDKMAEAYSEIGMKGERRRGKGHDGLYQGLSTATKDTYDALHMQALPPR

SEQ ID NO: 19676 - protein, 786 aa, Artificial Sequence
  Synthetic Polypeptide
MALPVTALLLPLALLLHAARPEVQLVESGGGLVQPGGSLRLSCAASGFSFSDFWMSWVRQAPGKGLEWVATISQAGSEKDYVDSVKGRFTISRDNAKKSLYLQMNSLRAEDTAVYYCASGVYSFDYRGQGTLVTVSSGTGGGGSGGGGSGGGGSEFEIVLTQSPGTLSLSPGERATLSCRASQSVSSDYLAWYQQKPGQAPRLLIYGASSRATGIPDRFSGSGSGTDFTLTISRLPEDFAVYYCQQYVSYWTFGGGTKVEIKRTVAALEGQPKANPTVTLFPPSSEELQANKATLVCLISDFYPGAVTVAWKADGSPVKAGVETTKPSKQSNNKYAASSYLSLTPEQWKSHRSYSCQVTHEGSTVEKTVAPTECSPIKTDVITMDPKDNCSKDANDTLLLQLTNTSAYYMYLLLLLKSVVYFAIITCCLLRRTAFCCNGEKSRAKRSGSGATNFSLLKQAGDVEENPGPTSMDWIWRILFLVGAATGAHSFEQVQLVESGGGVVQPGRSLRLSCAASGFTFSSYAMHWVRQAPGKGLEWVAVISYDGSNKYYADSVKGRFTISRDNSKNTLYLQMNSLRAEDTAVYYCAKEAPYYAKDYMDVWGKGTTVTVSSTRASTKGPSVFPLAPSSKSTSGGTAALGCLVKDYFPEPVTVSWNSGALTSGVHTFPAVLQSSGLYSLSSVVTVPSSSLGTQTYICNVNHKPSNTKVDKRVEPKSCEVKTDSTDHVKPKETENTKQPSKSCHKPKAIVHTEKVNMMSLTVLGLRMLFAKTVAVNFLLTAKLFFL

SEQ ID NO: 19677 - protein, 767 aa, Artificial Sequence
  Synthetic Polypeptide
MALPVTALLLPLALLLHAARPEVQLVESGGGLVQPGGSLRLSCAASGFSFSDFWMSWVRQAPGKGLEWVATISQAGSEKDYVDSVKGRFTISRDNAKKSLYLQMNSLRAEDTAVYYCASGVYSFDYRGQGTLVTVSSGTGGGGSGGGGSGGGGSEFEIVLTQSPGTLSLSPGERATLSCRASQSVSSDYLAWYQQKPGQAPRLLIYGASSRATGIPDRFSGSGSGTDFTLTISRLPEDFAVYYCQQYVSYWTFGGGTKVEIKRTVAALEGQPKANPTVTLFPPSSEELQANKATLVCLISDFYPGAVTVAWKADGSPVKAGVETTKPSKQSNNKYAASSYLSLTPEQWKSHRSYSCQVTHEGSTVEKTVAPTECSGRADCGFTSESYQQGVLSATILYEILLGKATLYAVLVSALVLMAMVKRKDSRGRAKRSGSGVKQTLNFDLLKLAGDVESNPGPTSMDWIWRILFLVGAATGAHSFEQVQLVESGGGVVQPGRSLRLSCAASGFTFSSYAMHWVRQAPGKGLEWVAVISYDGSNKYYADSVKGRFTISRDNSKNTLYLQMNSLRAEDTAVYYCAKEAPYYAKDYMDVWGKGTTVTVSSTRASTKGPSVFPLAPSSKSTSGGTAALGCLVKDYFPEPVTVSWNSGALTSGVHTFPAVLQSSGLYSLSSVVTVPSSSLGTQTYICNVNHKPSNTKVDKRVEPKSCIPEDTFFPSPESSCDVKLVEKSFETDTNLNFQNLSVIGFRILLLKVAGFNLLMTLRLWSS

SEQ ID NO: 19678 - protein, 901 aa, Artificial Sequence
  Synthetic Polypeptide
MALPVTALLLPLALLLHAARPEVQLVESGGGLVQPGGSLRLSCAASGFSFSDFWMSWVRQAPGKGLEWVATISQAGSEKDYVDSVKGRFTISRDNAKKSLYLQMNSLRAEDTAVYYCASGVYSFDYRGQGTLVTVSSGTGGGGSGGGGSGGGGSEFEIVLTQSPGTLSLSPGERATLSCRASQSVSSDYLAWYQQKPGQAPRLLIYGASSRATGIPDRFSGSGSGTDFTLTISRLPEDFAVYYCQQYVSYWTFGGGTKVEIKRTVAALEIQNPDPAVYQLRDSKSSDKSVCLFTDFDSQTNVSQSKDSDVYITDKCVLDMRSMDFKSNSAVAWSNKSDFACANAFNNSIIPEDTFFPSPESSCDVKLVEKSFETDTNLNFQNLSVIGFRILLLKVAGFNLLMTLRLWSSRAKRSGSGVKQTLNFDLLKLAGDVESNPGPTSMDWIWRILFLVGAATGAHSGPQLQLQESGPGLVKPSETLSLTCTVSGDSISSGDYYWGWIRQPPGKGLEWIGHIYYSGVTYYNPSLKSRVTISVDTSRNQFSLKLSSVTAADTAVYYCTREDSSNWRSRGQGTLVTVSSGSGGGGSGGGGSGGGGSFEQVQLVESGGGVVQPGRSLRLSCAASGFTFSSYAMHWVRQAPGKGLEWVAVISYDGSNKYYADSVKGRFTISRDNSKNTLYLQMNSLRAEDTAVYYCAKEAPYYAKDYMDVWGKGTTVTVSSTREDLKNVFPPEVAVFEPSEAEISHTQKATLVCLATGFYPDHVELSWWVNGKEVHSGVCTDPQPLKEQPALNDSRYCLSSRLRVSATFWQNPRNHFRCQVQFYGLSENDEWTQDRAKPVTQIVSAEAWGRADCGFTSESYQQGVLSATILYEILLGKATLYAVLVSALVLMAMVKRKDSRG

SEQ ID NO: 19679 - protein, 1093 aa, Artificial Sequence
  Synthetic Polypeptide
MALPVTALLLPLALLLHAARPEVQLVESGGGLVQPGGSLRLSCAASGFSFSDFWMSWVRQAPGKGLEWVATISQAGSEKDYVDSVKGRFTISRDNAKKSLYLQMNSLRAEDTAVYYCASGVYSFDYRGQGTLVTVSSGTGGGGSGGGGSGGGGSEFEIVLTQSPGTLSLSPGERATLSCRASQSVSSDYLAWYQQKPGQAPRLLIYGASSRATGIPDRFSGSGSGTDFTLTISRLPEDFAVYYCQQYVSYWTFGGGTKVEIKRTVAALEDLKNVFPPEVAVFEPSEAEISHTQKATLVCLATGFYPDHVELSWWVNGKEVHSGVSTDPQPLKEQPALNDSRYCLSSRLRVSATFWQNPRNHFRCQVQFYGLSENDEWTQDRAKPVTQIVSAEAWGRADCGSQSFGLLDPKLCYLLDGILFIYGVILTALFLRVKFSRSADAPAYQQGQNQLYNELNLGRREEYDVLDKRRGRDPEMGGKPQRRKNPQEGLYNELQKDKMAEAYSEIGMKGERRRGKGHDGLYQGLSTATKDTYDALHMQALPPRRAKRSGSGATNFSLLKQAGDVEENPGPTSMDWIWRILFLVGAATGAHSGPQLQLQESGPGLVKPSETLSLTCTVSGDSISSGDYYWGWIRQPPGKGLEWIGHIYYSGVTYYNPSLKSRVTISVDTSRNQFSLKLSSVTAADTAVYYCTREDSSNWRSRGQGTLVTVSSGSGGGGSGGGGSGGGGSFEQVQLVESGGGVVQPGRSLRLSCAASGFTFSSYAMHWVRQAPGKGLEWVAVISYDGSNKYYADSVKGRFTISRDNSKNTLYLQMNSLRAEDTAVYYCAKEAPYYAKDYMDVWGKGTTVTVSSTRIQNPDPAVYQLRDSKSSDKSVCLFTDFDSQTNVSQSKDSDVYITDKTVLDMRSMDFKSNSAVAWSNKSDFACANAFNNSIIPEDTFFPSPESSCGTQSFGLLDPKLCYLLDGILFIYGVILTALFLRVKFSRSADAPAYQQGQNQLYNELNLGRREEYDVLDKRRGRDPEMGGKPQRRKNPQEGLYNELQKDKMAEAYSEIGMKGERRRGKGHDGLYQGLSTATKDTYDALHMQALPPR

SEQ ID NO: 19680 - protein, 923 aa, Artificial Sequence
  Synthetic Polypeptide
MALPVTALLLPLALLLHAARPEVQLVESGGGLVQPGGSLRLSCAASGFSFSDFWMSWVRQAPGKGLEWVATISQAGSEKDYVDSVKGRFTISRDNAKKSLYLQMNSLRAEDTAVYYCASGVYSFDYRGQGTLVTVSSGTGGGGSGGGGSGGGGSEFEIVLTQSPGTLSLSPGERATLSCRASQSVSSDYLAWYQQKPGQAPRLLIYGASSRATGIPDRFSGSGSGTDFTLTISRLPEDFAVYYCQQYVSYWTFGGGTKVEIKRTVAALEGQPKANPTVTLFPPSSEELQANKATLVCLISDFYPGAVTVAWKADGSPVKAGVETTKPSKQSNNKYAASSYLSLTPEQWKSHRSYSCQVTHEGSTVEKTVAPTECSPIKTDVITMDPKDNCSKDANDTLLLQLTNTSAYYMYLLLLLKSVVYFAIITCCLLRRTAFCCNGEKSRAKRSGSGATNFSLLKQAGDVEENPGPTSMDWIWRILFLVGAATGAHSGPQLQLQESGPGLVKPSETLSLTCTVSGDSISSGDYYWGWIRQPPGKGLEWIGHIYYSGVTYYNPSLKSRVTISVDTSRNQFSLKLSSVTAADTAVYYCTREDSSNWRSRGQGTLVTVSSGSGGGGSGGGGSGGGGSFEQVQLVESGGGVVQPGRSLRLSCAASGFTFSSYAMHWVRQAPGKGLEWVAVISYDGSNKYYADSVKGRFTISRDNSKNTLYLQMNSLRAEDTAVYYCAKEAPYYAKDYMDVWGKGTTVTVSSTRASTKGPSVFPLAPSSKSTSGGTAALGCLVKDYFPEPVTVSWNSGALTSGVHTFPAVLQSSGLYSLSSVVTVPSSSLGTQTYICNVNHKPSNTKVDKRVEPKSCEVKTDSTDHVKPKETENTKQPSKSCHKPKAIVHTEKVNMMSLTVLGLRMLFAKTVAVNFLLTAKLFFL

SEQ ID NO: 19681 - protein, 904 aa, Artificial Sequence
  Synthetic Polypeptide
MALPVTALLLPLALLLHAARPEVQLVESGGGLVQPGGSLRLSCAASGFSFSDFWMSWVRQAPGKGLEWVATISQAGSEKDYVDSVKGRFTISRDNAKKSLYLQMNSLRAEDTAVYYCASGVYSFDYRGQGTLVTVSSGTGGGGSGGGGSGGGGSEFEIVLTQSPGTLSLSPGERATLSCRASQSVSSDYLAWYQQKPGQAPRLLIYGASSRATGIPDRFSGSGSGTDFTLTISRLPEDFAVYYCQQYVSYWTFGGGTKVEIKRTVAALEGQPKANPTVTLFPPSSEELQANKATLVCLISDFYPGAVTVAWKADGSPVKAGVETTKPSKQSNNKYAASSYLSLTPEQWKSHRSYSCQVTHEGSTVEKTVAPTECSGRADCGFTSESYQQGVLSATILYEILLGKATLYAVLVSALVLMAMVKRKDSRGRAKRSGSGVKQTLNFDLLKLAGDVESNPGPTSMDWIWRILFLVGAATGAHSGPQLQLQESGPGLVKPSETLSLTCTVSGDSISSGDYYWGWIRQPPGKGLEWIGHIYYSGVTYYNPSLKSRVTISVDTSRNQFSLKLSSVTAADTAVYYCTREDSSNWRSRGQGTLVTVSSGSGGGGSGGGGSGGGGSFEQVQLVESGGGVVQPGRSLRLSCAASGFTFSSYAMHWVRQAPGKGLEWVAVISYDGSNKYYADSVKGRFTISRDNSKNTLYLQMNSLRAEDTAVYYCAKEAPYYAKDYMDVWGKGTTVTVSSTRASTKGPSVFPLAPSSKSTSGGTAALGCLVKDYFPEPVTVSWNSGALTSGVHTFPAVLQSSGLYSLSSVVTVPSSSLGTQTYICNVNHKPSNTKVDKRVEPKSCIPEDTFFPSPESSCDVKLVEKSFETDTNLNFQNLSVIGFRILLLKVAGFNLLMTLRLWSS

SEQ ID NO: 19682 - protein, 761 aa, Artificial Sequence
  Synthetic Polypeptide
MALPVTALLLPLALLLHAARPEVQVLESGGGLVQPGGSLRLSCAASGFTFSNFAMSWVRQAPGKGLEWVSTISGSAGTTDYADSVKGRFTISRDNSKKTLYLQMNSLRVEDTAVYYCADGRGPFFDYRGQGTLVTVSSGTGGGGSGGGGSGGGGSEFEIVLTQSPGTLSLSPGERATLSCRASQSVSSDYLAWYQQKPGQAPRLLIYGASSRATGIPDRFSGSGSGTDFTLTISRLPEDFAVYYCQQYVSYWTFGGGTKVEIKRTVAALEDLKNVFPPEVAVFEPSEAEISHTQKATLVCLATGFYPDHVELSWWVNGKEVHSGVCTDPQPLKEQPALNDSRYCLSSRLRVSATFWQNPRNHFRCQVQFYGLSENDEWTQDRAKPVTQIVSAEAWGRADCGFTSESYQQGVLSATILYEILLGKATLYAVLVSALVLMAMVKRKDSRGRAKRSGSGATNFSLLKQAGDVEENPGPTSMDWIWRILFLVGAATGAHSFEQVQLVESGGGVVQPGRSLRLSCAASGFTFSSYAMHWVRQAPGKGLEWVAVISYDGSNKYYADSVKGRFTISRDNSKNTLYLQMNSLRAEDTAVYYCAKEAPYYAKDYMDVWGKGTTVTVSSTRIQNPDPAVYQLRDSKSSDKSVCLFTDFDSQTNVSQSKDSDVYITDKCVLDMRSMDFKSNSAVAWSNKSDFACANAFNNSIIPEDTFFPSPESSCDVKLVEKSFETDTNLNFQNLSVIGFRILLLKVAGFNLLMTLRLWSS

SEQ ID NO: 19683 - protein, 762 aa, Artificial Sequence
  Synthetic Polypeptide
MALPVTALLLPLALLLHAARPEIVLTQSPGTLSLSPGERATLSCRASQSVSSDYLAWYQQKPGQAPRLLIYGASSRATGIPDRFSGSGSGTDFTLTISRLPEDFAVYYCQQYVSYWTFGGGTKVEIKRTVAALEDLKNVFPPEVAVFEPSEAEISHTQKATLVCLATGFYPDHVELSWWVNGKEVHSGVCTDPQPLKEQPALNDSRYCLSSRLRVSATFWQNPRNHFRCQVQFYGLSENDEWTQDRAKPVTQIVSAEAWGRADCGFTSESYQQGVLSATILYEILLGKATLYAVLVSALVLMAMVKRKDSRGRAKRSGSGATNFSLLKQAGDVEENPGPTSMDWIWRILFLVGAATGAHSGPEVQLVESGGGLVQAGGSLRLSCAASGRTFSMGWFRQAPGKEREFVAAITYSGGSPYYADSVKGRFTISRDNAKNTVYLQMNSLKPEDTAVYYCAANPTYGSDWNAENWGQGTQVTVSSGSGGGGSGGGGSGGGGSFEQVQLVESGGGVVQPGRSLRLSCAASGFTFSSYAMHWVRQAPGKGLEWVAVISYDGSNKYYADSVKGRFTISRDNSKNTLYLQMNSLRAEDTAVYYCAKEAPYYAKDYMDVWGKGTTVTVSSTRIQNPDPAVYQLRDSKSSDKSVCLFTDFDSQTNVSQSKDSDVYITDKCVLDMRSMDFKSNSAVAWSNKSDFACANAFNNSIIPEDTFFPSPESSCDVKLVEKSFETDTNLNFQNLSVIGFRILLLKVAGFNLLMTLRLWSS

SEQ ID NO: 19684 - protein, 889 aa, Artificial Sequence
  Synthetic Polypeptide
MALPVTALLLPLALLLHAARPEIVLTQSPGTLSLSPGERATLSCRASQSVSSDYLAWYQQKPGQAPRLLIYGASSRATGIPDRFSGSGSGTDFTLTISRLPEDFAVYYCQQYVSYWTFGGGTKVEIKRTVAALEDLKNVFPPEVAVFEPSEAEISHTQKATLVCLATGFYPDHVELSWWVNGKEVHSGVCTDPQPLKEQPALNDSRYCLSSRLRVSATFWQNPRNHFRCQVQFYGLSENDEWTQDRAKPVTQIVSAEAWGRADCGFTSESYQQGVLSATILYEILLGKATLYAVLVSALVLMAMVKRKDSRGRAKRSGSGATNFSLLKQAGDVEENPGPTSMDWIWRILFLVGAATGAHSQLQLQESGPGLVKPSETLSLTCTVSGGSISSGDYYWGWIRQPPGKGLEWIGSISYSGSTYYNPSLKSRVTISVDTSRNQFSLKLSSVTAADTAVYYCTREDSSNWRSRGQGTLVTVSSSGGGGSGGGGSEVQLVESGGGLVQAGGSLRLSCAASGRTFSMGWFRQAPGKEREFVAAITYSGGSPYYADSVKGRFTISRDNAKNTVYLQMNSLKPEDTAVYYCAANPTYGSDWNAENWGQGTQVTVSSGSGGGGSGGGGSGGGGSFEQVQLVESGGGVVQPGRSLRLSCAASGFTFSSYAMHWVRQAPGKGLEWVAVISYDGSNKYYADSVKGRFTISRDNSKNTLYLQMNSLRAEDTAVYYCAKEAPYYAKDYMDVWGKGTTVTVSSTRIQNPDPAVYQLRDSKSSDKSVCLFTDFDSQTNVSQSKDSDVYITDKCVLDMRSMDFKSNSAVAWSNKSDFACANAFNNSIIPEDTFFPSPESSCDVKLVEKSFETDTNLNFQNLSVIGFRILLLKVAGFNLLMTLRLWSS

SEQ ID NO: 19685 - protein, 898 aa, Artificial Sequence
  Synthetic Polypeptide
MALPVTALLLPLALLLHAARPEVQVLESGGGLVQPGGSLRLSCAASGFTFSNFAMSWVRQAPGKGLEWVSTISGSAGTTDYADSVKGRFTISRDNSKKTLYLQMNSLRVEDTAVYYCADGRGPFFDYRGQGTLVTVSSGTGGGGSGGGGSGGGGSEFEIVLTQSPGTLSLSPGERATLSCRASQSVSSDYLAWYQQKPGQAPRLLIYGASSRATGIPDRFSGSGSGTDFTLTISRLPEDFAVYYCQQYVSYWTFGGGTKVEIKRTVAALEDLKNVFPPEVAVFEPSEAEISHTQKATLVCLATGFYPDHVELSWWVNGKEVHSGVCTDPQPLKEQPALNDSRYCLSSRLRVSATFWQNPRNHFRCQVQFYGLSENDEWTQDRAKPVTQIVSAEAWGRADCGFTSESYQQGVLSATILYEILLGKATLYAVLVSALVLMAMVKRKDSRGRAKRSGSGATNFSLLKQAGDVEENPGPTSMDWIWRILFLVGAATGAHSGPEVQLVESGGGLVQAGGSLRLSCAASGRTFSMGWFRQAPGKEREFVAAITYSGGSPYYASSVRGRFTISRDNAKNTVYLQMNSLKPEDTAVYYCAANPTYGSDWNAENWGQGTQVTVSSGSGGGGSGGGGSGGGGSFEQVQLVESGGGVVQPGRSLRLSCAASGFTFSSYAMHWVRQAPGKGLEWVAVISYDGSNKYYADSVKGRFTISRDNSKNTLYLQMNSLRAEDTAVYYCAKEAPYYAKDYMDVWGKGTTVTVSSTRIQNPDPAVYQLRDSKSSDKSVCLFTDFDSQTNVSQSKDSDVYITDKCVLDMRSMDFKSNSAVAWSNKSDFACANAFNNSIIPEDTFFPSPESSCDVKLVEKSFETDTNLNFQNLSVIGFRILLLKVAGFNLLMTLRLWSS

SEQ ID NO: 19686 - protein, 728 aa, Artificial Sequence
  Synthetic Polypeptide
MALPVTALLLPLALLLHAARPSYELIQPPSAAVTLGNTVSLTCVGDELPKRYAYWYQQKPDQSIVRVIYEDSVRPPGISDRFSGSSSGTTATLTIRDAQNEDEADYYCQSTYGDDKLYIFGGGTKLTVLGGGGGSGGGGSGGGGSEVQLVETGGGLVQPGKSLELTCATSGFTFNTAWMHWVRQSPDKRLEWIARIKDTSNNYATDYVESMKGRFTISRDDSKGSVNLQMNSLKEEDTATYYCTTDFYDGTYYWNYWGQGVMVTVSSTREQKLISEEDLAKPTTTPAPRPPTPAPTIASQPLSLRPEACRPAAGGAVHTRGLDFACDIYIWAPLAGTCGVLLLSLVITLYCKRGRKKLLYIFKQPFMRPVQTTQEEDGCSCRFPEEEEGGCELRVKFSRSADAPAYQQGQNQLYNELNLGRREEYDVLDKRRGRDPEMGGKPRRKNPQEGLYNELQKDKMAEAYSEIGMKGERRRGKGHDGLYQGLSTATKDTYDALHMQALPPRSSGSGEGRGSLLTCGDVEENPGPHMTEYKPTVRLATRDDVPRAVRTLAAAFADYPATRHTVDPDRHIERVTELQELFLTRVGLDIGKVWVADDGAAVAVWTTPESVEAGAVFAEIGPRMAELSGSRLAAQQQMEGLLAPHRPKEPAWFLATVGVSPDHQGKGLGSAVVLPGVEAAERAGVPAFLETSAPRNLPFYERLGFTVTADVEVPEGPRTWCMTRKPGA

SEQ ID NO: 19687 - protein, 722 aa, Artificial Sequence
  Synthetic Polypeptide
MALPVTALLLPLALLLHAARPSYELIQPPSAAVTLGNTVSLTCVGDELPKRYAYWYQQKPDQSIVRVIYEDSVRPPGISDRFSGSSSGTTATLTIRDAQNEDEADYYCQSTYGDDKLYIFGGGTKLTVLGGGGGSGGGGSGGGGSEVQLVETGGGLVQPGKSLELTCATSGFTFNTAWMHWVRQSPDKRLEWIARIKDTSNNYATDYVESMKGRFTISRDDSKGSVNLQMNSLKEEDTATYYCTTDFYDGTYYWNYWGQGVMVTVSSTREQKLISEEDLKIEVMYPPPYLDNEKSNGTIIHVKGKHLCPSPLFPGPSKPFWVLVVVGGVLACYSLLVTVAFIIFWVRSKRSRLLHSDYMNMTPRRPGPTRKHYQPYAPPRDFAAYRSRVKFSRSADAPAYQQGQNQLYNELNLGRREEYDVLDKRRGRDPEMGGKPRRKNPQEGLYNELQKDKMAEAYSEIGMKGERRRGKGHDGLYQGLSTATKDTYDALHMQALPPRSSGSGEGRGSLLTCGDVEENPGPHMTEYKPTVRLATRDDVPRAVRTLAAAFADYPATRHTVDPDRHIERVTELQELFLTRVGLDIGKVWVADDGAAVAVWTTPESVEAGAVFAEIGPRMAELSGSRLAAQQQMEGLLAPHRPKEPAWFLATVGVSPDHQGKGLGSAVVLPGVEAAERAGVPAFLETSAPRNLPFYERLGFTVTADVEVPEGPRTWCMTRKPGA

SEQ ID NO: 19688 - protein, 499 aa, Artificial Sequence
  Synthetic Polypeptide
MALPVTALLLPLALLLHAARPSYELIQPPSAAVTLGNTVSLTCVGDELPKRYAYWYQQKPDQSIVRVIYEDSVRPPGISDRFSGSSSGTTATLTIRDAQNEDEADYYCQSTYGDDKLYIFGGGTKLTVLGGGGGSGGGGSGGGGSEVQLVETGGGLVQPGKSLELTCATSGFTFNTAWMHWVRQSPDKRLEWIARIKDTSNNYATDYVESMKGRFTISRDDSKGSVNLQMNSLKEEDTATYYCTTDFYDGTYYWNYWGQGVMVTVSSTREQKLISEEDLKIEVMYPPPYLDNEKSNGTIIHVKGKHLCPSPLFPGPSKPFWVLVVVGGVLACYSLLVTVAFIIFWVRSKRSRLLHSDYMNMTPRRPGPTRKHYQPYAPPRDFAAYRSRVKFSRSADAPAYQQGQNQLYNELNLGRREEYDVLDKRRGRDPEMGGKPRRKNPQEGLYNELQKDKMAEAYSEIGMKGERRRGKGHDGLYQGLSTATKDTYDALHMQALPPR

SEQ ID NO: 19689 - protein, 505 aa, Artificial Sequence
  Synthetic Polypeptide
MALPVTALLLPLALLLHAARPSYELIQPPSAAVTLGNTVSLTCVGDELPKRYAYWYQQKPDQSIVRVIYEDSVRPPGISDRFSGSSSGTTATLTIRDAQNEDEADYYCQSTYGDDKLYIFGGGTKLTVLGGGGGSGGGGSGGGGSEVQLVETGGGLVQPGKSLELTCATSGFTFNTAWMHWVRQSPDKRLEWIARIKDTSNNYATDYVESMKGRFTISRDDSKGSVNLQMNSLKEEDTATYYCTTDFYDGTYYWNYWGQGVMVTVSSTREQKLISEEDLAKPTTTPAPRPPTPAPTIASQPLSLRPEACRPAAGGAVHTRGLDFACDIYIWAPLAGTCGVLLLSLVITLYCKRGRKKLLYIFKQPFMRPVQTTQEEDGCSCRFPEEEEGGCELRVKFSRSADAPAYQQGQNQLYNELNLGRREEYDVLDKRRGRDPEMGGKPRRKNPQEGLYNELQKDKMAEAYSEIGMKGERRRGKGHDGLYQGLSTATKDTYDALHMQALPPR

SEQ ID NO: 19690 - protein, 505 aa, Artificial Sequence
  Synthetic Polypeptide
MALPVTALLLPLALLLHAARPEVQLVETGGGLVQPGKSLELTCATSGFTFNTAWMHWVRQSPDKRLEWIARIKDTSNNYATDYVESMKGRFTISRDDSKGSVNLQMNSLKEEDTATYYCTTDFYDGTYYWNYWGQGVMVTVSSGGGGSGGGGSGGGGSSYELIQPPSAAVTLGNTVSLTCVGDELPKRYAYWYQQKPDQSIVRVIYEDSVRPPGISDRFSGSSSGTTATLTIRDAQNEDEADYYCQSTYGDDKLYIFGGGTKLTVLGTREQKLISEEDLAKPTTTPAPRPPTPAPTIASQPLSLRPEACRPAAGGAVHTRGLDFACDIYIWAPLAGTCGVLLLSLVITLYCKRGRKKLLYIFKQPFMRPVQTTQEEDGCSCRFPEEEEGGCELRVKFSRSADAPAYQQGQNQLYNELNLGRREEYDVLDKRRGRDPEMGGKPRRKNPQEGLYNELQKDKMAEAYSEIGMKGERRRGKGHDGLYQGLSTATKDTYDALHMQALPPR

SEQ ID NO: 19691 - protein, 918 aa, Artificial Sequence
  Synthetic Polypeptide
MALPVTALLLPLALLLHAARPSYELIQPPSAAVTLGNTVSLTCVGDELPKRYAYWYQQKPDQSIVRVIYEDSVRPPGISDRFSGSSSGTTATLTIRDAQNEDEADYYCQSTYGDDKLYIFGGGTKLTVLGGGGGSGGGGSGGGGSEVQLVETGGGLVQPGKSLELTCATSGFTFNTAWMHWVRQSPDKRLEWIARIKDTSNNYATDYVESMKGRFTISRDDSKGSVNLQMNSLKEEDTATYYCTTDFYDGTYYWNYWGQGVMVTVSSTREQKLISEEDLAKPTTTPAPRPPTPAPTIASQPLSLRPEACRPAAGGAVHTRGLDFACDIYIWAPLAGTCGVLLLSLVITLYCGRARVKFSRSADAPAYQQGQNQLYNELNLGRREEYDVLDKRRGRDPEMGGKPRRKNPQEGLYNELQKDKMAEAYSEIGMKGERRRGKGHDGLYQGLSTATKDTYDALHMQALPPRSRGSGATNFSLLKQAGDVEENPGPGIHMATYEVLCEVARKLGTDDREVVLFLLNVFIPQPTLAQLIGALRALKEEGRLTFPLLAECLFRAGRRDLLRDLLHLDPRFLERHLAGTMSYFSPYQLTVLHVDGELCARDIRSLIFLSKDTIGSRSTPQTFLHWVYCMENLDLLGPTDVDALMSMLRSLSRVDLQRQVQTLMGLHLSGPSHSQHYRHTPLETDFYDYKDDDDKTSGSGEGRGSLLTCGDVEENPGPHMTEYKPTVRLATRDDVPRAVRTLAAAFADYPATRHTVDPDRHIERVTELQELFLTRVGLDIGKVWVADDGAAVAVWTTPESVEAGAVFAEIGPRMAELSGSRLAAQQQMEGLLAPHRPKEPAWFLATVGVSPDHQGKGLGSAVVLPGVEAAERAGVPAFLETSAPRNLPFYERLGFTVTADVEVPEGPRTWCMTRKPGA

SEQ ID NO: 19692 - protein, 858 aa, Artificial Sequence
  Synthetic Polypeptide
MALPVTALLLPLALLLHAARPSYELIQPPSAAVTLGNTVSLTCVGDELPKRYAYWYQQKPDQSIVRVIYEDSVRPPGISDRFSGSSSGTTATLTIRDAQNEDEADYYCQSTYGDDKLYIFGGGTKLTVLGLEIQNPDPAVYQLRDSKSSDKSVCLFTDFDSQTNVSQSKDSDVYITDKCVLDMRSMDFKSNSAVAWSNKSDFACANAFNNSIIPEDTFFPSSDVPCDVKLVEKSFETDTNLNFQNLSVIGFRILLLKVAGFNLLMTLRLWSSRAKRSGSGVKQTLNFDLLKLAGDVESNPGPTSMDWIWRILFLVGAATGAHSFEEVQLVETGGGLVQPGKSLELTCATSGFTFNTAWMHWVRQSPDKRLEWIARIKDTSNNYATDYVESMKGRFTISRDDSKGSVNLQMNSLKEEDTATYYCTTDFYDGTYYWNYWGQGVMVTVSSTREDLKNVFPPEVAVFEPSKAEIAHTQKATLVCLATGFYPDHVELSWWVNGKEVHSGVCTDPQPLKEQPALNDSRYCLSSRLRVSATFWQNPRNHFRCQVQFYGLSENDEWTQDRAKPVTQIVSAEAWGRADCGITSASYHQGVLSATILYEILLGKATLYAVLVSALVLMAMVKRKDSRGRAKRSGSGATNFSLLKQAGDVEENPGPSRGHMTEYKPTVRLATRDDVPRAVRTLAAAFADYPATRHTVDPDRHIERVTELQELFLTRVGLDIGKVWVADDGAAVAVWTTPESVEAGAVFAEIGPRMAELSGSRLAAQQQMEGLLAPHRPKEPAWFLATVGVSPDHQGKGLGSAVVLPGVEAAERAGVPAFLETSAPRNLPFYERLGFTVTADVEVPEGPRTWCMTRKPGA

SEQ ID NO: 19693 - protein, 857 aa, Artificial Sequence
  Synthetic Polypeptide
MALPVTALLLPLALLLHAARPSYELIQPPSAAVTLGNTVSLTCVGDELPKRYAYWYQQKPDQSIVRVIYEDSVRPPGISDRFSGSSSGTTATLTIRDAQNEDEADYYCQSTYGDDKLYIFGGGTKLTVLGLEDLKNVFPPEVAVFEPSKAEIAHTQKATLVCLATGFYPDHVELSWWVNGKEVHSGVCTDPQPLKEQPALNDSRYCLSSRLRVSATFWQNPRNHFRCQVQFYGLSENDEWTQDRAKPVTQIVSAEAWGRADCGITSASYHQGVLSATILYEILLGKATLYAVLVSALVLMAMVKRKDSRGRAKRSGSGATNFSLLKQAGDVEENPGPTSMDWIWRILFLVGAATGAHSFEEVQLVETGGGLVQPGKSLELTCATSGFTFNTAWMHWVRQSPDKRLEWIARIKDTSNNYATDYVESMKGRFTISRDDSKGSVNLQMNSLKEEDTATYYCTTDFYDGTYYWNYWGQGVMVTVSSTRIQNPDPAVYQLRDSKSSDKSVCLFTDFDSQTNVSQSKDSDVYITDKCVLDMRSMDFKSNSAVAWSNKSDFACANAFNNSIIPEDTFFPSSDVPCDVKLVEKSFETDTNLNFQNLSVIGFRILLLKVAGFNLLMTLRLWSSRAKRSGSGVKQTLNFDLLKLAGDVESNPGPSRGHMTEYKPTVRLATRDDVPRAVRTLAAAFADYPATRHTVDPDRHIERVTELQELFLTRVGLDIGKVWVADDGAAVAVWTTPESVEAGAVFAEIGPRMAELSGSRLAAQQQMEGLLAPHRPKEPAWFLATVGVSPDHQGKGLGSAVVLPGVEAAERAGVPAFLETSAPRNLPFYERLGFTVTADVEVPEGPRTWCMTRKPGA

SEQ ID NO: 19694 - protein, 624 aa, Artificial Sequence
  Synthetic Polypeptide
MALPVTALLLPLALLLHAARPSYELIQPPSAAVTLGNTVSLTCVGDELPKRYAYWYQQKPDQSIVRVIYEDSVRPPGISDRFSGSSSGTTATLTIRDAQNEDEADYYCQSTYGDDKLYIFGGGTKLTVLGLEDLKNVFPPEVAVFEPSEAEISHTQKATLVCLATGFYPDHVELSWWVNGKEVHSGVCTDPQPLKEQPALNDSRYCLSSRLRVSATFWQNPRNHFRCQVQFYGLSENDEWTQDRAKPVTQIVSAEAWGRADCGFTSESYQQGVLSATILYEILLGKATLYAVLVSALVLMAMVKRKDSRGRAKRSGSGATNFSLLKQAGDVEENPGPTSMDWIWRILFLVGAATGAHSFEEVQLVETGGGLVQPGKSLELTCATSGFTFNTAWMHWVRQSPDKRLEWIARIKDTSNNYATDYVESMKGRFTISRDDSKGSVNLQMNSLKEEDTATYYCTTDFYDGTYYWNYWGQGVMVTVSSTRIQNPDPAVYQLRDSKSSDKSVCLFTDFDSQTNVSQSKDSDVYITDKCVLDMRSMDFKSNSAVAWSNKSDFACANAFNNSIIPEDTFFPSPESSCDVKLVEKSFETDTNLNFQNLSVIGFRILLLKVAGFNLLMTLRLWSS

SEQ ID NO: 19695 - protein, 849 aa, Artificial Sequence
  Synthetic Polypeptide
MALPVTALLLPLALLLHAARPSYELIQPPSAAVTLGNTVSLTCVGDELPKRYAYWYQQKPDQSIVRVIYEDSVRPPGISDRFSGSSSGTTATLTIRDAQNEDEADYYCQSTYGDDKLYIFGGGTKLTVLGLEDLKNVFPPEVAVFEPSEAEISHTQKATLVCLATGFYPDHVELSWWVNGKEVHSGVCTDPQPLKEQPALNDSRYCLSSRLRVSATFWQNPRNHFRCQVQFYGLSENDEWTQDRAKPVTQIVSAEAWGRADCGFTSESYQQGVLSATILYEILLGKATLYAVLVSALVLMAMVKRKDSRGRAKRSGSGATNFSLLKQAGDVEENPGPTSMDWIWRILFLVGAATGAHSFEEVQLVETGGGLVQPGKSLELTCATSGFTFNTAWMHWVRQSPDKRLEWIARIKDTSNNYATDYVESMKGRFTISRDDSKGSVNLQMNSLKEEDTATYYCTTDFYDGTYYWNYWGQGVMVTVSSTRIQNPDPAVYQLRDSKSSDKSVCLFTDFDSQTNVSQSKDSDVYITDKCVLDMRSMDFKSNSAVAWSNKSDFACANAFNNSIIPEDTFFPSPESSCDVKLVEKSFETDTNLNFQNLSVIGFRILLLKVAGFNLLMTLRLWSSRAKRSGSGVKQTLNFDLLKLAGDVESNPGPSRGGIHTMATYEVLCEVARKLGTDDREVVLFLLNVFIPQPTLAQLIGALRALKEEGRLTFPLLAECLFRAGRRDLLRDLLHLDPRFLERHLAGTMSYFSPYQLTVLHVDGELCARDIRSLIFLSKDTIGSRSTPQTFLHWVYCMENLDLLGPTDVDALMSMLRSLSRVDLQRQVQTLMGLHLSGPSHSQHYRHTP

SEQ ID NO: 19696 - protein, 628 aa, Artificial Sequence
  Synthetic Polypeptide
MALPVTALLLPLALLLHAARPSYELIQPPSAAVTLGNTVSLTCVGDELPKRYAYWYQQKPDQSIVRVIYEDSVRPPGISDRFSGSSSGTTATLTIRDAQNEDEADYYCQSTYGDDKLYIFGGGTKLTVLGLEIQNPDPAVYQLRDSKSSDKSVCLFTDFDSQTNVSQSKDSDVYITDKCVLDMRSMDFKSNSAVAWSNKSDFACANAFNNSIIPEDTFFPSPESSCDVKLVEKSFETDTNLNFQNLSVIGFRILLLKVAGFNLLMTLRLWSSRAKRSGSGVKQTLNFDLLKLAGDVESNPGPTSMDWIWRILFLVGAATGAHSFEEVQLVETGGGLVQPGKSLELTCATSGFTFNTAWMHWVRQSPDKRLEWIARIKDTSNNYATDYVESMKGRFTISRDDSKGSVNLQMNSLKEEDTATYYCTTDFYDGTYYWNYWGQGVMVTVSSTREDLKNVFPPEVAVFEPSEAEISHTQKATLVCLATGFYPDHVELSWWVNGKEVHSGVCTDPQPLKEQPALNDSRYCLSSRLRVSATFWQNPRNHFRCQVQFYGLSENDEWTQDRAKPVTQIVSAEAWGRADCGFTSESYQQGVLSATILYEILLGKATLYAVLVSALVLMAMVKRKDSRG

SEQ ID NO: 19697 - protein, 850 aa, Artificial Sequence
  Synthetic Polypeptide
MALPVTALLLPLALLLHAARPSYELIQPPSAAVTLGNTVSLTCVGDELPKRYAYWYQQKPDQSIVRVIYEDSVRPPGISDRFSGSSSGTTATLTIRDAQNEDEADYYCQSTYGDDKLYIFGGGTKLTVLGLEIQNPDPAVYQLRDSKSSDKSVCLFTDFDSQTNVSQSKDSDVYITDKCVLDMRSMDFKSNSAVAWSNKSDFACANAFNNSIIPEDTFFPSPESSCDVKLVEKSFETDTNLNFQNLSVIGFRILLLKVAGFNLLMTLRLWSSRAKRSGSGVKQTLNFDLLKLAGDVESNPGPTSMDWIWRILFLVGAATGAHSFEEVQLVETGGGLVQPGKSLELTCATSGFTFNTAWMHWVRQSPDKRLEWIARIKDTSNNYATDYVESMKGRFTISRDDSKGSVNLQMNSLKEEDTATYYCTTDFYDGTYYWNYWGQGVMVTVSSTREDLKNVFPPEVAVFEPSEAEISHTQKATLVCLATGFYPDHVELSWWVNGKEVHSGVCTDPQPLKEQPALNDSRYCLSSRLRVSATFWQNPRNHFRCQVQFYGLSENDEWTQDRAKPVTQIVSAEAWGRADCGFTSESYQQGVLSATILYEILLGKATLYAVLVSALVLMAMVKRKDSRGRAKRSGSGATNFSLLKQAGDVEENPGPSRGGIHTMATYEVLCEVARKLGTDDREVVLFLLNVFIPQPTLAQLIGALRALKEEGRLTFPLLAECLFRAGRRDLLRDLLHLDPRFLERHLAGTMSYFSPYQLTVLHVDGELCARDIRSLIFLSKDTIGSRSTPQTFLHWVYCMENLDLLGPTDVDALMSMLRSLSRVDLQRQVQTLMGLHLSGPSHSQHYRHTP

SEQ ID NO: 19698 - protein, 902 aa, Artificial Sequence
  Synthetic Polypeptide
MALPVTALLLPLALLLHAARPLEGKPIPNPLLGLDSTGSGEDLKNVFPPEVAVFEPSKAEIAHTQKATLVCLATGFYPDHVELSWWVNGKEVHSGVCTDPQPLKEQPALNDSRYCLSSRLRVSATFWQNPRNHFRCQVQFYGLSENDEWTQDRAKPVTQIVSAEAWGRADCGITSASYHQGVLSATILYEILLGKATLYAVLVSALVLMAMVKRKDSRGRAKRSGSGATNFSLLKQAGDVEENPGPTSMALPVTALLLPLALLLHAARPSYELIQPPSAAVTLGNTVSLTCVGDELPKRYAYWYQQKPDQSIVRVIYEDSVRPPGISDRFSGSSSGTTATLTIRDAQNEDEADYYCQSTYGDDKLYIFGGGTKLTVLGGGGGSGGGGSGGGGSEVQLVETGGGLVQPGKSLELTCATSGFTFNTAWMHWVRQSPDKRLEWIARIKDTSNNYATDYVESMKGRFTISRDDSKGSVNLQMNSLKEEDTATYYCTTDFYDGTYYWNYWGQGVMVTVSSTREQKLISEEDGSGIQNPDPAVYQLRDSKSSDKSVCLFTDFDSQTNVSQSKDSDVYITDKCVLDMRSMDFKSNSAVAWSNKSDFACANAFNNSIIPEDTFFPSSDVPCDVKLVEKSFETDTNLNFQNLSVIGFRILLLKVAGFNLLMTLRLWSSRAKRSGSGVKQTLNFDLLKLAGDVESNPGPSRGHMTEYKPTVRLATRDDVPRAVRTLAAAFADYPATRHTVDPDRHIERVTELQELFLTRVGLDIGKVWVADDGAAVAVWTTPESVEAGAVFAEIGPRMAELSGSRLAAQQQMEGLLAPHRPKEPAWFLATVGVSPDHQGKGLGSAVVLPGVEAAERAGVPAFLETSAPRNLPFYERLGFTVTADVEVPEGPRTWCMTRKPGA

SEQ ID NO: 19699 - protein, 903 aa, Artificial Sequence
  Synthetic Polypeptide
MALPVTALLLPLALLLHAARPLEQKLISEEDLGSGDRPDPAVYQLRDSKSSDKSVCLFTDFDSQTNVSQSKDSDVYITDKCVLDMRSMDFKSNSAVAWSNKSDFACANAFNNSIIPEDTFFPSPESSCDVKLVEKSFETDTNLNFQNLSVIGFRILLLKVAGFNLLMTLRLWSSSSRAKRSGSGVKQTLNFDLLKLAGDVESNPGPTSMALPVTALLLPLALLLHAARPSYELIQPPSAAVTLGNTVSLTCVGDELPKRYAYWYQQKPDQSIVRVIYEDSVRPPGISDRFSGSSSGTTATLTIRDAQNEDEADYYCQSTYGDDKLYIFGGGTKLTVLGGGGGSGGGGSGGGGSEVQLVETGGGLVQPGKSLELTCATSGFTFNTAWMHWVRQSPDKRLEWIARIKDTSNNYATDYVESMKGRFTISRDDSKGSVNLQMNSLKEEDTATYYCTTDFYDGTYYWNYWGQGVMVTVSSTRGKPIPNPLLGLDSTGSGEDLKNVFPPEVAVFEPSEAEISHTQKATLVCLATGFYPDHVELSWWVNGKEVHSGVCTDPQPLKEQPALNDSRYCLSSRLRVSATFWQNPRNHFRCQVQFYGLSENDEWTQDRAKPVTQIVSAEAWGRADCGFTSESYQQGVLSATILYEILLGKATLYAVLVSALVLMAMVKRKDSRGRAKRSGSGATNFSLLKQAGDVEENPGPSRGHMTEYKPTVRLATRDDVPRAVRTLAAAFADYPATRHTVDPDRHIERVTELQELFLTRVGLDIGKVWVADDGAAVAVWTTPESVEAGAVFAEIGPRMAELSGSRLAAQQQMEGLLAPHRPKEPAWFLATVGVSPDHQGKGLGSAVVLPGVEAAERAGVPAFLETSAPRNLPFYERLGFTVTADVEVPEGPRTWCMTRKPGA

SEQ ID NO: 19700 - protein, 857 aa, Artificial Sequence
  Synthetic Polypeptide
MALPVTALLLPLALLLHAARPSYELIQPPSAAVTLGNTVSLTCVGDELPKRYAYWYQQKPDQSIVRVIYEDSVRPPGISDRFSGSSSGTTATLTIRDAQNEDEADYYCQSTYGDDKLYIFGGGTKLTVLGLEDLKNVFPPEVAVFEPSEAEISHTQKATLVCLATGFYPDHVELSWWVNGKEVHSGVSTDPQPLKEQPALNDSRYCLSSRLRVSATFWQNPRNHFRCQVQFYGLSENDEWTQDRAKPVTQIVSAEAWGRADCGFTSESYQQGVLSATILYEILLGKATLYAVLVSALVLMAMVKRKDSRGRAKRSGSGATNFSLLKQAGDVEENPGPTSMDWIWRILFLVGAATGAHSFEEVQLVETGGGLVQPGKSLELTCATSGFTFNTAWMHWVRQSPDKRLEWIARIKDTSNNYATDYVESMKGRFTISRDDSKGSVNLQMNSLKEEDTATYYCTTDFYDGTYYWNYWGQGVMVTVSSTRIQNPDPAVYQLRDSKSSDKSVCLFTDFDSQTNVSQSKDSDVYITDKTVLDMRSMDFKSNSAVAWSNKSDFACANAFNNSIIPEDTFFPSPESSCDVKLVEKSFETDTNLNFQNLSVIGFRILLLKVAGFNLLMTLRLWSSRAKRSGSGVKQTLNFDLLKLAGDVESNPGPSRGHMTEYKPTVRLATRDDVPRAVRTLAAAFADYPATRHTVDPDRHIERVTELQELFLTRVGLDIGKVWVADDGAAVAVWTTPESVEAGAVFAEIGPRMAELSGSRLAAQQQMEGLLAPHRPKEPAWFLATVGVSPDHQGKGLGSAVVLPGVEAAERAGVPAFLETSAPRNLPFYERLGFTVTADVEVPEGPRTWCMTRKPGA

SEQ ID NO: 19701 - protein, 939 aa, Artificial Sequence
  Synthetic Polypeptide
MALPVTALLLPLALLLHAARPSYELIQPPSAAVTLGNTVSLTCVGDELPKRYAYWYQQKPDQSIVRVIYEDSVRPPGISDRFSGSSSGTTATLTIRDAQNEDEADYYCQSTYGDDKLYIFGGGTKLTVLGLEDLKNVFPPEVAVFEPSEAEISHTQKATLVCLATGFYPDHVELSWWVNGKEVHSGVSTDPQPLKEQPALNDSRYCLSSRLRVSATFWQNPRNHFRCQVQFYGLSENDEWTQDRAKPVTQIVSAEAWGRADCGFTSESYQQGVLSATILYEILLGKATLYAVLVSALVLMAMVKRKDSRGRAKRSGSGATNFSLLKQAGDVEENPGPTSMDWIWRILFLVGAATGAHSFEEVQLVETGGGLVQPGKSLELTCATSGFTFNTAWMHWVRQSPDKRLEWIARIKDTSNNYATDYVESMKGRFTISRDDSKGSVNLQMNSLKEEDTATYYCTTDFYDGTYYWNYWGQGVMVTVSSTREQKLISEEDGSGTPFPSLAPPIMLLVDGKQQMVVVCLVLDVAPPGLDSPIWFSAGNGSALDAFTYGPSPATDGTWTNLAHLSLPSEELASWEPLVCHTGPGAEGHSRSTQPMHLSGEASTARTCPQEPLRGTPGGALWLGVLRLLLFKLLLFDLLLTCSCLCDPAGPLPSPATTTRLRALGSHRLHPATETGGREATSSPRPQPRDRRWGDTPPGRKPGSPVRAKRSGSGVKQTLNFDLLKLAGDVESNPGPSRGHMTEYKPTVRLATRDDVPRAVRTLAAAFADYPATRHTVDPDRHIERVTELQELFLTRVGLDIGKVWVADDGAAVAVWTTPESVEAGAVFAEIGPRMAELSGSRLAAQQQMEGLLAPHRPKEPAWFLATVGVSPDHQGKGLGSAVVLPGVEAAERAGVPAFLETSAPRNLPFYERLGFTVTADVEVPEGPRTWCMTRKPGA

SEQ ID NO: 19702 - protein, 957 aa, Artificial Sequence
  Synthetic Polypeptide
MALPVTALLLPLALLLHAARPLEDLKNVFPPEVAVFEPSEAEISHTQKATLVCLATGFYPDHVELSWWVNGKEVHSGVSTDPQPLKEQPALNDSRYCLSSRLRVSATFWQNPRNHFRCQVQFYGLSENDEWTQDRAKPVTQIVSAEAWGRADCGFTSESYQQGVLSATILYEILLGKATLYAVLVSALVLMAMVKRKDSRGRAKRSGSGATNFSLLKQAGDVEENPGPTSMALPVTALLLPLALLLHAARPSYELIQPPSAAVTLGNTVSLTCVGDELPKRYAYWYQQKPDQSIVRVIYEDSVRPPGISDRFSGSSSGTTATLTIRDAQNEDEADYYCQSTYGDDKLYIFGGGTKLTVLGGGGGSGGGGSGGGGSEVQLVETGGGLVQPGKSLELTCATSGFTFNTAWMHWVRQSPDKRLEWIARIKDTSNNYATDYVESMKGRFTISRDDSKGSVNLQMNSLKEEDTATYYCTTDFYDGTYYWNYWGQGVMVTVSSTREQKLISEEDLGSGTPFPSLAPPIMLLVDGKQQMVVVCLVLDVAPPGLDSPIWFSAGNGSALDAFTYGPSPATDGTWTNLAHLSLPSEELASWEPLVCHTGPGAEGHSRSTQPMHLSGEASTARTCPQEPLRGTPGGALWLGVLRLLLFKLLLFDLLLTCSCLCDPAGPLPSPATTTRLRALGSHRLHPATETGGREATSSPRPQPRDRRWGDTPPGRKPGSPVRAKRSGSGVKQTLNFDLLKLAGDVESNPGPSRSRGHMTEYKPTVRLATRDDVPRAVRTLAAAFADYPATRHTVDPDRHIERVTELQELFLTRVGLDIGKVWVADDGAAVAVWTTPESVEAGAVFAEIGPRMAELSGSRLAAQQQMEGLLAPHRPKEPAWFLATVGVSPDHQGKGLGSAVVLPGVEAAERAGVPAFLETSAPRNLPFYERLGFTVTADVEVPEGPRTWCMTRKPGA

SEQ ID NO: 19703 - protein, 894 aa, Artificial Sequence
  Synthetic Polypeptide
MALPVTALLLPLALLLHAARPSYELIQPPSAAVTLGNTVSLTCVGDELPKRYAYWYQQKPDQSIVRVIYEDSVRPPGISDRFSGSSSGTTATLTIRDAQNEDEADYYCQSTYGDDKLYIFGGGTKLTVLGLEGKPIPNPLLGLDSTGSGDKQLDADVSPKPTIFLPSIAETKLQKAGTYLCLLEKFFPDVIKIHWQEKKSNTILGSQEGNTMKTNDTYMKFSWLTVPEKSLDKEHRCIVRHENNKNGVDQEIIFPPIKTDVITMDPKDNCSKDANDTLLLQLTNTSAYYMYLLLLLKSVVYFAIITCCLLRRTAFCCNGEKSRAKRSGSGATNFSLLKQAGDVEENPGPTSMDWIWRILFLVGAATGAHSFEEVQLVETGGGLVQPGKSLELTCATSGFTFNTAWMHWVRQSPDKRLEWIARIKDTSNNYATDYVESMKGRFTISRDDSKGSVNLQMNSLKEEDTATYYCTTDFYDGTYYWNYWGQGVMVTVSSTREQKLISEEDGSGSQPHTKPSVFVMKNGTNVACLVKEFYPKDIRINLVSSKKITEFDPAIVISPSGKYNAVKLGKYEDSNSVTCSVQHDNKTVHSTDFEVKTDSTDHVKPKETENTKQPSKSCHKPKAIVHTEKVNMMSLTVLGLRMLFAKTVAVNFLLTAKLFFLRAKRSGSGVKQTLNFDLLKLAGDVESNPGPSRGHMTEYKPTVRLATRDDVPRAVRTLAAAFADYPATRHTVDPDRHIERVTELQELFLTRVGLDIGKVWVADDGAAVAVWTTPESVEAGAVFAEIGPRMAELSGSRLAAQQQMEGLLAPHRPKEPAWFLATVGVSPDHQGKGLGSAVVLPGVEAAERAGVPAFLETSAPRNLPFYERLGFTVTADVEVPEGPRTWCMTRKPGA

SEQ ID NO: 19704 - protein, 632 aa, Artificial Sequence
  Synthetic Polypeptide
MALPVTALLLPLALLLHAARPSYELIQPPSAAVTLGNTVSLTCVGDELPKRYAYWYQQKPDQSIVRVIYEDSVRPPGISDRFSGSSSGTTATLTIRDAQNEDEADYYCQSTYGDDKLYIFGGGTKLTVLGLESQPHTKPSVFVMKNGTNVACLVKEFYPKDIRINLVSSKKITEFDPAIVISPSGKYNAVKLGKYEDSNSVTCSVQHDNKTVHSTDFEVKTDSTDHVKPKETENTKQPSKSCHKPKAIVHTEKVNMMSLTVLGLRMLFAKTVAVNFLLTAKLFFLRAKRSGSGATNFSLLKQAGDVEENPGPTSMDWIWRILFLVGAATGAHSFEEVQLVETGGGLVQPGKSLELTCATSGFTFNTAWMHWVRQSPDKRLEWIARIKDTSNNYATDYVESMKGRFTISRDDSKGSVNLQMNSLKEEDTATYYCTTDFYDGTYYWNYWGQGVMVTVSSTRDKQLDADVSPKPTIFLPSIAETKLQKAGTYLCLLEKFFPDVIKIHWQEKKSNTILGSQEGNTMKTNDTYMKFSWLTVPEKSLDKEHRCIVRHENNKNGVDQEIIFPPIKTDVITMDPKDNCSKDANDTLLLQLTNTSAYYMYLLLLLKSVVYFAIITCCLLRRTAFCCNGEKS

SEQ ID NO: 19705 - protein, 909 aa, Artificial Sequence
  Synthetic Polypeptide
MALPVTALLLPLALLLHAARPLEGKPIPNPLLGLDSTGSGDKQLDADVSPKPTIFLPSIAETKLQKAGTYLCLLEKFFPDVIKIHWQEKKSNTILGSQEGNTMKTNDTYMKFSWLTVPEKSLDKEHRCIVRHENNKNGVDQEIIFPPIKTDVITMDPKDNCSKDANDTLLLQLTNTSAYYMYLLLLLKSVVYFAIITCCLLRRTAFCCNGEKSRAKRSGSGATNFSLLKQAGDVEENPGPTSMALPVTALLLPLALLLHAARPSYELIQPPSAAVTLGNTVSLTCVGDELPKRYAYWYQQKPDQSIVRVIYEDSVRPPGISDRFSGSSSGTTATLTIRDAQNEDEADYYCQSTYGDDKLYIFGGGTKLTVLGGGGGSGGGGSGGGGSEVQLVETGGGLVQPGKSLELTCATSGFTFNTAWMHWVRQSPDKRLEWIARIKDTSNNYATDYVESMKGRFTISRDDSKGSVNLQMNSLKEEDTATYYCTTDFYDGTYYWNYWGQGVMVTVSSTREQKLISEEDGSGSQPHTKPSVFVMKNGTNVACLVKEFYPKDIRINLVSSKKITEFDPAIVISPSGKYNAVKLGKYEDSNSVTCSVQHDNKTVHSTDFEVKTDSTDHVKPKETENTKQPSKSCHKPKAIVHTEKVNMMSLTVLGLRMLFAKTVAVNFLLTAKLFFLRAKRSGSGVKQTLNFDLLKLAGDVESNPGPSRGHMTEYKPTVRLATRDDVPRAVRTLAAAFADYPATRHTVDPDRHIERVTELQELFLTRVGLDIGKVWVADDGAAVAVWTTPESVEAGAVFAEIGPRMAELSGSRLAAQQQMEGLLAPHRPKEPAWFLATVGVSPDHQGKGLGSAVVLPGVEAAERAGVPAFLETSAPRNLPFYERLGFTVTADVEVPEGPRTWCMTRKPGA

SEQ ID NO: 19706 - protein, 1034 aa, Artificial Sequence
  Synthetic Polypeptide
MALPVTALLLPLALLLHAARPSYELIQPPSAAVTLGNTVSLTCVGDELPKRYAYWYQQKPDQSIVRVIYEDSVRPPGISDRFSGSSSGTTATLTIRDAQNEDEADYYCQSTYGDDKLYIFGGGTKLTVLGGQPKANPTVTLFPPSSEELQANKATLVCLISDFYPGAVTVAWKADGSPVKAGVETTKPSKQSNNKYAASSYLSLTPEQWKSHRSYSCQVTHEGSTVEKTVAPTECSGSQSFGLLDPKLCYLLDGILFIYGVILTALFLRVKFSRSADAPAYQQGQNQLYNELNLGRREEYDVLDKRRGRDPEMGGKPQRRKNPQEGLYNELQKDKMAEAYSEIGMKGERRRGKGHDGLYQGLSTATKDTYDALHMQALPPRRAKRSGSGATNFSLLKQAGDVEENPGPTSMDWIWRILFLVGAATGAHSFEEVQLVETGGGLVQPGKSLELTCATSGFTFNTAWMHWVRQSPDKRLEWIARIKDTSNNYATDYVESMKGRFTISRDDSKGSVNLQMNSLKEEDTATYYCTTDFYDGTYYWNYWGQGVMVTVSSASTKGPSVFPLAPSSKSTSGGTAALGCLVKDYFPEPVTVSWNSGALTSGVHTFPAVLQSSGLYSLSSVVTVPSSSLGTQTYICNVNHKPSNTKVDKRVEPKSCGTQSFGLLDPKLCYLLDGILFIYGVILTALFLRVKFSRSADAPAYQQGQNQLYNELNLGRREEYDVLDKRRGRDPEMGGKPQRRKNPQEGLYNELQKDKMAEAYSEIGMKGERRRGKGHDGLYQGLSTATKDTYDALHMQALPPRRAKRSGSGVKQTLNFDLLKLAGDVESNPGPSRGHMTEYKPTVRLATRDDVPRAVRTLAAAFADYPATRHTVDPDRHIERVTELQELFLTRVGLDIGKVWVADDGAAVAVWTTPESVEAGAVFAEIGPRMAELSGSRLAAQQQMEGLLAPHRPKEPAWFLATVGVSPDHQGKGLGSAVVLPGVEAAERAGVPAFLETSAPRNLPFYERLGFTVTADVEVPEGPRTWCMTRKPGA

SEQ ID NO: 19707 - protein, 820 aa, Artificial Sequence
  Synthetic Polypeptide
MALPVTALLLPLALLLHAARPSYELIQPPSAAVTLGNTVSLTCVGDELPKRYAYWYQQKPDQSIVRVIYEDSVRPPGISDRFSGSSSGTTATLTIRDAQNEDEADYYCQSTYGDDKLYIFGGGTKLTVLGLEDLKNVFPPEVAVFEPSEAEISHTQKATLVCLATGFYPDHVELSWWVNGKEVHSGVSTDPQPLKEQPALNDSRYCLSSRLRVSATFWQNPRNHFRCQVQFYGLSENDEWTQDRAKPVTQIVSAEAWGRADCGSQSFGLLDPKLCYLLDGILFIYGVILTALFLRVKFSRSADAPAYQQGQNQLYNELNLGRREEYDVLDKRRGRDPEMGGKPQRRKNPQEGLYNELQKDKMAEAYSEIGMKGERRRGKGHDGLYQGLSTATKDTYDALHMQALPPRRAKRSGSGATNFSLLKQAGDVEENPGPTSMDWIWRILFLVGAATGAHSFEEVQLVETGGGLVQPGKSLELTCATSGFTFNTAWMHWVRQSPDKRLEWIARIKDTSNNYATDYVESMKGRFTISRDDSKGSVNLQMNSLKEEDTATYYCTTDFYDGTYYWNYWGQGVMVTVSSTRIQNPDPAVYQLRDSKSSDKSVCLFTDFDSQTNVSQSKDSDVYITDKTVLDMRSMDFKSNSAVAWSNKSDFACANAFNNSIIPEDTFFPSPESSCGTQSFGLLDPKLCYLLDGILFIYGVILTALFLRVKFSRSADAPAYQQGQNQLYNELNLGRREEYDVLDKRRGRDPEMGGKPQRRKNPQEGLYNELQKDKMAEAYSEIGMKGERRRGKGHDGLYQGLSTATKDTYDALHMQALPPR

SEQ ID NO: 19708 - protein, 820 aa, Artificial Sequence
  Synthetic Polypeptide
MALPVTALLLPLALLLHAARPSYELIQPPSAAVTLGNTVSLTCVGDELPKRYAYWYQQKPDQSIVRVIYEDSVRPPGISDRFSGSSSGTTATLTIRDAQNEDEADYYCQSTYGDDKLYIFGGGTKLTVLGLEDLKNVFPPEVAVFEPSKAEIAHTQKATLVCLATGFYPDHVELSWWVNGKEVHSGVCTDPQPLKEQPALNDSRYCLSSRLRVSATFWQNPRNHFRCQVQFYGLSENDEWTQDRAKPVTQIVSAEAWGRADCGSQSFGLLDPKLCYLLDGILFIYGVILTALFLRVKFSRSADAPAYQQGQNQLYNELNLGRREEYDVLDKRRGRDPEMGGKPQRRKNPQEGLYNELQKDKMAEAYSEIGMKGERRRGKGHDGLYQGLSTATKDTYDALHMQALPPRRAKRSGSGATNFSLLKQAGDVEENPGPTSMDWIWRILFLVGAATGAHSFEEVQLVETGGGLVQPGKSLELTCATSGFTFNTAWMHWVRQSPDKRLEWIARIKDTSNNYATDYVESMKGRFTISRDDSKGSVNLQMNSLKEEDTATYYCTTDFYDGTYYWNYWGQGVMVTVSSTRIQNPDPAVYQLRDSKSSDKSVCLFTDFDSQTNVSQSKDSDVYITDKCVLDMRSMDFKSNSAVAWSNKSDFACANAFNNSIIPEDTFFPSSDVPCGTQSFGLLDPKLCYLLDGILFIYGVILTALFLRVKFSRSADAPAYQQGQNQLYNELNLGRREEYDVLDKRRGRDPEMGGKPQRRKNPQEGLYNELQKDKMAEAYSEIGMKGERRRGKGHDGLYQGLSTATKDTYDALHMQALPPR

SEQ ID NO: 19709 - protein, 891 aa, Artificial Sequence
  Synthetic Polypeptide
MALPVTALLLPLALLLHAARPSYELIQPPSAAVTLGNTVSLTCVGDELPKRYAYWYQQKPDQSIVRVIYEDSVRPPGISDRFSGSSSGTTATLTIRDAQNEDEADYYCQSTYGDDKLYIFGGGTKLTVLGLEGKPIPNPLLGLDSTGSGEDLKNVFPPEVAVFEPSEAEISHTQKATLVCLATGFYPDHVELSWWVNGKEVHSGVSTDPQPLKEQPALNDSRYCLSSRLRVSATFWQNPRNHFRCQVQFYGLSENDEWTQDRAKPVTQIVSAEAWGRADCGSQSFGLLDPKLCYLLDGILFIYGVILTALFLRVKFSRSADAPAYQQGQNQLYNELNLGRREEYDVLDKRRGRDPEMGGKPQRRKNPQEGLYNELQKDKMAEAYSEIGMKGERRRGKGHDGLYQGLSTATKDTYDALHMQALPPRRAKRSGSGATNFSLLKQAGDVEENPGPTSMDWIWRILFLVGAATGAHSFEEVQLVETGGGLVQPGKSLELTCATSGFTFNTAWMHWVRQSPDKRLEWIARIKDTSNNYATDYVESMKGRFTISRDDSKGSVNLQMNSLKEEDTATYYCTTDFYDGTYYWNYWGQGVMVTVSSTREQKLISEEDGSGIQNPDPAVYQLRDSKSSDKSVCLFTDFDSQTNVSQSKDSDVYITDKTVLDMRSMDFKSNSAVAWSNKSDFACANAFNNSIIPEDTFFPSPESSCGTQSFGLLDPKLCYLLDGILFIYGVILTALFLRSKRSRLLHSDYMNMTPRRPGPTRKHYQPYAPPRDFAAYRSRVKFSRSADAPAYQQGQNQLYNELNLGRREEYDVLDKRRGRDPEMGGKPQRRKNPQEGLYNELQKDKMAEAYSEIGMKGERRRGKGHDGLYQGLSTATKDTYDALHMQALPPR

SEQ ID NO: 19710 - protein, 932 aa, Artificial Sequence
  Synthetic Polypeptide
MALPVTALLLPLALLLHAARPSYELIQPPSAAVTLGNTVSLTCVGDELPKRYAYWYQQKPDQSIVRVIYEDSVRPPGISDRFSGSSSGTTATLTIRDAQNEDEADYYCQSTYGDDKLYIFGGGTKLTVLGLEGKPIPNPLLGLDSTGSGEDLKNVFPPEVAVFEPSEAEISHTQKATLVCLATGFYPDHVELSWWVNGKEVHSGVSTDPQPLKEQPALNDSRYCLSSRLRVSATFWQNPRNHFRCQVQFYGLSENDEWTQDRAKPVTQIVSAEAWGRADCGSQSFGLLDPKLCYLLDGILFIYGVILTALFLRSKRSRLLHSDYMNMTPRRPGPTRKHYQPYAPPRDFAAYRSRVKFSRSADAPAYQQGQNQLYNELNLGRREEYDVLDKRRGRDPEMGGKPQRRKNPQEGLYNELQKDKMAEAYSEIGMKGERRRGKGHDGLYQGLSTATKDTYDALHMQALPPRRAKRSGSGATNFSLLKQAGDVEENPGPTSMDWIWRILFLVGAATGAHSFEEVQLVETGGGLVQPGKSLELTCATSGFTFNTAWMHWVRQSPDKRLEWIARIKDTSNNYATDYVESMKGRFTISRDDSKGSVNLQMNSLKEEDTATYYCTTDFYDGTYYWNYWGQGVMVTVSSTREQKLISEEDGSGIQNPDPAVYQLRDSKSSDKSVCLFTDFDSQTNVSQSKDSDVYITDKTVLDMRSMDFKSNSAVAWSNKSDFACANAFNNSIIPEDTFFPSPESSCGTQSFGLLDPKLCYLLDGILFIYGVILTALFLRSKRSRLLHSDYMNMTPRRPGPTRKHYQPYAPPRDFAAYRSRVKFSRSADAPAYQQGQNQLYNELNLGRREEYDVLDKRRGRDPEMGGKPQRRKNPQEGLYNELQKDKMAEAYSEIGMKGERRRGKGHDGLYQGLSTATKDTYDALHMQALPPR

SEQ ID NO: 19711 - protein, 893 aa, Artificial Sequence
  Synthetic Polypeptide
MALPVTALLLPLALLLHAARPSYELIQPPSAAVTLGNTVSLTCVGDELPKRYAYWYQQKPDQSIVRVIYEDSVRPPGISDRFSGSSSGTTATLTIRDAQNEDEADYYCQSTYGDDKLYIFGGGTKLTVLGLEGKPIPNPLLGLDSTGSGEDLKNVFPPEVAVFEPSEAEISHTQKATLVCLATGFYPDHVELSWWVNGKEVHSGVSTDPQPLKEQPALNDSRYCLSSRLRVSATFWQNPRNHFRCQVQFYGLSENDEWTQDRAKPVTQIVSAEAWGRADCGSQSFGLLDPKLCYLLDGILFIYGVILTALFLRVKFSRSADAPAYQQGQNQLYNELNLGRREEYDVLDKRRGRDPEMGGKPQRRKNPQEGLYNELQKDKMAEAYSEIGMKGERRRGKGHDGLYQGLSTATKDTYDALHMQALPPRRAKRSGSGATNFSLLKQAGDVEENPGPTSMDWIWRILFLVGAATGAHSFEEVQLVETGGGLVQPGKSLELTCATSGFTFNTAWMHWVRQSPDKRLEWIARIKDTSNNYATDYVESMKGRFTISRDDSKGSVNLQMNSLKEEDTATYYCTTDFYDGTYYWNYWGQGVMVTVSSTREQKLISEEDLGSGIQNPDPAVYQLRDSKSSDKSVCLFTDFDSQTNVSQSKDSDVYITDKTVLDMRSMDFKSNSAVAWSNKSDFACANAFNNSIIPEDTFFPSPESSCGTQSFGLLDPKLCYLLDGILFIYGVILTALFLKRGRKKLLYIFKQPFMRPVQTTQEEDGCSCRFPEEEEGGCELRVKFSRSADAPAYQQGQNQLYNELNLGRREEYDVLDKRRGRDPEMGGKPQRRKNPQEGLYNELQKDKMAEAYSEIGMKGERRRGKGHDGLYQGLSTATKDTYDALHMQALPPR

SEQ ID NO: 19712 - protein, 935 aa, Artificial Sequence
  Synthetic Polypeptide
MALPVTALLLPLALLLHAARPSYELIQPPSAAVTLGNTVSLTCVGDELPKRYAYWYQQKPDQSIVRVIYEDSVRPPGISDRFSGSSSGTTATLTIRDAQNEDEADYYCQSTYGDDKLYIFGGGTKLTVLGLEGKPIPNPLLGLDSTGSGEDLKNVFPPEVAVFEPSEAEISHTQKATLVCLATGFYPDHVELSWWVNGKEVHSGVSTDPQPLKEQPALNDSRYCLSSRLRVSATFWQNPRNHFRCQVQFYGLSENDEWTQDRAKPVTQIVSAEAWGRADCGSQSFGLLDPKLCYLLDGILFIYGVILTALFLKRGRKKLLYIFKQPFMRPVQTTQEEDGCSCRFPEEEEGGCELRVKFSRSADAPAYQQGQNQLYNELNLGRREEYDVLDKRRGRDPEMGGKPQRRKNPQEGLYNELQKDKMAEAYSEIGMKGERRRGKGHDGLYQGLSTATKDTYDALHMQALPPRRAKRSGSGATNFSLLKQAGDVEENPGPTSMDWIWRILFLVGAATGAHSFEEVQLVETGGGLVQPGKSLELTCATSGFTFNTAWMHWVRQSPDKRLEWIARIKDTSNNYATDYVESMKGRFTISRDDSKGSVNLQMNSLKEEDTATYYCTTDFYDGTYYWNYWGQGVMVTVSSTREQKLISEEDLGSGIQNPDPAVYQLRDSKSSDKSVCLFTDFDSQTNVSQSKDSDVYITDKTVLDMRSMDFKSNSAVAWSNKSDFACANAFNNSIIPEDTFFPSPESSCGTQSFGLLDPKLCYLLDGILFIYGVILTALFLKRGRKKLLYIFKQPFMRPVQTTQEEDGCSCRFPEEEEGGCELRVKFSRSADAPAYQQGQNQLYNELNLGRREEYDVLDKRRGRDPEMGGKPQRRKNPQEGLYNELQKDKMAEAYSEIGMKGERRRGKGHDGLYQGLSTATKDTYDALHMQALPPR

SEQ ID NO: 19713 - protein, 825 aa, Artificial Sequence
  Synthetic Polypeptide
MALPVTALLLPLALLLHAARPSYELIQPPSAAVTLGNTVSLTCVGDELPKRYAYWYQQKPDQSIVRVIYEDSVRPPGISDRFSGSSSGTTATLTIRDAQNEDEADYYCQSTYGDDKLYIFGGGTKLTVLGLEQSFGLLDPKLCYLLDGILFIYGVILTALFLRVKFSRSADAPAYQQGQNQLYNELNLGRREEYDVLDKRRGRDPEMGGKPQRRKNPQEGLYNELQKDKMAEAYSEIGMKGERRRGKGHDGLYQGLSTATKDTYDALHMQALPPRRAKRSGSGATNFSLLKQAGDVEENPGPTSMDWIWRILFLVGAATGAHSFEEVQLVETGGGLVQPGKSLELTCATSGFTFNTAWMHWVRQSPDKRLEWIARIKDTSNNYATDYVESMKGRFTISRDDSKGSVNLQMNSLKEEDTATYYCTTDFYDGTYYWNYWGQGVMVTVSSTRQSFGLLDPKLCYLLDGILFIYGVILTALFLRVKFSRSADAPAYQQGQNQLYNELNLGRREEYDVLDKRRGRDPEMGGKPQRRKNPQEGLYNELQKDKMAEAYSEIGMKGERRRGKGHDGLYQGLSTATKDTYDALHMQALPPRRAKRSGSGVKQTLNFDLLKLAGDVESNPGPSRGHMTEYKPTVRLATRDDVPRAVRTLAAAFADYPATRHTVDPDRHIERVTELQELFLTRVGLDIGKVWVADDGAAVAVWTTPESVEAGAVFAEIGPRMAELSGSRLAAQQQMEGLLAPHRPKEPAWFLATVGVSPDHQGKGLGSAVVLPGVEAAERAGVPAFLETSAPRNLPFYERLGFTVTADVEVPEGPRTWCMTRKPGA

SEQ ID NO: 19714 - protein, 650 aa, Artificial Sequence
  Synthetic Polypeptide
MALPVTALLLPLALLLHAARPSYELIQPPSAAVTLGNTVSLTCVGDELPKRYAYWYQQKPDQSIVRVIYEDSVRPPGISDRFSGSSSGTTATLTIRDAQNEDEADYYCQSTYGDDKLYIFGGGTKLTVLGLEGQPKANPTVTLFPPSSEELQANKATLVCLISDFYPGAVTVAWKADGSPVKAGVETTKPSKQSNNKYAASSYLSLTPEQWKSHRSYSCQVTHEGSTVEKTVAPTECSPIKTDVITMDPKDNCSKDANDTLLLQLTNTSAYYMYLLLLLKSVVYFAIITCCLLRRTAFCCNGEKSRAKRSGSGATNFSLLKQAGDVEENPGPTSMDWIWRILFLVGAATGAHSFEEVQLVETGGGLVQPGKSLELTCATSGFTFNTAWMHWVRQSPDKRLEWIARIKDTSNNYATDYVESMKGRFTISRDDSKGSVNLQMNSLKEEDTATYYCTTDFYDGTYYWNYWGQGVMVTVSSTRASTKGPSVFPLAPSSKSTSGGTAALGCLVKDYFPEPVTVSWNSGALTSGVHTFPAVLQSSGLYSLSSVVTVPSSSLGTQTYICNVNHKPSNTKVDKRVEPKSCEVKTDSTDHVKPKETENTKQPSKSCHKPKAIVHTEKVNMMSLTVLGLRMLFAKTVAVNFLLTAKLFFL

SEQ ID NO: 19715 - protein, 628 aa, Artificial Sequence
  Synthetic Polypeptide
MALPVTALLLPLALLLHAARPSYELIQPPSAAVTLGNTVSLTCVGDELPKRYAYWYQQKPDQSIVRVIYEDSVRPPGISDRFSGSSSGTTATLTIRDAQNEDEADYYCQSTYGDDKLYIFGGGTKLTVLGLEGQPKANPTVTLFPPSSEELQANKATLVCLISDFYPGAVTVAWKADGSPVKAGVETTKPSKQSNNKYAASSYLSLTPEQWKSHRSYSCQVTHEGSTVEKTVAPTECSGRADCGITSASYHQGVLSATILYEILLGKATLYAVLVSALVLMAMVKRKDSRGRAKRSGSGATNFSLLKQAGDVEENPGPTSMDWIWRILFLVGAATGAHSFEEVQLVETGGGLVQPGKSLELTCATSGFTFNTAWMHWVRQSPDKRLEWIARIKDTSNNYATDYVESMKGRFTISRDDSKGSVNLQMNSLKEEDTATYYCTTDFYDGTYYWNYWGQGVMVTVSSTRASTKGPSVFPLAPSSKSTSGGTAALGCLVKDYFPEPVTVSWNSGALTSGVHTFPAVLQSSGLYSLSSVVTVPSSSLGTQTYICNVNHKPSNTKVDKRVEPKSCIPEDTFFPSSDVPCDVKLVEKSFETDTNLNFQNLSVIGFRILLLKVAGFNLLMTLRLWSS

SEQ ID NO: 19716 - protein, 628 aa, Artificial Sequence
  Synthetic Polypeptide
MALPVTALLLPLALLLHAARPSYELIQPPSAAVTLGNTVSLTCVGDELPKRYAYWYQQKPDQSIVRVIYEDSVRPPGISDRFSGSSSGTTATLTIRDAQNEDEADYYCQSTYGDDKLYIFGGGTKLTVLGLEGQPKANPTVTLFPPSSEELQANKATLVCLISDFYPGAVTVAWKADGSPVKAGVETTKPSKQSNNKYAASSYLSLTPEQWKSHRSYSCQVTHEGSTVEKTVAPTECSGRADCGFTSESYQQGVLSATILYEILLGKATLYAVLVSALVLMAMVKRKDSRGRAKRSGSGATNFSLLKQAGDVEENPGPTSMDWIWRILFLVGAATGAHSFEEVQLVETGGGLVQPGKSLELTCATSGFTFNTAWMHWVRQSPDKRLEWIARIKDTSNNYATDYVESMKGRFTISRDDSKGSVNLQMNSLKEEDTATYYCTTDFYDGTYYWNYWGQGVMVTVSSTRASTKGPSVFPLAPSSKSTSGGTAALGCLVKDYFPEPVTVSWNSGALTSGVHTFPAVLQSSGLYSLSSVVTVPSSSLGTQTYICNVNHKPSNTKVDKRVEPKSCIPEDTFFPSPESSCDVKLVEKSFETDTNLNFQNLSVIGFRILLLKVAGFNLLMTLRLWSS

SEQ ID NO: 19717 - protein, 454 aa, Artificial Sequence
  Synthetic Polypeptide
MALPVTALLLPLALLLHAARPSYELIQPPSAAVTLGNTVSLTCVGDELPKRYAYWYQQKPDQSIVRVIYEDSVRPPGISDRFSGSSSGTTATLTIRDAQNEDEADYYCQSTYGDDKLYIFGGGTKLTVLGGGGGSGGGGSGGGGSEVQLVETGGGLVQPGKSLELTCATSGFTFNTAWMHWVRQSPDKRLEWIARIKDTSNNYATDYVESMKGRFTISRDDSKGSVNLQMNSLKEEDTATYYCTTDFYDGTYYWNYWGQGVMVTVSSTRDGNEEMGGITQTPYKVSISGTTVILTCPQYPGSEILWQHNDKNIGGDEDDKNIGSDEDHLSLKEFSELEQSGYYVCYPRGSKPEDANFYLYLRARVCENCMEMDVMSVATIVIVDICITGGLLLLVYYWSKNRKAKAKPVTRGAGAGGRQRGQNKERPPPVPNPDYEPIRKGQRDLYSGLNQRRI

SEQ ID NO: 19718 - protein, 419 aa, Artificial Sequence
  Synthetic Polypeptide
MALPVTALLLPLALLLHAARPSYELIQPPSAAVTLGNTVSLTCVGDELPKRYAYWYQQKPDQSIVRVIYEDSVRPPGISDRFSGSSSGTTATLTIRDAQNEDEADYYCQSTYGDDKLYIFGGGTKLTVLGGGGGSGGGGSGGGGSEVQLVETGGGLVQPGKSLELTCATSGFTFNTAWMHWVRQSPDKRLEWIARIKDTSNNYATDYVESMKGRFTISRDDSKGSVNLQMNSLKEEDTATYYCTTDFYDGTYYWNYWGQGVMVTVSSTRFKIPIEELEDRVFVNCNTSITWVEGTVGTLLSDITRLDLGKRILDPRGIYRCNGTDIYKDKESTVQVHYRMCQSCVELDPATVAGIIVTDVIATLLLALGVFCFAGHETGRLSGAADTQALLRNDQVYQPLRDRDDAQYSHLGGNWARNK

SEQ ID NO: 19719 - protein, 429 aa, Artificial Sequence
  Synthetic Polypeptide
MALPVTALLLPLALLLHAARPSYELIQPPSAAVTLGNTVSLTCVGDELPKRYAYWYQQKPDQSIVRVIYEDSVRPPGISDRFSGSSSGTTATLTIRDAQNEDEADYYCQSTYGDDKLYIFGGGTKLTVLGGGGGSGGGGSGGGGSEVQLVETGGGLVQPGKSLELTCATSGFTFNTAWMHWVRQSPDKRLEWIARIKDTSNNYATDYVESMKGRFTISRDDSKGSVNLQMNSLKEEDTATYYCTTDFYDGTYYWNYWGQGVMVTVSSTRQSIKGNHLVKVYDYQEDGSVLLTCDAEAKNITWFKDGKMIGFLTEDKKKWNLGSNAKDPRGMYQCKGSQNKSKPLQVYYRMCQNCIELNAATISGFLFAEIVSIFVLAVGVYFIAGQDGVRQSRASDKQTLLPNDQLYQPLKDREDDQYSHLQGNQLRRN

SEQ ID NO: 19720 - protein, 412 aa, Artificial Sequence
  Synthetic Polypeptide
MALPVTALLLPLALLLHAARPSYELIQPPSAAVTLGNTVSLTCVGDELPKRYAYWYQQKPDQSIVRVIYEDSVRPPGISDRFSGSSSGTTATLTIRDAQNEDEADYYCQSTYGDDKLYIFGGGTKLTVLGGGGGSGGGGSGGGGSEVQLVETGGGLVQPGKSLELTCATSGFTFNTAWMHWVRQSPDKRLEWIARIKDTSNNYATDYVESMKGRFTISRDDSKGSVNLQMNSLKEEDTATYYCTTDFYDGTYYWNYWGQGVMVTVSSTRQSFGLLDPKLCYLLDGILFIYGVILTALFLRVKFSRSADAPAYQQGQNQLYNELNLGRREEYDVLDKRRGRDPEMGGKPQRRKNPQEGLYNELQKDKMAEAYSEIGMKGERRRGKGHDGLYQGLSTATKDTYDALHMQALPPR

SEQ ID NO: 19721 - protein, 454 aa, Artificial Sequence
  Synthetic Polypeptide
MALPVTALLLPLALLLHAARPEVQLVETGGGLVQPGKSLELTCATSGFTFNTAWMHWVRQSPDKRLEWIARIKDTSNNYATDYVESMKGRFTISRDDSKGSVNLQMNSLKEEDTATYYCTTDFYDGTYYWNYWGQGVMVTVSSGGGGSGGGGSGGGGSSYELIQPPSAAVTLGNTVSLTCVGDELPKRYAYWYQQKPDQSIVRVIYEDSVRPPGISDRFSGSSSGTTATLTIRDAQNEDEADYYCQSTYGDDKLYIFGGGTKLTVLGTRDGNEEMGGITQTPYKVSISGTTVILTCPQYPGSEILWQHNDKNIGGDEDDKNIGSDEDHLSLKEFSELEQSGYYVCYPRGSKPEDANFYLYLRARVCENCMEMDVMSVATIVIVDICITGGLLLLVYYWSKNRKAKAKPVTRGAGAGGRQRGQNKERPPPVPNPDYEPIRKGQRDLYSGLNQRRI

SEQ ID NO: 19722 - protein, 419 aa, Artificial Sequence
  Synthetic Polypeptide
MALPVTALLLPLALLLHAARPEVQLVETGGGLVQPGKSLELTCATSGFTFNTAWMHWVRQSPDKRLEWIARIKDTSNNYATDYVESMKGRFTISRDDSKGSVNLQMNSLKEEDTATYYCTTDFYDGTYYWNYWGQGVMVTVSSGGGGSGGGGSGGGGSSYELIQPPSAAVTLGNTVSLTCVGDELPKRYAYWYQQKPDQSIVRVIYEDSVRPPGISDRFSGSSSGTTATLTIRDAQNEDEADYYCQSTYGDDKLYIFGGGTKLTVLGTRFKIPIEELEDRVFVNCNTSITWVEGTVGTLLSDITRLDLGKRILDPRGIYRCNGTDIYKDKESTVQVHYRMCQSCVELDPATVAGIIVTDVIATLLLALGVFCFAGHETGRLSGAADTQALLRNDQVYQPLRDRDDAQYSHLGGNWARNK

SEQ ID NO: 19723 - protein, 429 aa, Artificial Sequence
  Synthetic Polypeptide
MALPVTALLLPLALLLHAARPEVQLVETGGGLVQPGKSLELTCATSGFTFNTAWMHWVRQSPDKRLEWIARIKDTSNNYATDYVESMKGRFTISRDDSKGSVNLQMNSLKEEDTATYYCTTDFYDGTYYWNYWGQGVMVTVSSGGGGSGGGGSGGGGSSYELIQPPSAAVTLGNTVSLTCVGDELPKRYAYWYQQKPDQSIVRVIYEDSVRPPGISDRFSGSSSGTTATLTIRDAQNEDEADYYCQSTYGDDKLYIFGGGTKLTVLGTRQSIKGNHLVKVYDYQEDGSVLLTCDAEAKNITWFKDGKMIGFLTEDKKKWNLGSNAKDPRGMYQCKGSQNKSKPLQVYYRMCQNCIELNAATISGFLFAEIVSIFVLAVGVYFIAGQDGVRQSRASDKQTLLPNDQLYQPLKDREDDQYSHLQGNQLRRN

SEQ ID NO: 19724 - protein, 412 aa, Artificial Sequence
  Synthetic Polypeptide
MALPVTALLLPLALLLHAARPEVQLVETGGGLVQPGKSLELTCATSGFTFNTAWMHWVRQSPDKRLEWIARIKDTSNNYATDYVESMKGRFTISRDDSKGSVNLQMNSLKEEDTATYYCTTDFYDGTYYWNYWGQGVMVTVSSGGGGSGGGGSGGGGSSYELIQPPSAAVTLGNTVSLTCVGDELPKRYAYWYQQKPDQSIVRVIYEDSVRPPGISDRFSGSSSGTTATLTIRDAQNEDEADYYCQSTYGDDKLYIFGGGTKLTVLGTRQSFGLLDPKLCYLLDGILFIYGVILTALFLRVKFSRSADAPAYQQGQNQLYNELNLGRREEYDVLDKRRGRDPEMGGKPQRRKNPQEGLYNELQKDKMAEAYSEIGMKGERRRGKGHDGLYQGLSTATKDTYDALHMQALPPR

SEQ ID NO: 19725 - protein, 645 aa, Artificial Sequence
  Synthetic Polypeptide
MALPVTALLLPLALLLHAARPSYELIQPPSAAVTLGNTVSLTCVGDELPKRYAYWYQQKPDQSIVRVIYEDSVRPPGISDRFSGSSSGTTATLTIRDAQNEDEADYYCQSTYGDDKLYIFGGGTKLTVLGGGGGSGGGGSGGGGSEVQLVETGGGLVQPGKSLELTCATSGFTFNTAWMHWVRQSPDKRLEWIARIKDTSNNYATDYVESMKGRFTISRDDSKGSVNLQMNSLKEEDTATYYCTTDFYDGTYYWNYWGQGVMVTVSSTRGSGIQNPDPAVYQLRDSKSSDKSVCLFTDFDSQTNVSQSKDSDVYITDKTVLDMRSMDFKSNSAVAWSNKSDFACANAFNNSIIPEDTFFPSPESSCDVKLVEKSFETDTNLNFQNLSVIGFRILLLKVAGFNLLMTLRLWSSRAKRSGSGVKQTLNFDLLKLAGDVESNPGPSRGHMTEYKPTVRLATRDDVPRAVRTLAAAFADYPATRHTVDPDRHIERVTELQELFLTRVGLDIGKVWVADDGAAVAVWTTPESVEAGAVFAEIGPRMAELSGSRLAAQQQMEGLLAPHRPKEPAWFLATVGVSPDHQGKGLGSAVVLPGVEAAERAGVPAFLETSAPRNLPFYERLGFTVTADVEVPEGPRTWCMTRKPGA

SEQ ID NO: 19726 - protein, 677 aa, Artificial Sequence
  Synthetic Polypeptide
MALPVTALLLPLALLLHAARPSYELIQPPSAAVTLGNTVSLTCVGDELPKRYAYWYQQKPDQSIVRVIYEDSVRPPGISDRFSGSSSGTTATLTIRDAQNEDEADYYCQSTYGDDKLYIFGGGTKLTVLGGGGGSGGGGSGGGGSEVQLVETGGGLVQPGKSLELTCATSGFTFNTAWMHWVRQSPDKRLEWIARIKDTSNNYATDYVESMKGRFTISRDDSKGSVNLQMNSLKEEDTATYYCTTDFYDGTYYWNYWGQGVMVTVSSLEDLKNVFPPEVAVFEPSEAEISHTQKATLVCLATGFYPDHVELSWWVNGKEVHSGVSTDPQPLKEQPALNDSRYCLSSRLRVSATFWQNPRNHFRCQVQFYGLSENDEWTQDRAKPVTQIVSAEAWGRADCGFTSESYQQGVLSATILYEILLGKATLYAVLVSALVLMAMVKRKDSRGRAKRSGSGATNFSLLKQAGDVEENPGPTRGHMTEYKPTVRLATRDDVPRAVRTLAAAFADYPATRHTVDPDRHIERVTELQELFLTRVGLDIGKVWVADDGAAVAVWTTPESVEAGAVFAEIGPRMAELSGSRLAAQQQMEGLLAPHRPKEPAWFLATVGVSPDHQGKGLGSAVVLPGVEAAERAGVPAFLETSAPRNLPFYERLGFTVTADVEVPEGPRTWCMTRKPGA

SEQ ID NO: 19727 - protein, 727 aa, Artificial Sequence
  Synthetic Polypeptide
MALPVTALLLPLALLLHAARPSYELIQPPSAAVTLGNTVSLTCVGDELPKRYAYWYQQKPDQSIVRVIYEDSVRPPGISDRFSGSSSGTTATLTIRDAQNEDEADYYCQSTYGDDKLYIFGGGTKLTVLGGGGGSGGGGSGGGGSEVQLVETGGGLVQPGKSLELTCATSGFTFNTAWMHWVRQSPDKRLEWIARIKDTSNNYATDYVESMKGRFTISRDDSKGSVNLQMNSLKEEDTATYYCTTDFYDGTYYWNYWGQGVMVTVSSTREQKLISEEDLGSGTPFPSLAPPIMLLVDGKQQMVVVCLVLDVAPPGLDSPIWFSAGNGSALDAFTYGPSPATDGTWTNLAHLSLPSEELASWEPLVCHTGPGAEGHSRSTQPMHLSGEASTARTCPQEPLRGTPGGALWLGVLRLLLFKLLLFDLLLTCSCLCDPAGPLPSPATTTRLRALGSHRLHPATETGGREATSSPRPQPRDRRWGDTPPGRKPGSPVRAKRSGSGVKQTLNFDLLKLAGDVESNPGPSRSRGHMTEYKPTVRLATRDDVPRAVRTLAAAFADYPATRHTVDPDRHIERVTELQELFLTRVGLDIGKVWVADDGAAVAVWTTPESVEAGAVFAEIGPRMAELSGSRLAAQQQMEGLLAPHRPKEPAWFLATVGVSPDHQGKGLGSAVVLPGVEAAERAGVPAFLETSAPRNLPFYERLGFTVTADVEVPEGPRTWCMTRKPGA

SEQ ID NO: 19728 - protein, 540 aa, Artificial Sequence
  Synthetic Polypeptide
MALPVTALLLPLALLLHAARPSYELIQPPSAAVTLGNTVSLTCVGDELPKRYAYWYQQKPDQSIVRVIYEDSVRPPGISDRFSGSSSGTTATLTIRDAQNEDEADYYCQSTYGDDKLYIFGGGTKLTVLGLEDLKNVFPPEVAVFEPSEAEISHTQKATLVCLATGFYPDHVELSWWVNGKEVHSGVSTDPQPLKEQPALNDSRYCLSSRLRVSATFWQNPRNHFRCQVQFYGLSENDEWTQDRAKPVTQIVSAEAWGRADCGFTSESYQQGVLSATILYEILLGKATLYAVLVSALVLMAMVKRKDSRGRAKRSGSGATNFSLLKQAGDVEENPGPTRGHMTEYKPTVRLATRDDVPRAVRTLAAAFADYPATRHTVDPDRHIERVTELQELFLTRVGLDIGKVWVADDGAAVAVWTTPESVEAGAVFAEIGPRMAELSGSRLAAQQQMEGLLAPHRPKEPAWFLATVGVSPDHQGKGLGSAVVLPGVEAAERAGVPAFLETSAPRNLPFYERLGFTVTADVEVPEGPRTWCMTRKPGA

SEQ ID NO: 19729 - protein, 310 aa, Artificial Sequence
  Synthetic Polypeptide
MALPVTALLLPLALLLHAARPSYELIQPPSAAVTLGNTVSLTCVGDELPKRYAYWYQQKPDQSIVRVIYEDSVRPPGISDRFSGSSSGTTATLTIRDAQNEDEADYYCQSTYGDDKLYIFGGGTKLTVLGLEDLKNVFPPEVAVFEPSEAEISHTQKATLVCLATGFYPDHVELSWWVNGKEVHSGVSTDPQPLKEQPALNDSRYCLSSRLRVSATFWQNPRNHFRCQVQFYGLSENDEWTQDRAKPVTQIVSAEAWGRADCGFTSESYQQGVLSATILYEILLGKATLYAVLVSALVLMAMVKRKDSRG

SEQ ID NO: 19730 - protein, 451 aa, Artificial Sequence
  Synthetic Polypeptide
MDWIWRILFLVGAATGAHSFEEVQLVETGGGLVQPGKSLELTCATSGFTFNTAWMHWVRQSPDKRLEWIARIKDTSNNYATDYVESMKGRFTISRDDSKGSVNLQMNSLKEEDTATYYCTTDFYDGTYYWNYWGQGVMVTVSSTRIQNPDPAVYQLRDSKSSDKSVCLFTDFDSQTNVSQSKDSDVYITDKTVLDMRSMDFKSNSAVAWSNKSDFACANAFNNSIIPEDTFFPSPESSCDVKLVEKSFETDTNLNFQNLSVIGFRILLLKVAGFNLLMTLRLWSSRAKRSGSGVKQTLNFDLLKLAGDVESNPGPSRGHMAKPLSQEESTLIERATATINSIPISEDYSVASAALSSDGRIFTGVNVYHFTGGPCAELVVLGTAAAAAAGNLTCIVAIGNENRGILSPCGRCRQVLLDLHPGIKAIVKDSDGQPTAVGIRELLPSGYVWEG

SEQ ID NO: 19731 - protein, 285 aa, Artificial Sequence
  Synthetic Polypeptide
MDWIWRILFLVGAATGAHSFEEVQLVETGGGLVQPGKSLELTCATSGFTFNTAWMHWVRQSPDKRLEWIARIKDTSNNYATDYVESMKGRFTISRDDSKGSVNLQMNSLKEEDTATYYCTTDFYDGTYYWNYWGQGVMVTVSSTRIQNPDPAVYQLRDSKSSDKSVCLFTDFDSQTNVSQSKDSDVYITDKTVLDMRSMDFKSNSAVAWSNKSDFACANAFNNSIIPEDTFFPSPESSCDVKLVEKSFETDTNLNFQNLSVIGFRILLLKVAGFNLLMTLRLWSS

SEQ ID NO: 19732 - protein, 558 aa, Artificial Sequence
  Synthetic Polypeptide
MALPVTALLLPLALLLHAARPSYELIQPPSAAVTLGNTVSLTCVGDELPKRYAYWYQQKPDQSIVRVIYEDSVRPPGISDRFSGSSSGTTATLTIRDAQNEDEADYYCQSTYGDDKLYIFGGGTKLTVLGLEGKPIPNPLLGLDSTGSGEDLKNVFPPEVAVFEPSEAEISHTQKATLVCLATGFYPDHVELSWWVNGKEVHSGVCTDPQPLKEQPALNDSRYCLSSRLRVSATFWQNPRNHFRCQVQFYGLSENDEWTQDRAKPVTQIVSAEAWGRADCGFTSESYQQGVLSATILYEILLGKATLYAVLVSALVLMAMVKRKDSRGRAKRSGSGATNFSLLKQAGDVEENPGPTRGHMTEYKPTVRLATRDDVPRAVRTLAAAFADYPATRHTVDPDRHIERVTELQELFLTRVGLDIGKVWVADDGAAVAVWTTPESVEAGAVFAEIGPRMAELSGSRLAAQQQMEGLLAPHRPKEPAWFLATVGVSPDHQGKGLGSAVVLPGVEAAERAGVPAFLETSAPRNLPFYERLGFTVTADVEVPEGPRTWCMTRKPGA

SEQ ID NO: 19733 - protein, 328 aa, Artificial Sequence
  Synthetic Polypeptide
MALPVTALLLPLALLLHAARPSYELIQPPSAAVTLGNTVSLTCVGDELPKRYAYWYQQKPDQSIVRVIYEDSVRPPGISDRFSGSSSGTTATLTIRDAQNEDEADYYCQSTYGDDKLYIFGGGTKLTVLGLEGKPIPNPLLGLDSTGSGEDLKNVFPPEVAVFEPSEAEISHTQKATLVCLATGFYPDHVELSWWVNGKEVHSGVCTDPQPLKEQPALNDSRYCLSSRLRVSATFWQNPRNHFRCQVQFYGLSENDEWTQDRAKPVTQIVSAEAWGRADCGFTSESYQQGVLSATILYEILLGKATLYAVLVSALVLMAMVKRKDSRG

SEQ ID NO: 19734 - protein, 463 aa, Artificial Sequence
  Synthetic Polypeptide
MDWIWRILFLVGAATGAHSFEEVQLVETGGGLVQPGKSLELTCATSGFTFNTAWMHWVRQSPDKRLEWIARIKDTSNNYATDYVESMKGRFTISRDDSKGSVNLQMNSLKEEDTATYYCTTDFYDGTYYWNYWGQGVMVTVSSTREQKLISEEDGSGIQNPDPAVYQLRDSKSSDKSVCLFTDFDSQTNVSQSKDSDVYITDKCVLDMRSMDFKSNSAVAWSNKSDFACANAFNNSIIPEDTFFPSPESSCDVKLVEKSFETDTNLNFQNLSVIGFRILLLKVAGFNLLMTLRLWSSRAKRSGSGVKQTLNFDLLKLAGDVESNPGPSRGHMAKPLSQEESTLIERATATINSIPISEDYSVASAALSSDGRIFTGVNVYHFTGGPCAELVVLGTAAAAAAGNLTCIVAIGNENRGILSPCGRCRQVLLDLHPGIKAIVKDSDGQPTAVGIRELLPSGYVWEG

SEQ ID NO: 19735 - protein, 297 aa, Artificial Sequence
  Synthetic Polypeptide
MDWIWRILFLVGAATGAHSFEEVQLVETGGGLVQPGKSLELTCATSGFTFNTAWMHWVRQSPDKRLEWIARIKDTSNNYATDYVESMKGRFTISRDDSKGSVNLQMNSLKEEDTATYYCTTDFYDGTYYWNYWGQGVMVTVSSTREQKLISEEDGSGIQNPDPAVYQLRDSKSSDKSVCLFTDFDSQTNVSQSKDSDVYITDKCVLDMRSMDFKSNSAVAWSNKSDFACANAFNNSIIPEDTFFPSPESSCDVKLVEKSFETDTNLNFQNLSVIGFRILLLKVAGFNLLMTLRLWSS

SEQ ID NO: 19736 - protein, 645 aa, Artificial Sequence
  Synthetic Polypeptide
MALPVTALLLPLALLLHAARPSYELIQPPSAAVTLGNTVSLTCVGDELPKRYAYWYQQKPDQSIVRVIYEDSVRPPGISDRFSGSSSGTTATLTIRDAQNEDEADYYCQSTYGDDKLYIFGGGTKLTVLGGGGGSGGGGSGGGGSEVQLVETGGGLVQPGKSLELTCATSGFTFNTAWMHWVRQSPDKRLEWIARIKDTSNNYATDYVESMKGRFTISRDDSKGSVNLQMNSLKEEDTATYYCTTDFYDGTYYWNYWGQGVMVTVSSTRGSGIQNPDPAVYQLRDSKSSDKSVCLFTDFDSQTNVSQSKDSDVYITDKTVLDMRSMDFKSNSAVAWSNKSDFACANAFNNSIIPEDTFFPSSDVPCDVKLVEKSFETDTNLNFQNLSVIGFRILLLKVAGFNLLMTLRLWSSRAKRSGSGVKQTLNFDLLKLAGDVESNPGPSRGHMTEYKPTVRLATRDDVPRAVRTLAAAFADYPATRHTVDPDRHIERVTELQELFLTRVGLDIGKVWVADDGAAVAVWTTPESVEAGAVFAEIGPRMAELSGSRLAAQQQMEGLLAPHRPKEPAWFLATVGVSPDHQGKGLGSAVVLPGVEAAERAGVPAFLETSAPRNLPFYERLGFTVTADVEVPEGPRTWCMTRKPGA

SEQ ID NO: 19737 - protein, 677 aa, Artificial Sequence
  Synthetic Polypeptide
MALPVTALLLPLALLLHAARPSYELIQPPSAAVTLGNTVSLTCVGDELPKRYAYWYQQKPDQSIVRVIYEDSVRPPGISDRFSGSSSGTTATLTIRDAQNEDEADYYCQSTYGDDKLYIFGGGTKLTVLGGGGGSGGGGSGGGGSEVQLVETGGGLVQPGKSLELTCATSGFTFNTAWMHWVRQSPDKRLEWIARIKDTSNNYATDYVESMKGRFTISRDDSKGSVNLQMNSLKEEDTATYYCTTDFYDGTYYWNYWGQGVMVTVSSLEDLKNVFPPEVAVFEPSKAEIAHTQKATLVCLATGFYPDHVELSWWVNGKEVHSGVSTDPQPLKEQPALNDSRYCLSSRLRVSATFWQNPRNHFRCQVQFYGLSENDEWTQDRAKPVTQIVSAEAWGRADCGITSASYHQGVLSATILYEILLGKATLYAVLVSALVLMAMVKRKDSRGRAKRSGSGATNFSLLKQAGDVEENPGPTRGHMTEYKPTVRLATRDDVPRAVRTLAAAFADYPATRHTVDPDRHIERVTELQELFLTRVGLDIGKVWVADDGAAVAVWTTPESVEAGAVFAEIGPRMAELSGSRLAAQQQMEGLLAPHRPKEPAWFLATVGVSPDHQGKGLGSAVVLPGVEAAERAGVPAFLETSAPRNLPFYERLGFTVTADVEVPEGPRTWCMTRKPGA

SEQ ID NO: 19738 - protein, 700 aa, Artificial Sequence
  Synthetic Polypeptide
MALPVTALLLPLALLLHAARPSYELIQPPSAAVTLGNTVSLTCVGDELPKRYAYWYQQKPDQSIVRVIYEDSVRPPGISDRFSGSSSGTTATLTIRDAQNEDEADYYCQSTYGDDKLYIFGGGTKLTVLGGGGGSGGGGSGGGGSEVQLVETGGGLVQPGKSLELTCATSGFTFNTAWMHWVRQSPDKRLEWIARIKDTSNNYATDYVESMKGRFTISRDDSKGSVNLQMNSLKEEDTATYYCTTDFYDGTYYWNYWGQGVMVTVSSTRGSGGGGSGGGGSGDGNEEMGGITQTPYKVSISGTTVILTCPQYPGSEILWQHNDKNIGGDEDDKNIGSDEDHLSLKEFSELEQSGYYVCYPRGSKPEDANFYLYLRARVCENCMEMDVMSVATIVIVDICITGGLLLLVYYWSKNRKAKAKPVTRGAGAGGRQRGQNKERPPPVPNPDYEPIRKGQRDLYSGLNQRRIRAKRSGSGVKQTLNFDLLKLAGDVESNPGPSRGHMTEYKPTVRLATRDDVPRAVRTLAAAFADYPATRHTVDPDRHIERVTELQELFLTRVGLDIGKVWVADDGAAVAVWTTPESVEAGAVFAEIGPRMAELSGSRLAAQQQMEGLLAPHRPKEPAWFLATVGVSPDHQGKGLGSAVVLPGVEAAERAGVPAFLETSAPRNLPFYERLGFTVTADVEVPEGPRTWCMTRKPGA

SEQ ID NO: 19739 - protein, 665 aa, Artificial Sequence
  Synthetic Polypeptide
MALPVTALLLPLALLLHAARPSYELIQPPSAAVTLGNTVSLTCVGDELPKRYAYWYQQKPDQSIVRVIYEDSVRPPGISDRFSGSSSGTTATLTIRDAQNEDEADYYCQSTYGDDKLYIFGGGTKLTVLGGGGGSGGGGSGGGGSEVQLVETGGGLVQPGKSLELTCATSGFTFNTAWMHWVRQSPDKRLEWIARIKDTSNNYATDYVESMKGRFTISRDDSKGSVNLQMNSLKEEDTATYYCTTDFYDGTYYWNYWGQGVMVTVSSTRGSGGGGSGGGGSGFKIPIEELEDRVFVNCNTSITWVEGTVGTLLSDITRLDLGKRILDPRGIYRCNGTDIYKDKESTVQVHYRMCQSCVELDPATVAGIIVTDVIATLLLALGVFCFAGHETGRLSGAADTQALLRNDQVYQPLRDRDDAQYSHLGGNWARNKRAKRSGSGVKQTLNFDLLKLAGDVESNPGPSRGHMTEYKPTVRLATRDDVPRAVRTLAAAFADYPATRHTVDPDRHIERVTELQELFLTRVGLDIGKVWVADDGAAVAVWTTPESVEAGAVFAEIGPRMAELSGSRLAAQQQMEGLLAPHRPKEPAWFLATVGVSPDHQGKGLGSAVVLPGVEAAERAGVPAFLETSAPRNLPFYERLGFTVTADVEVPEGPRTWCMTRKPGA

SEQ ID NO: 19740 - protein, 675 aa, Artificial Sequence
  Synthetic Polypeptide
MALPVTALLLPLALLLHAARPSYELIQPPSAAVTLGNTVSLTCVGDELPKRYAYWYQQKPDQSIVRVIYEDSVRPPGISDRFSGSSSGTTATLTIRDAQNEDEADYYCQSTYGDDKLYIFGGGTKLTVLGGGGGSGGGGSGGGGSEVQLVETGGGLVQPGKSLELTCATSGFTFNTAWMHWVRQSPDKRLEWIARIKDTSNNYATDYVESMKGRFTISRDDSKGSVNLQMNSLKEEDTATYYCTTDFYDGTYYWNYWGQGVMVTVSSTRGSGGGGSGGGGSGQSIKGNHLVKVYDYQEDGSVLLTCDAEAKNITWFKDGKMIGFLTEDKKKWNLGSNAKDPRGMYQCKGSQNKSKPLQVYYRMCQNCIELNAATISGFLFAEIVSIFVLAVGVYFIAGQDGVRQSRASDKQTLLPNDQLYQPLKDREDDQYSHLQGNQLRRNRAKRSGSGVKQTLNFDLLKLAGDVESNPGPSRGHMTEYKPTVRLATRDDVPRAVRTLAAAFADYPATRHTVDPDRHIERVTELQELFLTRVGLDIGKVWVADDGAAVAVWTTPESVEAGAVFAEIGPRMAELSGSRLAAQQQMEGLLAPHRPKEPAWFLATVGVSPDHQGKGLGSAVVLPGVEAAERAGVPAFLETSAPRNLPFYERLGFTVTADVEVPEGPRTWCMTRKPGA

SEQ ID NO: 19741 - protein, 658 aa, Artificial Sequence
  Synthetic Polypeptide
MALPVTALLLPLALLLHAARPSYELIQPPSAAVTLGNTVSLTCVGDELPKRYAYWYQQKPDQSIVRVIYEDSVRPPGISDRFSGSSSGTTATLTIRDAQNEDEADYYCQSTYGDDKLYIFGGGTKLTVLGGGGGSGGGGSGGGGSEVQLVETGGGLVQPGKSLELTCATSGFTFNTAWMHWVRQSPDKRLEWIARIKDTSNNYATDYVESMKGRFTISRDDSKGSVNLQMNSLKEEDTATYYCTTDFYDGTYYWNYWGQGVMVTVSSTRGSGGGGSGGGGSGQSFGLLDPKLCYLLDGILFIYGVILTALFLRVKFSRSADAPAYQQGQNQLYNELNLGRREEYDVLDKRRGRDPEMGGKPQRRKNPQEGLYNELQKDKMAEAYSEIGMKGERRRGKGHDGLYQGLSTATKDTYDALHMQALPPRRAKRSGSGVKQTLNFDLLKLAGDVESNPGPSRGHMTEYKPTVRLATRDDVPRAVRTLAAAFADYPATRHTVDPDRHIERVTELQELFLTRVGLDIGKVWVADDGAAVAVWTTPESVEAGAVFAEIGPRMAELSGSRLAAQQQMEGLLAPHRPKEPAWFLATVGVSPDHQGKGLGSAVVLPGVEAAERAGVPAFLETSAPRNLPFYERLGFTVTADVEVPEGPRTWCMTRKPGA

SEQ ID NO: 19742 - protein, 759 aa, Artificial Sequence
  Synthetic Polypeptide
MALPVTALLLPLALLLHAARPEVQLVESGGGLVQPGGSLRLSCAASGFSFSDFWMSWVRQAPGKGLEWVATISQAGSEKDYVDSVKGRFTISRDNAKKSLYLQMNSLRAEDTAVYYCASGVYSFDYRGQGTLVTVSSGTGGGGSGGGGSGGGGSEFSYELIQPPSAAVTLGNTVSLTCVGDELPKRYAYWYQQKPDQSIVRVIYEDSVRPPGISDRFSGSSSGTTATLTIRDAQNEDEADYYCQSTYGDDKLYIFGGGTKLTVLGLEDLKNVFPPEVAVFEPSEAEISHTQKATLVCLATGFYPDHVELSWWVNGKEVHSGVCTDPQPLKEQPALNDSRYCLSSRLRVSATFWQNPRNHFRCQVQFYGLSENDEWTQDRAKPVTQIVSAEAWGRADCGFTSESYQQGVLSATILYEILLGKATLYAVLVSALVLMAMVKRKDSRGRAKRSGSGATNFSLLKQAGDVEENPGPTSMDWIWRILFLVGAATGAHSFEEVQLVETGGGLVQPGKSLELTCATSGFTFNTAWMHWVRQSPDKRLEWIARIKDTSNNYATDYVESMKGRFTISRDDSKGSVNLQMNSLKEEDTATYYCTTDFYDGTYYWNYWGQGVMVTVSSTRIQNPDPAVYQLRDSKSSDKSVCLFTDFDSQTNVSQSKDSDVYITDKCVLDMRSMDFKSNSAVAWSNKSDFACANAFNNSIIPEDTFFPSPESSCDVKLVEKSFETDTNLNFQNLSVIGFRILLLKVAGFNLLMTLRLWSS

SEQ ID NO: 19743 - protein, 763 aa, Artificial Sequence
  Synthetic Polypeptide
MALPVTALLLPLALLLHAARPEVQLVESGGGLVQPGGSLRLSCAASGFSFSDFWMSWVRQAPGKGLEWVATISQAGSEKDYVDSVKGRFTISRDNAKKSLYLQMNSLRAEDTAVYYCASGVYSFDYRGQGTLVTVSSGTGGGGSGGGGSGGGGSEFSYELIQPPSAAVTLGNTVSLTCVGDELPKRYAYWYQQKPDQSIVRVIYEDSVRPPGISDRFSGSSSGTTATLTIRDAQNEDEADYYCQSTYGDDKLYIFGGGTKLTVLGLEIQNPDPAVYQLRDSKSSDKSVCLFTDFDSQTNVSQSKDSDVYITDKCVLDMRSMDFKSNSAVAWSNKSDFACANAFNNSIIPEDTFFPSPESSCDVKLVEKSFETDTNLNFQNLSVIGFRILLLKVAGFNLLMTLRLWSSRAKRSGSGVKQTLNFDLLKLAGDVESNPGPTSMDWIWRILFLVGAATGAHSFEEVQLVETGGGLVQPGKSLELTCATSGFTFNTAWMHWVRQSPDKRLEWIARIKDTSNNYATDYVESMKGRFTISRDDSKGSVNLQMNSLKEEDTATYYCTTDFYDGTYYWNYWGQGVMVTVSSTREDLKNVFPPEVAVFEPSEAEISHTQKATLVCLATGFYPDHVELSWWVNGKEVHSGVCTDPQPLKEQPALNDSRYCLSSRLRVSATFWQNPRNHFRCQVQFYGLSENDEWTQDRAKPVTQIVSAEAWGRADCGFTSESYQQGVLSATILYEILLGKATLYAVLVSALVLMAMVKRKDSRG

SEQ ID NO: 19744 - protein, 955 aa, Artificial Sequence
  Synthetic Polypeptide
MALPVTALLLPLALLLHAARPEVQLVESGGGLVQPGGSLRLSCAASGFSFSDFWMSWVRQAPGKGLEWVATISQAGSEKDYVDSVKGRFTISRDNAKKSLYLQMNSLRAEDTAVYYCASGVYSFDYRGQGTLVTVSSGTGGGGSGGGGSGGGGSEFSYELIQPPSAAVTLGNTVSLTCVGDELPKRYAYWYQQKPDQSIVRVIYEDSVRPPGISDRFSGSSSGTTATLTIRDAQNEDEADYYCQSTYGDDKLYIFGGGTKLTVLGLEDLKNVFPPEVAVFEPSEAEISHTQKATLVCLATGFYPDHVELSWWVNGKEVHSGVSTDPQPLKEQPALNDSRYCLSSRLRVSATFWQNPRNHFRCQVQFYGLSENDEWTQDRAKPVTQIVSAEAWGRADCGSQSFGLLDPKLCYLLDGILFIYGVILTALFLRVKFSRSADAPAYQQGQNQLYNELNLGRREEYDVLDKRRGRDPEMGGKPQRRKNPQEGLYNELQKDKMAEAYSEIGMKGERRRGKGHDGLYQGLSTATKDTYDALHMQALPPRRAKRSGSGATNFSLLKQAGDVEENPGPTSMDWIWRILFLVGAATGAHSFEEVQLVETGGGLVQPGKSLELTCATSGFTFNTAWMHWVRQSPDKRLEWIARIKDTSNNYATDYVESMKGRFTISRDDSKGSVNLQMNSLKEEDTATYYCTTDFYDGTYYWNYWGQGVMVTVSSTRIQNPDPAVYQLRDSKSSDKSVCLFTDFDSQTNVSQSKDSDVYITDKTVLDMRSMDFKSNSAVAWSNKSDFACANAFNNSIIPEDTFFPSPESSCGTQSFGLLDPKLCYLLDGILFIYGVILTALFLRVKFSRSADAPAYQQGQNQLYNELNLGRREEYDVLDKRRGRDPEMGGKPQRRKNPQEGLYNELQKDKMAEAYSEIGMKGERRRGKGHDGLYQGLSTATKDTYDALHMQALPPR

SEQ ID NO: 19745 - protein, 785 aa, Artificial Sequence
  Synthetic Polypeptide
MALPVTALLLPLALLLHAARPEVQLVESGGGLVQPGGSLRLSCAASGFSFSDFWMSWVRQAPGKGLEWVATISQAGSEKDYVDSVKGRFTISRDNAKKSLYLQMNSLRAEDTAVYYCASGVYSFDYRGQGTLVTVSSGTGGGGSGGGGSGGGGSEFSYELIQPPSAAVTLGNTVSLTCVGDELPKRYAYWYQQKPDQSIVRVIYEDSVRPPGISDRFSGSSSGTTATLTIRDAQNEDEADYYCQSTYGDDKLYIFGGGTKLTVLGLEGQPKANPTVTLFPPSSEELQANKATLVCLISDFYPGAVTVAWKADGSPVKAGVETTKPSKQSNNKYAASSYLSLTPEQWKSHRSYSCQVTHEGSTVEKTVAPTECSPIKTDVITMDPKDNCSKDANDTLLLQLTNTSAYYMYLLLLLKSVVYFAIITCCLLRRTAFCCNGEKSRAKRSGSGATNFSLLKQAGDVEENPGPTSMDWIWRILFLVGAATGAHSFEEVQLVETGGGLVQPGKSLELTCATSGFTFNTAWMHWVRQSPDKRLEWIARIKDTSNNYATDYVESMKGRFTISRDDSKGSVNLQMNSLKEEDTATYYCTTDFYDGTYYWNYWGQGVMVTVSSTRASTKGPSVFPLAPSSKSTSGGTAALGCLVKDYFPEPVTVSWNSGALTSGVHTFPAVLQSSGLYSLSSVVTVPSSSLGTQTYICNVNHKPSNTKVDKRVEPKSCEVKTDSTDHVKPKETENTKQPSKSCHKPKAIVHTEKVNMMSLTVLGLRMLFAKTVAVNFLLTAKLFFL

SEQ ID NO: 19746 - protein, 766 aa, Artificial Sequence
  Synthetic Polypeptide
MALPVTALLLPLALLLHAARPEVQLVESGGGLVQPGGSLRLSCAASGFSFSDFWMSWVRQAPGKGLEWVATISQAGSEKDYVDSVKGRFTISRDNAKKSLYLQMNSLRAEDTAVYYCASGVYSFDYRGQGTLVTVSSGTGGGGSGGGGSGGGGSEFSYELIQPPSAAVTLGNTVSLTCVGDELPKRYAYWYQQKPDQSIVRVIYEDSVRPPGISDRFSGSSSGTTATLTIRDAQNEDEADYYCQSTYGDDKLYIFGGGTKLTVLGLEGQPKANPTVTLFPPSSEELQANKATLVCLISDFYPGAVTVAWKADGSPVKAGVETTKPSKQSNNKYAASSYLSLTPEQWKSHRSYSCQVTHEGSTVEKTVAPTECSGRADCGFTSESYQQGVLSATILYEILLGKATLYAVLVSALVLMAMVKRKDSRGRAKRSGSGVKQTLNFDLLKLAGDVESNPGPTSMDWIWRILFLVGAATGAHSFEEVQLVETGGGLVQPGKSLELTCATSGFTFNTAWMHWVRQSPDKRLEWIARIKDTSNNYATDYVESMKGRFTISRDDSKGSVNLQMNSLKEEDTATYYCTTDFYDGTYYWNYWGQGVMVTVSSTRASTKGPSVFPLAPSSKSTSGGTAALGCLVKDYFPEPVTVSWNSGALTSGVHTFPAVLQSSGLYSLSSVVTVPSSSLGTQTYICNVNHKPSNTKVDKRVEPKSCIPEDTFFPSPESSCDVKLVEKSFETDTNLNFQNLSVIGFRILLLKVAGFNLLMTLRLWSS

SEQ ID NO: 19747 - protein, 900 aa, Artificial Sequence
  Synthetic Polypeptide
MALPVTALLLPLALLLHAARPEVQLVESGGGLVQPGGSLRLSCAASGFSFSDFWMSWVRQAPGKGLEWVATISQAGSEKDYVDSVKGRFTISRDNAKKSLYLQMNSLRAEDTAVYYCASGVYSFDYRGQGTLVTVSSGTGGGGSGGGGSGGGGSEFSYELIQPPSAAVTLGNTVSLTCVGDELPKRYAYWYQQKPDQSIVRVIYEDSVRPPGISDRFSGSSSGTTATLTIRDAQNEDEADYYCQSTYGDDKLYIFGGGTKLTVLGLEIQNPDPAVYQLRDSKSSDKSVCLFTDFDSQTNVSQSKDSDVYITDKCVLDMRSMDFKSNSAVAWSNKSDFACANAFNNSIIPEDTFFPSPESSCDVKLVEKSFETDTNLNFQNLSVIGFRILLLKVAGFNLLMTLRLWSSRAKRSGSGVKQTLNFDLLKLAGDVESNPGPTSMDWIWRILFLVGAATGAHSGPQLQLQESGPGLVKPSETLSLTCTVSGDSISSGDYYWGWIRQPPGKGLEWIGHIYYSGVTYYNPSLKSRVTISVDTSRNQFSLKLSSVTAADTAVYYCTREDSSNWRSRGQGTLVTVSSGSGGGGSGGGGSGGGGSFEEVQLVETGGGLVQPGKSLELTCATSGFTFNTAWMHWVRQSPDKRLEWIARIKDTSNNYATDYVESMKGRFTISRDDSKGSVNLQMNSLKEEDTATYYCTTDFYDGTYYWNYWGQGVMVTVSSTREDLKNVFPPEVAVFEPSEAEISHTQKATLVCLATGFYPDHVELSWWVNGKEVHSGVCTDPQPLKEQPALNDSRYCLSSRLRVSATFWQNPRNHFRCQVQFYGLSENDEWTQDRAKPVTQIVSAEAWGRADCGFTSESYQQGVLSATILYEILLGKATLYAVLVSALVLMAMVKRKDSRG

SEQ ID NO: 19748 - protein, 1092 aa, Artificial Sequence
  Synthetic Polypeptide
MALPVTALLLPLALLLHAARPEVQLVESGGGLVQPGGSLRLSCAASGFSFSDFWMSWVRQAPGKGLEWVATISQAGSEKDYVDSVKGRFTISRDNAKKSLYLQMNSLRAEDTAVYYCASGVYSFDYRGQGTLVTVSSGTGGGGSGGGGSGGGGSEFSYELIQPPSAAVTLGNTVSLTCVGDELPKRYAYWYQQKPDQSIVRVIYEDSVRPPGISDRFSGSSSGTTATLTIRDAQNEDEADYYCQSTYGDDKLYIFGGGTKLTVLGLEDLKNVFPPEVAVFEPSEAEISHTQKATLVCLATGFYPDHVELSWWVNGKEVHSGVSTDPQPLKEQPALNDSRYCLSSRLRVSATFWQNPRNHFRCQVQFYGLSENDEWTQDRAKPVTQIVSAEAWGRADCGSQSFGLLDPKLCYLLDGILFIYGVILTALFLRVKFSRSADAPAYQQGQNQLYNELNLGRREEYDVLDKRRGRDPEMGGKPQRRKNPQEGLYNELQKDKMAEAYSEIGMKGERRRGKGHDGLYQGLSTATKDTYDALHMQALPPRRAKRSGSGATNFSLLKQAGDVEENPGPTSMDWIWRILFLVGAATGAHSGPQLQLQESGPGLVKPSETLSLTCTVSGDSISSGDYYWGWIRQPPGKGLEWIGHIYYSGVTYYNPSLKSRVTISVDTSRNQFSLKLSSVTAADTAVYYCTREDSSNWRSRGQGTLVTVSSGSGGGGSGGGGSGGGGSFEEVQLVETGGGLVQPGKSLELTCATSGFTFNTAWMHWVRQSPDKRLEWIARIKDTSNNYATDYVESMKGRFTISRDDSKGSVNLQMNSLKEEDTATYYCTTDFYDGTYYWNYWGQGVMVTVSSTRIQNPDPAVYQLRDSKSSDKSVCLFTDFDSQTNVSQSKDSDVYITDKTVLDMRSMDFKSNSAVAWSNKSDFACANAFNNSIIPEDTFFPSPESSCGTQSFGLLDPKLCYLLDGILFIYGVILTALFLRVKFSRSADAPAYQQGQNQLYNELNLGRREEYDVLDKRRGRDPEMGGKPQRRKNPQEGLYNELQKDKMAEAYSEIGMKGERRRGKGHDGLYQGLSTATKDTYDALHMQALPPR

SEQ ID NO: 19749 - protein, 922 aa, Artificial Sequence
  Synthetic Polypeptide
MALPVTALLLPLALLLHAARPEVQLVESGGGLVQPGGSLRLSCAASGFSFSDFWMSWVRQAPGKGLEWVATISQAGSEKDYVDSVKGRFTISRDNAKKSLYLQMNSLRAEDTAVYYCASGVYSFDYRGQGTLVTVSSGTGGGGSGGGGSGGGGSEFSYELIQPPSAAVTLGNTVSLTCVGDELPKRYAYWYQQKPDQSIVRVIYEDSVRPPGISDRFSGSSSGTTATLTIRDAQNEDEADYYCQSTYGDDKLYIFGGGTKLTVLGLEGQPKANPTVTLFPPSSEELQANKATLVCLISDFYPGAVTVAWKADGSPVKAGVETTKPSKQSNNKYAASSYLSLTPEQWKSHRSYSCQVTHEGSTVEKTVAPTECSPIKTDVITMDPKDNCSKDANDTLLLQLTNTSAYYMYLLLLLKSVVYFAIITCCLLRRTAFCCNGEKSRAKRSGSGATNFSLLKQAGDVEENPGPTSMDWIWRILFLVGAATGAHSGPQLQLQESGPGLVKPSETLSLTCTVSGDSISSGDYYWGWIRQPPGKGLEWIGHIYYSGVTYYNPSLKSRVTISVDTSRNQFSLKLSSVTAADTAVYYCTREDSSNWRSRGQGTLVTVSSGSGGGGSGGGGSGGGGSFEEVQLVETGGGLVQPGKSLELTCATSGFTFNTAWMHWVRQSPDKRLEWIARIKDTSNNYATDYVESMKGRFTISRDDSKGSVNLQMNSLKEEDTATYYCTTDFYDGTYYWNYWGQGVMVTVSSTRASTKGPSVFPLAPSSKSTSGGTAALGCLVKDYFPEPVTVSWNSGALTSGVHTFPAVLQSSGLYSLSSVVTVPSSSLGTQTYICNVNHKPSNTKVDKRVEPKSCEVKTDSTDHVKPKETENTKQPSKSCHKPKAIVHTEKVNMMSLTVLGLRMLFAKTVAVNFLLTAKLFFL

SEQ ID NO: 19750 - protein, 903 aa, Artificial Sequence
  Synthetic Polypeptide
MALPVTALLLPLALLLHAARPEVQLVESGGGLVQPGGSLRLSCAASGFSFSDFWMSWVRQAPGKGLEWVATISQAGSEKDYVDSVKGRFTISRDNAKKSLYLQMNSLRAEDTAVYYCASGVYSFDYRGQGTLVTVSSGTGGGGSGGGGSGGGGSEFSYELIQPPSAAVTLGNTVSLTCVGDELPKRYAYWYQQKPDQSIVRVIYEDSVRPPGISDRFSGSSSGTTATLTIRDAQNEDEADYYCQSTYGDDKLYIFGGGTKLTVLGLEGQPKANPTVTLFPPSSEELQANKATLVCLISDFYPGAVTVAWKADGSPVKAGVETTKPSKQSNNKYAASSYLSLTPEQWKSHRSYSCQVTHEGSTVEKTVAPTECSGRADCGFTSESYQQGVLSATILYEILLGKATLYAVLVSALVLMAMVKRKDSRGRAKRSGSGVKQTLNFDLLKLAGDVESNPGPTSMDWIWRILFLVGAATGAHSGPQLQLQESGPGLVKPSETLSLTCTVSGDSISSGDYYWGWIRQPPGKGLEWIGHIYYSGVTYYNPSLKSRVTISVDTSRNQFSLKLSSVTAADTAVYYCTREDSSNWRSRGQGTLVTVSSGSGGGGSGGGGSGGGGSFEEVQLVETGGGLVQPGKSLELTCATSGFTFNTAWMHWVRQSPDKRLEWIARIKDTSNNYATDYVESMKGRFTISRDDSKGSVNLQMNSLKEEDTATYYCTTDFYDGTYYWNYWGQGVMVTVSSTRASTKGPSVFPLAPSSKSTSGGTAALGCLVKDYFPEPVTVSWNSGALTSGVHTFPAVLQSSGLYSLSSVVTVPSSSLGTQTYICNVNHKPSNTKVDKRVEPKSCIPEDTFFPSPESSCDVKLVEKSFETDTNLNFQNLSVIGFRILLLKVAGFNLLMTLRLWSS

SEQ ID NO: 19751 - protein, 760 aa, Artificial Sequence
  Synthetic Polypeptide
MALPVTALLLPLALLLHAARPEVQVLESGGGLVQPGGSLRLSCAASGFTFSNFAMSWVRQAPGKGLEWVSTISGSAGTTDYADSVKGRFTISRDNSKKTLYLQMNSLRVEDTAVYYCADGRGPFFDYRGQGTLVTVSSGTGGGGSGGGGSGGGGSEFSYELIQPPSAAVTLGNTVSLTCVGDELPKRYAYWYQQKPDQSIVRVIYEDSVRPPGISDRFSGSSSGTTATLTIRDAQNEDEADYYCQSTYGDDKLYIFGGGTKLTVLGLEDLKNVFPPEVAVFEPSEAEISHTQKATLVCLATGFYPDHVELSWWVNGKEVHSGVCTDPQPLKEQPALNDSRYCLSSRLRVSATFWQNPRNHFRCQVQFYGLSENDEWTQDRAKPVTQIVSAEAWGRADCGFTSESYQQGVLSATILYEILLGKATLYAVLVSALVLMAMVKRKDSRGRAKRSGSGATNFSLLKQAGDVEENPGPTSMDWIWRILFLVGAATGAHSFEEVQLVETGGGLVQPGKSLELTCATSGFTFNTAWMHWVRQSPDKRLEWIARIKDTSNNYATDYVESMKGRFTISRDDSKGSVNLQMNSLKEEDTATYYCTTDFYDGTYYWNYWGQGVMVTVSSTRIQNPDPAVYQLRDSKSSDKSVCLFTDFDSQTNVSQSKDSDVYITDKCVLDMRSMDFKSNSAVAWSNKSDFACANAFNNSIIPEDTFFPSPESSCDVKLVEKSFETDTNLNFQNLSVIGFRILLLKVAGFNLLMTLRLWSS

SEQ ID NO: 19752 - protein, 761 aa, Artificial Sequence
  Synthetic Polypeptide
MALPVTALLLPLALLLHAARPSYELIQPPSAAVTLGNTVSLTCVGDELPKRYAYWYQQKPDQSIVRVIYEDSVRPPGISDRFSGSSSGTTATLTIRDAQNEDEADYYCQSTYGDDKLYIFGGGTKLTVLGLEDLKNVFPPEVAVFEPSEAEISHTQKATLVCLATGFYPDHVELSWWVNGKEVHSGVCTDPQPLKEQPALNDSRYCLSSRLRVSATFWQNPRNHFRCQVQFYGLSENDEWTQDRAKPVTQIVSAEAWGRADCGFTSESYQQGVLSATILYEILLGKATLYAVLVSALVLMAMVKRKDSRGRAKRSGSGATNFSLLKQAGDVEENPGPTSMDWIWRILFLVGAATGAHSGPEVQLVESGGGLVQAGGSLRLSCAASGRTFSMGWFRQAPGKEREFVAAITYSGGSPYYADSVKGRFTISRDNAKNTVYLQMNSLKPEDTAVYYCAANPTYGSDWNAENWGQGTQVTVSSGSGGGGSGGGGSGGGGSFEEVQLVETGGGLVQPGKSLELTCATSGFTFNTAWMHWVRQSPDKRLEWIARIKDTSNNYATDYVESMKGRFTISRDDSKGSVNLQMNSLKEEDTATYYCTTDFYDGTYYWNYWGQGVMVTVSSTRIQNPDPAVYQLRDSKSSDKSVCLFTDFDSQTNVSQSKDSDVYITDKCVLDMRSMDFKSNSAVAWSNKSDFACANAFNNSIIPEDTFFPSPESSCDVKLVEKSFETDTNLNFQNLSVIGFRILLLKVAGFNLLMTLRLWSS

SEQ ID NO: 19753 - protein, 888 aa, Artificial Sequence
  Synthetic Polypeptide
MALPVTALLLPLALLLHAARPSYELIQPPSAAVTLGNTVSLTCVGDELPKRYAYWYQQKPDQSIVRVIYEDSVRPPGISDRFSGSSSGTTATLTIRDAQNEDEADYYCQSTYGDDKLYIFGGGTKLTVLGLEDLKNVFPPEVAVFEPSEAEISHTQKATLVCLATGFYPDHVELSWWVNGKEVHSGVCTDPQPLKEQPALNDSRYCLSSRLRVSATFWQNPRNHFRCQVQFYGLSENDEWTQDRAKPVTQIVSAEAWGRADCGFTSESYQQGVLSATILYEILLGKATLYAVLVSALVLMAMVKRKDSRGRAKRSGSGATNFSLLKQAGDVEENPGPTSMDWIWRILFLVGAATGAHSQLQLQESGPGLVKPSETLSLTCTVSGGSISSGDYYWGWIRQPPGKGLEWIGSISYSGSTYYNPSLKSRVTISVDTSRNQFSLKLSSVTAADTAVYYCTREDSSNWRSRGQGTLVTVSSSGGGGSGGGGSEVQLVESGGGLVQAGGSLRLSCAASGRTFSMGWFRQAPGKEREFVAAITYSGGSPYYADSVKGRFTISRDNAKNTVYLQMNSLKPEDTAVYYCAANPTYGSDWNAENWGQGTQVTVSSGSGGGGSGGGGSGGGGSFEEVQLVETGGGLVQPGKSLELTCATSGFTFNTAWMHWVRQSPDKRLEWIARIKDTSNNYATDYVESMKGRFTISRDDSKGSVNLQMNSLKEEDTATYYCTTDFYDGTYYWNYWGQGVMVTVSSTRIQNPDPAVYQLRDSKSSDKSVCLFTDFDSQTNVSQSKDSDVYITDKCVLDMRSMDFKSNSAVAWSNKSDFACANAFNNSIIPEDTFFPSPESSCDVKLVEKSFETDTNLNFQNLSVIGFRILLLKVAGFNLLMTLRLWSS

SEQ ID NO: 19754 - protein, 897 aa, Artificial Sequence
  Synthetic Polypeptide
MALPVTALLLPLALLLHAARPEVQVLESGGGLVQPGGSLRLSCAASGFTFSNFAMSWVRQAPGKGLEWVSTISGSAGTTDYADSVKGRFTISRDNSKKTLYLQMNSLRVEDTAVYYCADGRGPFFDYRGQGTLVTVSSGTGGGGSGGGGSGGGGSEFSYELIQPPSAAVTLGNTVSLTCVGDELPKRYAYWYQQKPDQSIVRVIYEDSVRPPGISDRFSGSSSGTTATLTIRDAQNEDEADYYCQSTYGDDKLYIFGGGTKLTVLGLEDLKNVFPPEVAVFEPSEAEISHTQKATLVCLATGFYPDHVELSWWVNGKEVHSGVCTDPQPLKEQPALNDSRYCLSSRLRVSATFWQNPRNHFRCQVQFYGLSENDEWTQDRAKPVTQIVSAEAWGRADCGFTSESYQQGVLSATILYEILLGKATLYAVLVSALVLMAMVKRKDSRGRAKRSGSGATNFSLLKQAGDVEENPGPTSMDWIWRILFLVGAATGAHSGPEVQLVESGGGLVQAGGSLRLSCAASGRTFSMGWFRQAPGKEREFVAAITYSGGSPYYASSVRGRFTISRDNAKNTVYLQMNSLKPEDTAVYYCAANPTYGSDWNAENWGQGTQVTVSSGSGGGGSGGGGSGGGGSFEEVQLVETGGGLVQPGKSLELTCATSGFTFNTAWMHWVRQSPDKRLEWIARIKDTSNNYATDYVESMKGRFTISRDDSKGSVNLQMNSLKEEDTATYYCTTDFYDGTYYWNYWGQGVMVTVSSTRIQNPDPAVYQLRDSKSSDKSVCLFTDFDSQTNVSQSKDSDVYITDKCVLDMRSMDFKSNSAVAWSNKSDFACANAFNNSIIPEDTFFPSPESSCDVKLVEKSFETDTNLNFQNLSVIGFRILLLKVAGFNLLMTLRLWSS

SEQ ID NO: 19755 - protein, 732 aa, Artificial Sequence
  Synthetic Polypeptide
MALPVTALLLPLALLLHAARPSVIELTQSPKFMSTSVGDRVNVTYKASQNVGTNVAWFQQKPGQSPKVLIYSASYRYSGVPDRFTGSGSGTDFTLTISNVQSEDLAEYFCQQYHTYPLTFGGGTKLEIKRGGGGSGGGGSGGGGSRMAQVQLQQSGAELARPGASVKMSCKASGYTFTTYTIHWVRRRPGHDLEWIGYINPSSGCSDYNQNFKGKTTLTADKSSNTAYMQLNSLTSEDSAVYYCARRADYGNYEYTWFAYWGQGTTVTVSSTREQKLISEEDLAKPTTTPAPRPPTPAPTIASQPLSLRPEACRPAAGGAVHTRGLDFACDIYIWAPLAGTCGVLLLSLVITLYCKRGRKKLLYIFKQPFMRPVQTTQEEDGCSCRFPEEEEGGCELRVKFSRSADAPAYQQGQNQLYNELNLGRREEYDVLDKRRGRDPEMGGKPRRKNPQEGLYNELQKDKMAEAYSEIGMKGERRRGKGHDGLYQGLSTATKDTYDALHMQALPPRSSGSGEGRGSLLTCGDVEENPGPHMTEYKPTVRLATRDDVPRAVRTLAAAFADYPATRHTVDPDRHIERVTELQELFLTRVGLDIGKVWVADDGAAVAVWTTPESVEAGAVFAEIGPRMAELSGSRLAAQQQMEGLLAPHRPKEPAWFLATVGVSPDHQGKGLGSAVVLPGVEAAERAGVPAFLETSAPRNLPFYERLGFTVTADVEVPEGPRTWCMTRKPGA

SEQ ID NO: 19756 - protein, 726 aa, Artificial Sequence
  Synthetic Polypeptide
MALPVTALLLPLALLLHAARPSVIELTQSPKFMSTSVGDRVNVTYKASQNVGTNVAWFQQKPGQSPKVLIYSASYRYSGVPDRFTGSGSGTDFTLTISNVQSEDLAEYFCQQYHTYPLTFGGGTKLEIKRGGGGSGGGGSGGGGSRMAQVQLQQSGAELARPGASVKMSCKASGYTFTTYTIHWVRRRPGHDLEWIGYINPSSGCSDYNQNFKGKTTLTADKSSNTAYMQLNSLTSEDSAVYYCARRADYGNYEYTWFAYWGQGTTVTVSSTREQKLISEEDLKIEVMYPPPYLDNEKSNGTIIHVKGKHLCPSPLFPGPSKPFWVLVVVGGVLACYSLLVTVAFIIFWVRSKRSRLLHSDYMNMTPRRPGPTRKHYQPYAPPRDFAAYRSRVKFSRSADAPAYQQGQNQLYNELNLGRREEYDVLDKRRGRDPEMGGKPRRKNPQEGLYNELQKDKMAEAYSEIGMKGERRRGKGHDGLYQGLSTATKDTYDALHMQALPPRSSGSGEGRGSLLTCGDVEENPGPHMTEYKPTVRLATRDDVPRAVRTLAAAFADYPATRHTVDPDRHIERVTELQELFLTRVGLDIGKVWVADDGAAVAVWTTPESVEAGAVFAEIGPRMAELSGSRLAAQQQMEGLLAPHRPKEPAWFLATVGVSPDHQGKGLGSAVVLPGVEAAERAGVPAFLETSAPRNLPFYERLGFTVTADVEVPEGPRTWCMTRKPGA

SEQ ID NO: 19757 - protein, 503 aa, Artificial Sequence
  Synthetic Polypeptide
MALPVTALLLPLALLLHAARPSVIELTQSPKFMSTSVGDRVNVTYKASQNVGTNVAWFQQKPGQSPKVLIYSASYRYSGVPDRFTGSGSGTDFTLTISNVQSEDLAEYFCQQYHTYPLTFGGGTKLEIKRGGGGSGGGGSGGGGSRMAQVQLQQSGAELARPGASVKMSCKASGYTFTTYTIHWVRRRPGHDLEWIGYINPSSGCSDYNQNFKGKTTLTADKSSNTAYMQLNSLTSEDSAVYYCARRADYGNYEYTWFAYWGQGTTVTVSSTREQKLISEEDLKIEVMYPPPYLDNEKSNGTIIHVKGKHLCPSPLFPGPSKPFWVLVVVGGVLACYSLLVTVAFIIFWVRSKRSRLLHSDYMNMTPRRPGPTRKHYQPYAPPRDFAAYRSRVKFSRSADAPAYQQGQNQLYNELNLGRREEYDVLDKRRGRDPEMGGKPRRKNPQEGLYNELQKDKMAEAYSEIGMKGERRRGKGHDGLYQGLSTATKDTYDALHMQALPPR

SEQ ID NO: 19758 - protein, 509 aa, Artificial Sequence
  Synthetic Polypeptide
MALPVTALLLPLALLLHAARPSVIELTQSPKFMSTSVGDRVNVTYKASQNVGTNVAWFQQKPGQSPKVLIYSASYRYSGVPDRFTGSGSGTDFTLTISNVQSEDLAEYFCQQYHTYPLTFGGGTKLEIKRGGGGSGGGGSGGGGSRMAQVQLQQSGAELARPGASVKMSCKASGYTFTTYTIHWVRRRPGHDLEWIGYINPSSGCSDYNQNFKGKTTLTADKSSNTAYMQLNSLTSEDSAVYYCARRADYGNYEYTWFAYWGQGTTVTVSSTREQKLISEEDLAKPTTTPAPRPPTPAPTIASQPLSLRPEACRPAAGGAVHTRGLDFACDIYIWAPLAGTCGVLLLSLVITLYCKRGRKKLLYIFKQPFMRPVQTTQEEDGCSCRFPEEEEGGCELRVKFSRSADAPAYQQGQNQLYNELNLGRREEYDVLDKRRGRDPEMGGKPRRKNPQEGLYNELQKDKMAEAYSEIGMKGERRRGKGHDGLYQGLSTATKDTYDALHMQALPPR

SEQ ID NO: 19759 - protein, 509 aa, Artificial Sequence
  Synthetic Polypeptide
MALPVTALLLPLALLLHAARPRMAQVQLQQSGAELARPGASVKMSCKASGYTFTTYTIHWVRRRPGHDLEWIGYINPSSGCSDYNQNFKGKTTLTADKSSNTAYMQLNSLTSEDSAVYYCARRADYGNYEYTWFAYWGQGTTVTVSSGGGGSGGGGSGGGGSSVIELTQSPKFMSTSVGDRVNVTYKASQNVGTNVAWFQQKPGQSPKVLIYSASYRYSGVPDRFTGSGSGTDFTLTISNVQSEDLAEYFCQQYHTYPLTFGGGTKLEIKRTREQKLISEEDLAKPTTTPAPRPPTPAPTIASQPLSLRPEACRPAAGGAVHTRGLDFACDIYIWAPLAGTCGVLLLSLVITLYCKRGRKKLLYIFKQPFMRPVQTTQEEDGCSCRFPEEEEGGCELRVKFSRSADAPAYQQGQNQLYNELNLGRREEYDVLDKRRGRDPEMGGKPRRKNPQEGLYNELQKDKMAEAYSEIGMKGERRRGKGHDGLYQGLSTATKDTYDALHMQALPPR

SEQ ID NO: 19760 - protein, 922 aa, Artificial Sequence
  Synthetic Polypeptide
MALPVTALLLPLALLLHAARPSVIELTQSPKFMSTSVGDRVNVTYKASQNVGTNVAWFQQKPGQSPKVLIYSASYRYSGVPDRFTGSGSGTDFTLTISNVQSEDLAEYFCQQYHTYPLTFGGGTKLEIKRGGGGSGGGGSGGGGSRMAQVQLQQSGAELARPGASVKMSCKASGYTFTTYTIHWVRRRPGHDLEWIGYINPSSGCSDYNQNFKGKTTLTADKSSNTAYMQLNSLTSEDSAVYYCARRADYGNYEYTWFAYWGQGTTVTVSSTREQKLISEEDLAKPTTTPAPRPPTPAPTIASQPLSLRPEACRPAAGGAVHTRGLDFACDIYIWAPLAGTCGVLLLSLVITLYCGRARVKFSRSADAPAYQQGQNQLYNELNLGRREEYDVLDKRRGRDPEMGGKPRRKNPQEGLYNELQKDKMAEAYSEIGMKGERRRGKGHDGLYQGLSTATKDTYDALHMQALPPRSRGSGATNFSLLKQAGDVEENPGPGIHMATYEVLCEVARKLGTDDREVVLFLLNVFIPQPTLAQLIGALRALKEEGRLTFPLLAECLFRAGRRDLLRDLLHLDPRFLERHLAGTMSYFSPYQLTVLHVDGELCARDIRSLIFLSKDTIGSRSTPQTFLHWVYCMENLDLLGPTDVDALMSMLRSLSRVDLQRQVQTLMGLHLSGPSHSQHYRHTPLETDFYDYKDDDDKTSGSGEGRGSLLTCGDVEENPGPHMTEYKPTVRLATRDDVPRAVRTLAAAFADYPATRHTVDPDRHIERVTELQELFLTRVGLDIGKVWVADDGAAVAVWTTPESVEAGAVFAEIGPRMAELSGSRLAAQQQMEGLLAPHRPKEPAWFLATVGVSPDHQGKGLGSAVVLPGVEAAERAGVPAFLETSAPRNLPFYERLGFTVTADVEVPEGPRTWCMTRKPGA

SEQ ID NO: 19761 - protein, 862 aa, Artificial Sequence
  Synthetic Polypeptide
MALPVTALLLPLALLLHAARPSVIELTQSPKFMSTSVGDRVNVTYKASQNVGTNVAWFQQKPGQSPKVLIYSASYRYSGVPDRFTGSGSGTDFTLTISNVQSEDLAEYFCQQYHTYPLTFGGGTKLEIKRLEIQNPDPAVYQLRDSKSSDKSVCLFTDFDSQTNVSQSKDSDVYITDKCVLDMRSMDFKSNSAVAWSNKSDFACANAFNNSIIPEDTFFPSSDVPCDVKLVEKSFETDTNLNFQNLSVIGFRILLLKVAGFNLLMTLRLWSSRAKRSGSGVKQTLNFDLLKLAGDVESNPGPTSMDWIWRILFLVGAATGAHSFERMAQVQLQQSGAELARPGASVKMSCKASGYTFTTYTIHWVRRRPGHDLEWIGYINPSSGCSDYNQNFKGKTTLTADKSSNTAYMQLNSLTSEDSAVYYCARRADYGNYEYTWFAYWGQGTTVTVSSTREDLKNVFPPEVAVFEPSKAEIAHTQKATLVCLATGFYPDHVELSWWVNGKEVHSGVCTDPQPLKEQPALNDSRYCLSSRLRVSATFWQNPRNHFRCQVQFYGLSENDEWTQDRAKPVTQIVSAEAWGRADCGITSASYHQGVLSATILYEILLGKATLYAVLVSALVLMAMVKRKDSRGRAKRSGSGATNFSLLKQAGDVEENPGPSRGHMTEYKPTVRLATRDDVPRAVRTLAAAFADYPATRHTVDPDRHIERVTELQELFLTRVGLDIGKVWVADDGAAVAVWTTPESVEAGAVFAEIGPRMAELSGSRLAAQQQMEGLLAPHRPKEPAWFLATVGVSPDHQGKGLGSAVVLPGVEAAERAGVPAFLETSAPRNLPFYERLGFTVTADVEVPEGPRTWCMTRKPGA

SEQ ID NO: 19762 - protein, 861 aa, Artificial Sequence
  Synthetic Polypeptide
MALPVTALLLPLALLLHAARPSVIELTQSPKFMSTSVGDRVNVTYKASQNVGTNVAWFQQKPGQSPKVLIYSASYRYSGVPDRFTGSGSGTDFTLTISNVQSEDLAEYFCQQYHTYPLTFGGGTKLEIKRLEDLKNVFPPEVAVFEPSKAEIAHTQKATLVCLATGFYPDHVELSWWVNGKEVHSGVCTDPQPLKEQPALNDSRYCLSSRLRVSATFWQNPRNHFRCQVQFYGLSENDEWTQDRAKPVTQIVSAEAWGRADCGITSASYHQGVLSATILYEILLGKATLYAVLVSALVLMAMVKRKDSRGRAKRSGSGATNFSLLKQAGDVEENPGPTSMDWIWRILFLVGAATGAHSFERMAQVQLQQSGAELARPGASVKMSCKASGYTFTTYTIHWVRRRPGHDLEWIGYINPSSGCSDYNQNFKGKTTLTADKSSNTAYMQLNSLTSEDSAVYYCARRADYGNYEYTWFAYWGQGTTVTVSSTRIQNPDPAVYQLRDSKSSDKSVCLFTDFDSQTNVSQSKDSDVYITDKCVLDMRSMDFKSNSAVAWSNKSDFACANAFNNSIIPEDTFFPSSDVPCDVKLVEKSFETDTNLNFQNLSVIGFRILLLKVAGFNLLMTLRLWSSRAKRSGSGVKQTLNFDLLKLAGDVESNPGPSRGHMTEYKPTVRLATRDDVPRAVRTLAAAFADYPATRHTVDPDRHIERVTELQELFLTRVGLDIGKVWVADDGAAVAVWTTPESVEAGAVFAEIGPRMAELSGSRLAAQQQMEGLLAPHRPKEPAWFLATVGVSPDHQGKGLGSAVVLPGVEAAERAGVPAFLETSAPRNLPFYERLGFTVTADVEVPEGPRTWCMTRKPGA

SEQ ID NO: 19763 - protein, 628 aa, Artificial Sequence
  Synthetic Polypeptide
MALPVTALLLPLALLLHAARPSVIELTQSPKFMSTSVGDRVNVTYKASQNVGTNVAWFQQKPGQSPKVLIYSASYRYSGVPDRFTGSGSGTDFTLTISNVQSEDLAEYFCQQYHTYPLTFGGGTKLEIKRLEDLKNVFPPEVAVFEPSEAEISHTQKATLVCLATGFYPDHVELSWWVNGKEVHSGVCTDPQPLKEQPALNDSRYCLSSRLRVSATFWQNPRNHFRCQVQFYGLSENDEWTQDRAKPVTQIVSAEAWGRADCGFTSESYQQGVLSATILYEILLGKATLYAVLVSALVLMAMVKRKDSRGRAKRSGSGATNFSLLKQAGDVEENPGPTSMDWIWRILFLVGAATGAHSFERMAQVQLQQSGAELARPGASVKMSCKASGYTFTTYTIHWVRRRPGHDLEWIGYINPSSGCSDYNQNFKGKTTLTADKSSNTAYMQLNSLTSEDSAVYYCARRADYGNYEYTWFAYWGQGTTVTVSSTRIQNPDPAVYQLRDSKSSDKSVCLFTDFDSQTNVSQSKDSDVYITDKCVLDMRSMDFKSNSAVAWSNKSDFACANAFNNSIIPEDTFFPSPESSCDVKLVEKSFETDTNLNFQNLSVIGFRILLLKVAGFNLLMTLRLWSS

SEQ ID NO: 19764 - protein, 853 aa, Artificial Sequence
  Synthetic Polypeptide
MALPVTALLLPLALLLHAARPSVIELTQSPKFMSTSVGDRVNVTYKASQNVGTNVAWFQQKPGQSPKVLIYSASYRYSGVPDRFTGSGSGTDFTLTISNVQSEDLAEYFCQQYHTYPLTFGGGTKLEIKRLEDLKNVFPPEVAVFEPSEAEISHTQKATLVCLATGFYPDHVELSWWVNGKEVHSGVCTDPQPLKEQPALNDSRYCLSSRLRVSATFWQNPRNHFRCQVQFYGLSENDEWTQDRAKPVTQIVSAEAWGRADCGFTSESYQQGVLSATILYEILLGKATLYAVLVSALVLMAMVKRKDSRGRAKRSGSGATNFSLLKQAGDVEENPGPTSMDWIWRILFLVGAATGAHSFERMAQVQLQQSGAELARPGASVKMSCKASGYTFTTYTIHWVRRRPGHDLEWIGYINPSSGCSDYNQNFKGKTTLTADKSSNTAYMQLNSLTSEDSAVYYCARRADYGNYEYTWFAYWGQGTTVTVSSTRIQNPDPAVYQLRDSKSSDKSVCLFTDFDSQTNVSQSKDSDVYITDKCVLDMRSMDFKSNSAVAWSNKSDFACANAFNNSIIPEDTFFPSPESSCDVKLVEKSFETDTNLNFQNLSVIGFRILLLKVAGFNLLMTLRLWSSRAKRSGSGVKQTLNFDLLKLAGDVESNPGPSRGGIHTMATYEVLCEVARKLGTDDREVVLFLLNVFIPQPTLAQLIGALRALKEEGRLTFPLLAECLFRAGRRDLLRDLLHLDPRFLERHLAGTMSYFSPYQLTVLHVDGELCARDIRSLIFLSKDTIGSRSTPQTFLHWVYCMENLDLLGPTDVDALMSMLRSLSRVDLQRQVQTLMGLHLSGPSHSQHYRHTP

SEQ ID NO: 19765 - protein, 632 aa, Artificial Sequence
  Synthetic Polypeptide
MALPVTALLLPLALLLHAARPSVIELTQSPKFMSTSVGDRVNVTYKASQNVGTNVAWFQQKPGQSPKVLIYSASYRYSGVPDRFTGSGSGTDFTLTISNVQSEDLAEYFCQQYHTYPLTFGGGTKLEIKRLEIQNPDPAVYQLRDSKSSDKSVCLFTDFDSQTNVSQSKDSDVYITDKCVLDMRSMDFKSNSAVAWSNKSDFACANAFNNSIIPEDTFFPSPESSCDVKLVEKSFETDTNLNFQNLSVIGFRILLLKVAGFNLLMTLRLWSSRAKRSGSGVKQTLNFDLLKLAGDVESNPGPTSMDWIWRILFLVGAATGAHSFERMAQVQLQQSGAELARPGASVKMSCKASGYTFTTYTIHWVRRRPGHDLEWIGYINPSSGCSDYNQNFKGKTTLTADKSSNTAYMQLNSLTSEDSAVYYCARRADYGNYEYTWFAYWGQGTTVTVSSTREDLKNVFPPEVAVFEPSEAEISHTQKATLVCLATGFYPDHVELSWWVNGKEVHSGVCTDPQPLKEQPALNDSRYCLSSRLRVSATFWQNPRNHFRCQVQFYGLSENDEWTQDRAKPVTQIVSAEAWGRADCGFTSESYQQGVLSATILYEILLGKATLYAVLVSALVLMAMVKRKDSRG

SEQ ID NO: 19766 - protein, 854 aa, Artificial Sequence
  Synthetic Polypeptide
MALPVTALLLPLALLLHAARPSVIELTQSPKFMSTSVGDRVNVTYKASQNVGTNVAWFQQKPGQSPKVLIYSASYRYSGVPDRFTGSGSGTDFTLTISNVQSEDLAEYFCQQYHTYPLTFGGGTKLEIKRLEIQNPDPAVYQLRDSKSSDKSVCLFTDFDSQTNVSQSKDSDVYITDKCVLDMRSMDFKSNSAVAWSNKSDFACANAFNNSIIPEDTFFPSPESSCDVKLVEKSFETDTNLNFQNLSVIGFRILLLKVAGFNLLMTLRLWSSRAKRSGSGVKQTLNFDLLKLAGDVESNPGPTSMDWIWRILFLVGAATGAHSFERMAQVQLQQSGAELARPGASVKMSCKASGYTFTTYTIHWVRRRPGHDLEWIGYINPSSGCSDYNQNFKGKTTLTADKSSNTAYMQLNSLTSEDSAVYYCARRADYGNYEYTWFAYWGQGTTVTVSSTREDLKNVFPPEVAVFEPSEAEISHTQKATLVCLATGFYPDHVELSWWVNGKEVHSGVCTDPQPLKEQPALNDSRYCLSSRLRVSATFWQNPRNHFRCQVQFYGLSENDEWTQDRAKPVTQIVSAEAWGRADCGFTSESYQQGVLSATILYEILLGKATLYAVLVSALVLMAMVKRKDSRGRAKRSGSGATNFSLLKQAGDVEENPGPSRGGIHTMATYEVLCEVARKLGTDDREVVLFLLNVFIPQPTLAQLIGALRALKEEGRLTFPLLAECLFRAGRRDLLRDLLHLDPRFLERHLAGTMSYFSPYQLTVLHVDGELCARDIRSLIFLSKDTIGSRSTPQTFLHWVYCMENLDLLGPTDVDALMSMLRSLSRVDLQRQVQTLMGLHLSGPSHSQHYRHTP

SEQ ID NO: 19767 - protein, 906 aa, Artificial Sequence
  Synthetic Polypeptide
MALPVTALLLPLALLLHAARPLEGKPIPNPLLGLDSTGSGEDLKNVFPPEVAVFEPSKAEIAHTQKATLVCLATGFYPDHVELSWWVNGKEVHSGVCTDPQPLKEQPALNDSRYCLSSRLRVSATFWQNPRNHFRCQVQFYGLSENDEWTQDRAKPVTQIVSAEAWGRADCGITSASYHQGVLSATILYEILLGKATLYAVLVSALVLMAMVKRKDSRGRAKRSGSGATNFSLLKQAGDVEENPGPTSMALPVTALLLPLALLLHAARPSVIELTQSPKFMSTSVGDRVNVTYKASQNVGTNVAWFQQKPGQSPKVLIYSASYRYSGVPDRFTGSGSGTDFTLTISNVQSEDLAEYFCQQYHTYPLTFGGGTKLEIKRGGGGSGGGGSGGGGSRMAQVQLQQSGAELARPGASVKMSCKASGYTFTTYTIHWVRRRPGHDLEWIGYINPSSGCSDYNQNFKGKTTLTADKSSNTAYMQLNSLTSEDSAVYYCARRADYGNYEYTWFAYWGQGTTVTVSSTREQKLISEEDGSGIQNPDPAVYQLRDSKSSDKSVCLFTDFDSQTNVSQSKDSDVYITDKCVLDMRSMDFKSNSAVAWSNKSDFACANAFNNSIIPEDTFFPSSDVPCDVKLVEKSFETDTNLNFQNLSVIGFRILLLKVAGFNLLMTLRLWSSRAKRSGSGVKQTLNFDLLKLAGDVESNPGPSRGHMTEYKPTVRLATRDDVPRAVRTLAAAFADYPATRHTVDPDRHIERVTELQELFLTRVGLDIGKVWVADDGAAVAVWTTPESVEAGAVFAEIGPRMAELSGSRLAAQQQMEGLLAPHRPKEPAWFLATVGVSPDHQGKGLGSAVVLPGVEAAERAGVPAFLETSAPRNLPFYERLGFTVTADVEVPEGPRTWCMTRKPGA

SEQ ID NO: 19768 - protein, 907 aa, Artificial Sequence
  Synthetic Polypeptide
MALPVTALLLPLALLLHAARPLEQKLISEEDLGSGDRPDPAVYQLRDSKSSDKSVCLFTDFDSQTNVSQSKDSDVYITDKCVLDMRSMDFKSNSAVAWSNKSDFACANAFNNSIIPEDTFFPSPESSCDVKLVEKSFETDTNLNFQNLSVIGFRILLLKVAGFNLLMTLRLWSSSSRAKRSGSGVKQTLNFDLLKLAGDVESNPGPTSMALPVTALLLPLALLLHAARPSVIELTQSPKFMSTSVGDRVNVTYKASQNVGTNVAWFQQKPGQSPKVLIYSASYRYSGVPDRFTGSGSGTDFTLTISNVQSEDLAEYFCQQYHTYPLTFGGGTKLEIKRGGGGSGGGGSGGGGSRMAQVQLQQSGAELARPGASVKMSCKASGYTFTTYTIHWVRRRPGHDLEWIGYINPSSGCSDYNQNFKGKTTLTADKSSNTAYMQLNSLTSEDSAVYYCARRADYGNYEYTWFAYWGQGTTVTVSSTRGKPIPNPLLGLDSTGSGEDLKNVFPPEVAVFEPSEAEISHTQKATLVCLATGFYPDHVELSWWVNGKEVHSGVCTDPQPLKEQPALNDSRYCLSSRLRVSATFWQNPRNHFRCQVQFYGLSENDEWTQDRAKPVTQIVSAEAWGRADCGFTSESYQQGVLSATILYEILLGKATLYAVLVSALVLMAMVKRKDSRGRAKRSGSGATNFSLLKQAGDVEENPGPSRGHMTEYKPTVRLATRDDVPRAVRTLAAAFADYPATRHTVDPDRHIERVTELQELFLTRVGLDIGKVWVADDGAAVAVWTTPESVEAGAVFAEIGPRMAELSGSRLAAQQQMEGLLAPHRPKEPAWFLATVGVSPDHQGKGLGSAVVLPGVEAAERAGVPAFLETSAPRNLPFYERLGFTVTADVEVPEGPRTWCMTRKPGA

SEQ ID NO: 19769 - protein, 861 aa, Artificial Sequence
  Synthetic Polypeptide
MALPVTALLLPLALLLHAARPSVIELTQSPKFMSTSVGDRVNVTYKASQNVGTNVAWFQQKPGQSPKVLIYSASYRYSGVPDRFTGSGSGTDFTLTISNVQSEDLAEYFCQQYHTYPLTFGGGTKLEIKRLEDLKNVFPPEVAVFEPSEAEISHTQKATLVCLATGFYPDHVELSWWVNGKEVHSGVSTDPQPLKEQPALNDSRYCLSSRLRVSATFWQNPRNHFRCQVQFYGLSENDEWTQDRAKPVTQIVSAEAWGRADCGFTSESYQQGVLSATILYEILLGKATLYAVLVSALVLMAMVKRKDSRGRAKRSGSGATNFSLLKQAGDVEENPGPTSMDWIWRILFLVGAATGAHSFERMAQVQLQQSGAELARPGASVKMSCKASGYTFTTYTIHWVRRRPGHDLEWIGYINPSSGCSDYNQNFKGKTTLTADKSSNTAYMQLNSLTSEDSAVYYCARRADYGNYEYTWFAYWGQGTTVTVSSTRIQNPDPAVYQLRDSKSSDKSVCLFTDFDSQTNVSQSKDSDVYITDKTVLDMRSMDFKSNSAVAWSNKSDFACANAFNNSIIPEDTFFPSPESSCDVKLVEKSFETDTNLNFQNLSVIGFRILLLKVAGFNLLMTLRLWSSRAKRSGSGVKQTLNFDLLKLAGDVESNPGPSRGHMTEYKPTVRLATRDDVPRAVRTLAAAFADYPATRHTVDPDRHIERVTELQELFLTRVGLDIGKVWVADDGAAVAVWTTPESVEAGAVFAEIGPRMAELSGSRLAAQQQMEGLLAPHRPKEPAWFLATVGVSPDHQGKGLGSAVVLPGVEAAERAGVPAFLETSAPRNLPFYERLGFTVTADVEVPEGPRTWCMTRKPGA

SEQ ID NO: 19770 - protein, 943 aa, Artificial Sequence
  Synthetic Polypeptide
MALPVTALLLPLALLLHAARPSVIELTQSPKFMSTSVGDRVNVTYKASQNVGTNVAWFQQKPGQSPKVLIYSASYRYSGVPDRFTGSGSGTDFTLTISNVQSEDLAEYFCQQYHTYPLTFGGGTKLEIKRLEDLKNVFPPEVAVFEPSEAEISHTQKATLVCLATGFYPDHVELSWWVNGKEVHSGVSTDPQPLKEQPALNDSRYCLSSRLRVSATFWQNPRNHFRCQVQFYGLSENDEWTQDRAKPVTQIVSAEAWGRADCGFTSESYQQGVLSATILYEILLGKATLYAVLVSALVLMAMVKRKDSRGRAKRSGSGATNFSLLKQAGDVEENPGPTSMDWIWRILFLVGAATGAHSFERMAQVQLQQSGAELARPGASVKMSCKASGYTFTTYTIHWVRRRPGHDLEWIGYINPSSGCSDYNQNFKGKTTLTADKSSNTAYMQLNSLTSEDSAVYYCARRADYGNYEYTWFAYWGQGTTVTVSSTREQKLISEEDGSGTPFPSLAPPIMLLVDGKQQMVVVCLVLDVAPPGLDSPIWFSAGNGSALDAFTYGPSPATDGTWTNLAHLSLPSEELASWEPLVCHTGPGAEGHSRSTQPMHLSGEASTARTCPQEPLRGTPGGALWLGVLRLLLFKLLLFDLLLTCSCLCDPAGPLPSPATTTRLRALGSHRLHPATETGGREATSSPRPQPRDRRWGDTPPGRKPGSPVRAKRSGSGVKQTLNFDLLKLAGDVESNPGPSRGHMTEYKPTVRLATRDDVPRAVRTLAAAFADYPATRHTVDPDRHIERVTELQELFLTRVGLDIGKVWVADDGAAVAVWTTPESVEAGAVFAEIGPRMAELSGSRLAAQQQMEGLLAPHRPKEPAWFLATVGVSPDHQGKGLGSAVVLPGVEAAERAGVPAFLETSAPRNLPFYERLGFTVTADVEVPEGPRTWCMTRKPGA

SEQ ID NO: 19771 - protein, 961 aa, Artificial Sequence
  Synthetic Polypeptide
MALPVTALLLPLALLLHAARPLEDLKNVFPPEVAVFEPSEAEISHTQKATLVCLATGFYPDHVELSWWVNGKEVHSGVSTDPQPLKEQPALNDSRYCLSSRLRVSATFWQNPRNHFRCQVQFYGLSENDEWTQDRAKPVTQIVSAEAWGRADCGFTSESYQQGVLSATILYEILLGKATLYAVLVSALVLMAMVKRKDSRGRAKRSGSGATNFSLLKQAGDVEENPGPTSMALPVTALLLPLALLLHAARPSVIELTQSPKFMSTSVGDRVNVTYKASQNVGTNVAWFQQKPGQSPKVLIYSASYRYSGVPDRFTGSGSGTDFTLTISNVQSEDLAEYFCQQYHTYPLTFGGGTKLEIKRGGGGSGGGGSGGGGSRMAQVQLQQSGAELARPGASVKMSCKASGYTFTTYTIHWVRRRPGHDLEWIGYINPSSGCSDYNQNFKGKTTLTADKSSNTAYMQLNSLTSEDSAVYYCARRADYGNYEYTWFAYWGQGTTVTVSSTREQKLISEEDLGSGTPFPSLAPPIMLLVDGKQQMVVVCLVLDVAPPGLDSPIWFSAGNGSALDAFTYGPSPATDGTWTNLAHLSLPSEELASWEPLVCHTGPGAEGHSRSTQPMHLSGEASTARTCPQEPLRGTPGGALWLGVLRLLLFKLLLFDLLLTCSCLCDPAGPLPSPATTTRLRALGSHRLHPATETGGREATSSPRPQPRDRRWGDTPPGRKPGSPVRAKRSGSGVKQTLNFDLLKLAGDVESNPGPSRSRGHMTEYKPTVRLATRDDVPRAVRTLAAAFADYPATRHTVDPDRHIERVTELQELFLTRVGLDIGKVWVADDGAAVAVWTTPESVEAGAVFAEIGPRMAELSGSRLAAQQQMEGLLAPHRPKEPAWFLATVGVSPDHQGKGLGSAVVLPGVEAAERAGVPAFLETSAPRNLPFYERLGFTVTADVEVPEGPRTWCMTRKPGA

SEQ ID NO: 19772 - protein, 898 aa, Artificial Sequence
  Synthetic Polypeptide
MALPVTALLLPLALLLHAARPSVIELTQSPKFMSTSVGDRVNVTYKASQNVGTNVAWFQQKPGQSPKVLIYSASYRYSGVPDRFTGSGSGTDFTLTISNVQSEDLAEYFCQQYHTYPLTFGGGTKLEIKRLEGKPIPNPLLGLDSTGSGDKQLDADVSPKPTIFLPSIAETKLQKAGTYLCLLEKFFPDVIKIHWQEKKSNTILGSQEGNTMKTNDTYMKFSWLTVPEKSLDKEHRCIVRHENNKNGVDQEIIFPPIKTDVITMDPKDNCSKDANDTLLLQLTNTSAYYMYLLLLLKSVVYFAIITCCLLRRTAFCCNGEKSRAKRSGSGATNFSLLKQAGDVEENPGPTSMDWIWRILFLVGAATGAHSFERMAQVQLQQSGAELARPGASVKMSCKASGYTFTTYTIHWVRRRPGHDLEWIGYINPSSGCSDYNQNFKGKTTLTADKSSNTAYMQLNSLTSEDSAVYYCARRADYGNYEYTWFAYWGQGTTVTVSSTREQKLISEEDGSGSQPHTKPSVFVMKNGTNVACLVKEFYPKDIRINLVSSKKITEFDPAIVISPSGKYNAVKLGKYEDSNSVTCSVQHDNKTVHSTDFEVKTDSTDHVKPKETENTKQPSKSCHKPKAIVHTEKVNMMSLTVLGLRMLFAKTVAVNFLLTAKLFFLRAKRSGSGVKQTLNFDLLKLAGDVESNPGPSRGHMTEYKPTVRLATRDDVPRAVRTLAAAFADYPATRHTVDPDRHIERVTELQELFLTRVGLDIGKVWVADDGAAVAVWTTPESVEAGAVFAEIGPRMAELSGSRLAAQQQMEGLLAPHRPKEPAWFLATVGVSPDHQGKGLGSAVVLPGVEAAERAGVPAFLETSAPRNLPFYERLGFTVTADVEVPEGPRTWCMTRKPGA

SEQ ID NO: 19773 - protein, 636 aa, Artificial Sequence
  Synthetic Polypeptide
MALPVTALLLPLALLLHAARPSVIELTQSPKFMSTSVGDRVNVTYKASQNVGTNVAWFQQKPGQSPKVLIYSASYRYSGVPDRFTGSGSGTDFTLTISNVQSEDLAEYFCQQYHTYPLTFGGGTKLEIKRLESQPHTKPSVFVMKNGTNVACLVKEFYPKDIRINLVSSKKITEFDPAIVISPSGKYNAVKLGKYEDSNSVTCSVQHDNKTVHSTDFEVKTDSTDHVKPKETENTKQPSKSCHKPKAIVHTEKVNMMSLTVLGLRMLFAKTVAVNFLLTAKLFFLRAKRSGSGATNFSLLKQAGDVEENPGPTSMDWIWRILFLVGAATGAHSFERMAQVQLQQSGAELARPGASVKMSCKASGYTFTTYTIHWVRRRPGHDLEWIGYINPSSGCSDYNQNFKGKTTLTADKSSNTAYMQLNSLTSEDSAVYYCARRADYGNYEYTWFAYWGQGTTVTVSSTRDKQLDADVSPKPTIFLPSIAETKLQKAGTYLCLLEKFFPDVIKIHWQEKKSNTILGSQEGNTMKTNDTYMKFSWLTVPEKSLDKEHRCIVRHENNKNGVDQEIIFPPIKTDVITMDPKDNCSKDANDTLLLQLTNTSAYYMYLLLLLKSVVYFAIITCCLLRRTAFCCNGEKS

SEQ ID NO: 19774 - protein, 913 aa, Artificial Sequence
  Synthetic Polypeptide
MALPVTALLLPLALLLHAARPLEGKPIPNPLLGLDSTGSGDKQLDADVSPKPTIFLPSIAETKLQKAGTYLCLLEKFFPDVIKIHWQEKKSNTILGSQEGNTMKTNDTYMKFSWLTVPEKSLDKEHRCIVRHENNKNGVDQEIIFPPIKTDVITMDPKDNCSKDANDTLLLQLTNTSAYYMYLLLLLKSVVYFAIITCCLLRRTAFCCNGEKSRAKRSGSGATNFSLLKQAGDVEENPGPTSMALPVTALLLPLALLLHAARPSVIELTQSPKFMSTSVGDRVNVTYKASQNVGTNVAWFQQKPGQSPKVLIYSASYRYSGVPDRFTGSGSGTDFTLTISNVQSEDLAEYFCQQYHTYPLTFGGGTKLEIKRGGGGSGGGGSGGGGSRMAQVQLQQSGAELARPGASVKMSCKASGYTFTTYTIHWVRRRPGHDLEWIGYINPSSGCSDYNQNFKGKTTLTADKSSNTAYMQLNSLTSEDSAVYYCARRADYGNYEYTWFAYWGQGTTVTVSSTREQKLISEEDGSGSQPHTKPSVFVMKNGTNVACLVKEFYPKDIRINLVSSKKITEFDPAIVISPSGKYNAVKLGKYEDSNSVTCSVQHDNKTVHSTDFEVKTDSTDHVKPKETENTKQPSKSCHKPKAIVHTEKVNMMSLTVLGLRMLFAKTVAVNFLLTAKLFFLRAKRSGSGVKQTLNFDLLKLAGDVESNPGPSRGHMTEYKPTVRLATRDDVPRAVRTLAAAFADYPATRHTVDPDRHIERVTELQELFLTRVGLDIGKVWVADDGAAVAVWTTPESVEAGAVFAEIGPRMAELSGSRLAAQQQMEGLLAPHRPKEPAWFLATVGVSPDHQGKGLGSAVVLPGVEAAERAGVPAFLETSAPRNLPFYERLGFTVTADVEVPEGPRTWCMTRKPGA

SEQ ID NO: 19775 - protein, 1038 aa, Artificial Sequence
  Synthetic Polypeptide
MALPVTALLLPLALLLHAARPSVIELTQSPKFMSTSVGDRVNVTYKASQNVGTNVAWFQQKPGQSPKVLIYSASYRYSGVPDRFTGSGSGTDFTLTISNVQSEDLAEYFCQQYHTYPLTFGGGTKLEIKRGQPKANPTVTLFPPSSEELQANKATLVCLISDFYPGAVTVAWKADGSPVKAGVETTKPSKQSNNKYAASSYLSLTPEQWKSHRSYSCQVTHEGSTVEKTVAPTECSGSQSFGLLDPKLCYLLDGILFIYGVILTALFLRVKFSRSADAPAYQQGQNQLYNELNLGRREEYDVLDKRRGRDPEMGGKPQRRKNPQEGLYNELQKDKMAEAYSEIGMKGERRRGKGHDGLYQGLSTATKDTYDALHMQALPPRRAKRSGSGATNFSLLKQAGDVEENPGPTSMDWIWRILFLVGAATGAHSFERMAQVQLQQSGAELARPGASVKMSCKASGYTFTTYTIHWVRRRPGHDLEWIGYINPSSGCSDYNQNFKGKTTLTADKSSNTAYMQLNSLTSEDSAVYYCARRADYGNYEYTWFAYWGQGTTVTVSSASTKGPSVFPLAPSSKSTSGGTAALGCLVKDYFPEPVTVSWNSGALTSGVHTFPAVLQSSGLYSLSSVVTVPSSSLGTQTYICNVNHKPSNTKVDKRVEPKSCGTQSFGLLDPKLCYLLDGILFIYGVILTALFLRVKFSRSADAPAYQQGQNQLYNELNLGRREEYDVLDKRRGRDPEMGGKPQRRKNPQEGLYNELQKDKMAEAYSEIGMKGERRRGKGHDGLYQGLSTATKDTYDALHMQALPPRRAKRSGSGVKQTLNFDLLKLAGDVESNPGPSRGHMTEYKPTVRLATRDDVPRAVRTLAAAFADYPATRHTVDPDRHIERVTELQELFLTRVGLDIGKVWVADDGAAVAVWTTPESVEAGAVFAEIGPRMAELSGSRLAAQQQMEGLLAPHRPKEPAWFLATVGVSPDHQGKGLGSAVVLPGVEAAERAGVPAFLETSAPRNLPFYERLGFTVTADVEVPEGPRTWCMTRKPGA

SEQ ID NO: 19776 - protein, 824 aa, Artificial Sequence
  Synthetic Polypeptide
MALPVTALLLPLALLLHAARPSVIELTQSPKFMSTSVGDRVNVTYKASQNVGTNVAWFQQKPGQSPKVLIYSASYRYSGVPDRFTGSGSGTDFTLTISNVQSEDLAEYFCQQYHTYPLTFGGGTKLEIKRLEDLKNVFPPEVAVFEPSEAEISHTQKATLVCLATGFYPDHVELSWWVNGKEVHSGVSTDPQPLKEQPALNDSRYCLSSRLRVSATFWQNPRNHFRCQVQFYGLSENDEWTQDRAKPVTQIVSAEAWGRADCGSQSFGLLDPKLCYLLDGILFIYGVILTALFLRVKFSRSADAPAYQQGQNQLYNELNLGRREEYDVLDKRRGRDPEMGGKPQRRKNPQEGLYNELQKDKMAEAYSEIGMKGERRRGKGHDGLYQGLSTATKDTYDALHMQALPPRRAKRSGSGATNFSLLKQAGDVEENPGPTSMDWIWRILFLVGAATGAHSFERMAQVQLQQSGAELARPGASVKMSCKASGYTFTTYTIHWVRRRPGHDLEWIGYINPSSGCSDYNQNFKGKTTLTADKSSNTAYMQLNSLTSEDSAVYYCARRADYGNYEYTWFAYWGQGTTVTVSSTRIQNPDPAVYQLRDSKSSDKSVCLFTDFDSQTNVSQSKDSDVYITDKTVLDMRSMDFKSNSAVAWSNKSDFACANAFNNSIIPEDTFFPSPESSCGTQSFGLLDPKLCYLLDGILFIYGVILTALFLRVKFSRSADAPAYQQGQNQLYNELNLGRREEYDVLDKRRGRDPEMGGKPQRRKNPQEGLYNELQKDKMAEAYSEIGMKGERRRGKGHDGLYQGLSTATKDTYDALHMQALPPR

SEQ ID NO: 19777 - protein, 824 aa, Artificial Sequence
  Synthetic Polypeptide
MALPVTALLLPLALLLHAARPSVIELTQSPKFMSTSVGDRVNVTYKASQNVGTNVAWFQQKPGQSPKVLIYSASYRYSGVPDRFTGSGSGTDFTLTISNVQSEDLAEYFCQQYHTYPLTFGGGTKLEIKRLEDLKNVFPPEVAVFEPSKAEIAHTQKATLVCLATGFYPDHVELSWWVNGKEVHSGVCTDPQPLKEQPALNDSRYCLSSRLRVSATFWQNPRNHFRCQVQFYGLSENDEWTQDRAKPVTQIVSAEAWGRADCGSQSFGLLDPKLCYLLDGILFIYGVILTALFLRVKFSRSADAPAYQQGQNQLYNELNLGRREEYDVLDKRRGRDPEMGGKPQRRKNPQEGLYNELQKDKMAEAYSEIGMKGERRRGKGHDGLYQGLSTATKDTYDALHMQALPPRRAKRSGSGATNFSLLKQAGDVEENPGPTSMDWIWRILFLVGAATGAHSFERMAQVQLQQSGAELARPGASVKMSCKASGYTFTTYTIHWVRRRPGHDLEWIGYINPSSGCSDYNQNFKGKTTLTADKSSNTAYMQLNSLTSEDSAVYYCARRADYGNYEYTWFAYWGQGTTVTVSSTRIQNPDPAVYQLRDSKSSDKSVCLFTDFDSQTNVSQSKDSDVYITDKCVLDMRSMDFKSNSAVAWSNKSDFACANAFNNSIIPEDTFFPSSDVPCGTQSFGLLDPKLCYLLDGILFIYGVILTALFLRVKFSRSADAPAYQQGQNQLYNELNLGRREEYDVLDKRRGRDPEMGGKPQRRKNPQEGLYNELQKDKMAEAYSEIGMKGERRRGKGHDGLYQGLSTATKDTYDALHMQALPPR

SEQ ID NO: 19778 - protein, 895 aa, Artificial Sequence
  Synthetic Polypeptide
MALPVTALLLPLALLLHAARPSVIELTQSPKFMSTSVGDRVNVTYKASQNVGTNVAWFQQKPGQSPKVLIYSASYRYSGVPDRFTGSGSGTDFTLTISNVQSEDLAEYFCQQYHTYPLTFGGGTKLEIKRLEGKPIPNPLLGLDSTGSGEDLKNVFPPEVAVFEPSEAEISHTQKATLVCLATGFYPDHVELSWWVNGKEVHSGVSTDPQPLKEQPALNDSRYCLSSRLRVSATFWQNPRNHFRCQVQFYGLSENDEWTQDRAKPVTQIVSAEAWGRADCGSQSFGLLDPKLCYLLDGILFIYGVILTALFLRVKFSRSADAPAYQQGQNQLYNELNLGRREEYDVLDKRRGRDPEMGGKPQRRKNPQEGLYNELQKDKMAEAYSEIGMKGERRRGKGHDGLYQGLSTATKDTYDALHMQALPPRRAKRSGSGATNFSLLKQAGDVEENPGPTSMDWIWRILFLVGAATGAHSFERMAQVQLQQSGAELARPGASVKMSCKASGYTFTTYTIHWVRRRPGHDLEWIGYINPSSGCSDYNQNFKGKTTLTADKSSNTAYMQLNSLTSEDSAVYYCARRADYGNYEYTWFAYWGQGTTVTVSSTREQKLISEEDGSGIQNPDPAVYQLRDSKSSDKSVCLFTDFDSQTNVSQSKDSDVYITDKTVLDMRSMDFKSNSAVAWSNKSDFACANAFNNSIIPEDTFFPSPESSCGTQSFGLLDPKLCYLLDGILFIYGVILTALFLRSKRSRLLHSDYMNMTPRRPGPTRKHYQPYAPPRDFAAYRSRVKFSRSADAPAYQQGQNQLYNELNLGRREEYDVLDKRRGRDPEMGGKPQRRKNPQEGLYNELQKDKMAEAYSEIGMKGERRRGKGHDGLYQGLSTATKDTYDALHMQALPPR

SEQ ID NO: 19779 - protein, 936 aa, Artificial Sequence
  Synthetic Polypeptide
MALPVTALLLPLALLLHAARPSVIELTQSPKFMSTSVGDRVNVTYKASQNVGTNVAWFQQKPGQSPKVLIYSASYRYSGVPDRFTGSGSGTDFTLTISNVQSEDLAEYFCQQYHTYPLTFGGGTKLEIKRLEGKPIPNPLLGLDSTGSGEDLKNVFPPEVAVFEPSEAEISHTQKATLVCLATGFYPDHVELSWWVNGKEVHSGVSTDPQPLKEQPALNDSRYCLSSRLRVSATFWQNPRNHFRCQVQFYGLSENDEWTQDRAKPVTQIVSAEAWGRADCGSQSFGLLDPKLCYLLDGILFIYGVILTALFLRSKRSRLLHSDYMNMTPRRPGPTRKHYQPYAPPRDFAAYRSRVKFSRSADAPAYQQGQNQLYNELNLGRREEYDVLDKRRGRDPEMGGKPQRRKNPQEGLYNELQKDKMAEAYSEIGMKGERRRGKGHDGLYQGLSTATKDTYDALHMQALPPRRAKRSGSGATNFSLLKQAGDVEENPGPTSMDWIWRILFLVGAATGAHSFERMAQVQLQQSGAELARPGASVKMSCKASGYTFTTYTIHWVRRRPGHDLEWIGYINPSSGCSDYNQNFKGKTTLTADKSSNTAYMQLNSLTSEDSAVYYCARRADYGNYEYTWFAYWGQGTTVTVSSTREQKLISEEDGSGIQNPDPAVYQLRDSKSSDKSVCLFTDFDSQTNVSQSKDSDVYITDKTVLDMRSMDFKSNSAVAWSNKSDFACANAFNNSIIPEDTFFPSPESSCGTQSFGLLDPKLCYLLDGILFIYGVILTALFLRSKRSRLLHSDYMNMTPRRPGPTRKHYQPYAPPRDFAAYRSRVKFSRSADAPAYQQGQNQLYNELNLGRREEYDVLDKRRGRDPEMGGKPQRRKNPQEGLYNELQKDKMAEAYSEIGMKGERRRGKGHDGLYQGLSTATKDTYDALHMQALPPR

SEQ ID NO: 19780 - protein, 897 aa, Artificial Sequence
  Synthetic Polypeptide
MALPVTALLLPLALLLHAARPSVIELTQSPKFMSTSVGDRVNVTYKASQNVGTNVAWFQQKPGQSPKVLIYSASYRYSGVPDRFTGSGSGTDFTLTISNVQSEDLAEYFCQQYHTYPLTFGGGTKLEIKRLEGKPIPNPLLGLDSTGSGEDLKNVFPPEVAVFEPSEAEISHTQKATLVCLATGFYPDHVELSWWVNGKEVHSGVSTDPQPLKEQPALNDSRYCLSSRLRVSATFWQNPRNHFRCQVQFYGLSENDEWTQDRAKPVTQIVSAEAWGRADCGSQSFGLLDPKLCYLLDGILFIYGVILTALFLRVKFSRSADAPAYQQGQNQLYNELNLGRREEYDVLDKRRGRDPEMGGKPQRRKNPQEGLYNELQKDKMAEAYSEIGMKGERRRGKGHDGLYQGLSTATKDTYDALHMQALPPRRAKRSGSGATNFSLLKQAGDVEENPGPTSMDWIWRILFLVGAATGAHSFERMAQVQLQQSGAELARPGASVKMSCKASGYTFTTYTIHWVRRRPGHDLEWIGYINPSSGCSDYNQNFKGKTTLTADKSSNTAYMQLNSLTSEDSAVYYCARRADYGNYEYTWFAYWGQGTTVTVSSTREQKLISEEDLGSGIQNPDPAVYQLRDSKSSDKSVCLFTDFDSQTNVSQSKDSDVYITDKTVLDMRSMDFKSNSAVAWSNKSDFACANAFNNSIIPEDTFFPSPESSCGTQSFGLLDPKLCYLLDGILFIYGVILTALFLKRGRKKLLYIFKQPFMRPVQTTQEEDGCSCRFPEEEEGGCELRVKFSRSADAPAYQQGQNQLYNELNLGRREEYDVLDKRRGRDPEMGGKPQRRKNPQEGLYNELQKDKMAEAYSEIGMKGERRRGKGHDGLYQGLSTATKDTYDALHMQALPPR

SEQ ID NO: 19781 - protein, 939 aa, Artificial Sequence
  Synthetic Polypeptide
MALPVTALLLPLALLLHAARPSVIELTQSPKFMSTSVGDRVNVTYKASQNVGTNVAWFQQKPGQSPKVLIYSASYRYSGVPDRFTGSGSGTDFTLTISNVQSEDLAEYFCQQYHTYPLTFGGGTKLEIKRLEGKPIPNPLLGLDSTGSGEDLKNVFPPEVAVFEPSEAEISHTQKATLVCLATGFYPDHVELSWWVNGKEVHSGVSTDPQPLKEQPALNDSRYCLSSRLRVSATFWQNPRNHFRCQVQFYGLSENDEWTQDRAKPVTQIVSAEAWGRADCGSQSFGLLDPKLCYLLDGILFIYGVILTALFLKRGRKKLLYIFKQPFMRPVQTTQEEDGCSCRFPEEEEGGCELRVKFSRSADAPAYQQGQNQLYNELNLGRREEYDVLDKRRGRDPEMGGKPQRRKNPQEGLYNELQKDKMAEAYSEIGMKGERRRGKGHDGLYQGLSTATKDTYDALHMQALPPRRAKRSGSGATNFSLLKQAGDVEENPGPTSMDWIWRILFLVGAATGAHSFERMAQVQLQQSGAELARPGASVKMSCKASGYTFTTYTIHWVRRRPGHDLEWIGYINPSSGCSDYNQNFKGKTTLTADKSSNTAYMQLNSLTSEDSAVYYCARRADYGNYEYTWFAYWGQGTTVTVSSTREQKLISEEDLGSGIQNPDPAVYQLRDSKSSDKSVCLFTDFDSQTNVSQSKDSDVYITDKTVLDMRSMDFKSNSAVAWSNKSDFACANAFNNSIIPEDTFFPSPESSCGTQSFGLLDPKLCYLLDGILFIYGVILTALFLKRGRKKLLYIFKQPFMRPVQTTQEEDGCSCRFPEEEEGGCELRVKFSRSADAPAYQQGQNQLYNELNLGRREEYDVLDKRRGRDPEMGGKPQRRKNPQEGLYNELQKDKMAEAYSEIGMKGERRRGKGHDGLYQGLSTATKDTYDALHMQALPPR

SEQ ID NO: 19782 - protein, 829 aa, Artificial Sequence
  Synthetic Polypeptide
MALPVTALLLPLALLLHAARPSVIELTQSPKFMSTSVGDRVNVTYKASQNVGTNVAWFQQKPGQSPKVLIYSASYRYSGVPDRFTGSGSGTDFTLTISNVQSEDLAEYFCQQYHTYPLTFGGGTKLEIKRLEQSFGLLDPKLCYLLDGILFIYGVILTALFLRVKFSRSADAPAYQQGQNQLYNELNLGRREEYDVLDKRRGRDPEMGGKPQRRKNPQEGLYNELQKDKMAEAYSEIGMKGERRRGKGHDGLYQGLSTATKDTYDALHMQALPPRRAKRSGSGATNFSLLKQAGDVEENPGPTSMDWIWRILFLVGAATGAHSFERMAQVQLQQSGAELARPGASVKMSCKASGYTFTTYTIHWVRRRPGHDLEWIGYINPSSGCSDYNQNFKGKTTLTADKSSNTAYMQLNSLTSEDSAVYYCARRADYGNYEYTWFAYWGQGTTVTVSSTRQSFGLLDPKLCYLLDGILFIYGVILTALFLRVKFSRSADAPAYQQGQNQLYNELNLGRREEYDVLDKRRGRDPEMGGKPQRRKNPQEGLYNELQKDKMAEAYSEIGMKGERRRGKGHDGLYQGLSTATKDTYDALHMQALPPRRAKRSGSGVKQTLNFDLLKLAGDVESNPGPSRGHMTEYKPTVRLATRDDVPRAVRTLAAAFADYPATRHTVDPDRHIERVTELQELFLTRVGLDIGKVWVADDGAAVAVWTTPESVEAGAVFAEIGPRMAELSGSRLAAQQQMEGLLAPHRPKEPAWFLATVGVSPDHQGKGLGSAVVLPGVEAAERAGVPAFLETSAPRNLPFYERLGFTVTADVEVPEGPRTWCMTRKPGA

SEQ ID NO: 19783 - protein, 654 aa, Artificial Sequence
  Synthetic Polypeptide
MALPVTALLLPLALLLHAARPSVIELTQSPKFMSTSVGDRVNVTYKASQNVGTNVAWFQQKPGQSPKVLIYSASYRYSGVPDRFTGSGSGTDFTLTISNVQSEDLAEYFCQQYHTYPLTFGGGTKLEIKRLEGQPKANPTVTLFPPSSEELQANKATLVCLISDFYPGAVTVAWKADGSPVKAGVETTKPSKQSNNKYAASSYLSLTPEQWKSHRSYSCQVTHEGSTVEKTVAPTECSPIKTDVITMDPKDNCSKDANDTLLLQLTNTSAYYMYLLLLLKSVVYFAIITCCLLRRTAFCCNGEKSRAKRSGSGATNFSLLKQAGDVEENPGPTSMDWIWRILFLVGAATGAHSFERMAQVQLQQSGAELARPGASVKMSCKASGYTFTTYTIHWVRRRPGHDLEWIGYINPSSGCSDYNQNFKGKTTLTADKSSNTAYMQLNSLTSEDSAVYYCARRADYGNYEYTWFAYWGQGTTVTVSSTRASTKGPSVFPLAPSSKSTSGGTAALGCLVKDYFPEPVTVSWNSGALTSGVHTFPAVLQSSGLYSLSSVVTVPSSSLGTQTYICNVNHKPSNTKVDKRVEPKSCEVKTDSTDHVKPKETENTKQPSKSCHKPKAIVHTEKVNMMSLTVLGLRMLFAKTVAVNFLLTAKLFFL

SEQ ID NO: 19784 - protein, 632 aa, Artificial Sequence
  Synthetic Polypeptide
MALPVTALLLPLALLLHAARPSVIELTQSPKFMSTSVGDRVNVTYKASQNVGTNVAWFQQKPGQSPKVLIYSASYRYSGVPDRFTGSGSGTDFTLTISNVQSEDLAEYFCQQYHTYPLTFGGGTKLEIKRLEGQPKANPTVTLFPPSSEELQANKATLVCLISDFYPGAVTVAWKADGSPVKAGVETTKPSKQSNNKYAASSYLSLTPEQWKSHRSYSCQVTHEGSTVEKTVAPTECSGRADCGITSASYHQGVLSATILYEILLGKATLYAVLVSALVLMAMVKRKDSRGRAKRSGSGATNFSLLKQAGDVEENPGPTSMDWIWRILFLVGAATGAHSFERMAQVQLQQSGAELARPGASVKMSCKASGYTFTTYTIHWVRRRPGHDLEWIGYINPSSGCSDYNQNFKGKTTLTADKSSNTAYMQLNSLTSEDSAVYYCARRADYGNYEYTWFAYWGQGTTVTVSSTRASTKGPSVFPLAPSSKSTSGGTAALGCLVKDYFPEPVTVSWNSGALTSGVHTFPAVLQSSGLYSLSSVVTVPSSSLGTQTYICNVNHKPSNTKVDKRVEPKSCIPEDTFFPSSDVPCDVKLVEKSFETDTNLNFQNLSVIGFRILLLKVAGFNLLMTLRLWSS

SEQ ID NO: 19785 - protein, 632 aa, Artificial Sequence
  Synthetic Polypeptide
MALPVTALLLPLALLLHAARPSVIELTQSPKFMSTSVGDRVNVTYKASQNVGTNVAWFQQKPGQSPKVLIYSASYRYSGVPDRFTGSGSGTDFTLTISNVQSEDLAEYFCQQYHTYPLTFGGGTKLEIKRLEGQPKANPTVTLFPPSSEELQANKATLVCLISDFYPGAVTVAWKADGSPVKAGVETTKPSKQSNNKYAASSYLSLTPEQWKSHRSYSCQVTHEGSTVEKTVAPTECSGRADCGFTSESYQQGVLSATILYEILLGKATLYAVLVSALVLMAMVKRKDSRGRAKRSGSGATNFSLLKQAGDVEENPGPTSMDWIWRILFLVGAATGAHSFERMAQVQLQQSGAELARPGASVKMSCKASGYTFTTYTIHWVRRRPGHDLEWIGYINPSSGCSDYNQNFKGKTTLTADKSSNTAYMQLNSLTSEDSAVYYCARRADYGNYEYTWFAYWGQGTTVTVSSTRASTKGPSVFPLAPSSKSTSGGTAALGCLVKDYFPEPVTVSWNSGALTSGVHTFPAVLQSSGLYSLSSVVTVPSSSLGTQTYICNVNHKPSNTKVDKRVEPKSCIPEDTFFPSPESSCDVKLVEKSFETDTNLNFQNLSVIGFRILLLKVAGFNLLMTLRLWSS

SEQ ID NO: 19786 - protein, 458 aa, Artificial Sequence
  Synthetic Polypeptide
MALPVTALLLPLALLLHAARPSVIELTQSPKFMSTSVGDRVNVTYKASQNVGTNVAWFQQKPGQSPKVLIYSASYRYSGVPDRFTGSGSGTDFTLTISNVQSEDLAEYFCQQYHTYPLTFGGGTKLEIKRGGGGSGGGGSGGGGSRMAQVQLQQSGAELARPGASVKMSCKASGYTFTTYTIHWVRRRPGHDLEWIGYINPSSGCSDYNQNFKGKTTLTADKSSNTAYMQLNSLTSEDSAVYYCARRADYGNYEYTWFAYWGQGTTVTVSSTRDGNEEMGGITQTPYKVSISGTTVILTCPQYPGSEILWQHNDKNIGGDEDDKNIGSDEDHLSLKEFSELEQSGYYVCYPRGSKPEDANFYLYLRARVCENCMEMDVMSVATIVIVDICITGGLLLLVYYWSKNRKAKAKPVTRGAGAGGRQRGQNKERPPPVPNPDYEPIRKGQRDLYSGLNQRRI

SEQ ID NO: 19787 - protein, 423 aa, Artificial Sequence
  Synthetic Polypeptide
MALPVTALLLPLALLLHAARPSVIELTQSPKFMSTSVGDRVNVTYKASQNVGTNVAWFQQKPGQSPKVLIYSASYRYSGVPDRFTGSGSGTDFTLTISNVQSEDLAEYFCQQYHTYPLTFGGGTKLEIKRGGGGSGGGGSGGGGSRMAQVQLQQSGAELARPGASVKMSCKASGYTFTTYTIHWVRRRPGHDLEWIGYINPSSGCSDYNQNFKGKTTLTADKSSNTAYMQLNSLTSEDSAVYYCARRADYGNYEYTWFAYWGQGTTVTVSSTRFKIPIEELEDRVFVNCNTSITWVEGTVGTLLSDITRLDLGKRILDPRGIYRCNGTDIYKDKESTVQVHYRMCQSCVELDPATVAGIIVTDVIATLLLALGVFCFAGHETGRLSGAADTQALLRNDQVYQPLRDRDDAQYSHLGGNWARNK

SEQ ID NO: 19788 - protein, 433 aa, Artificial Sequence
  Synthetic Polypeptide
MALPVTALLLPLALLLHAARPSVIELTQSPKFMSTSVGDRVNVTYKASQNVGTNVAWFQQKPGQSPKVLIYSASYRYSGVPDRFTGSGSGTDFTLTISNVQSEDLAEYFCQQYHTYPLTFGGGTKLEIKRGGGGSGGGGSGGGGSRMAQVQLQQSGAELARPGASVKMSCKASGYTFTTYTIHWVRRRPGHDLEWIGYINPSSGCSDYNQNFKGKTTLTADKSSNTAYMQLNSLTSEDSAVYYCARRADYGNYEYTWFAYWGQGTTVTVSSTRQSIKGNHLVKVYDYQEDGSVLLTCDAEAKNITWFKDGKMIGFLTEDKKKWNLGSNAKDPRGMYQCKGSQNKSKPLQVYYRMCQNCIELNAATISGFLFAEIVSIFVLAVGVYFIAGQDGVRQSRASDKQTLLPNDQLYQPLKDREDDQYSHLQGNQLRRN

SEQ ID NO: 19789 - protein, 416 aa, Artificial Sequence
  Synthetic Polypeptide
MALPVTALLLPLALLLHAARPSVIELTQSPKFMSTSVGDRVNVTYKASQNVGTNVAWFQQKPGQSPKVLIYSASYRYSGVPDRFTGSGSGTDFTLTISNVQSEDLAEYFCQQYHTYPLTFGGGTKLEIKRGGGGSGGGGSGGGGSRMAQVQLQQSGAELARPGASVKMSCKASGYTFTTYTIHWVRRRPGHDLEWIGYINPSSGCSDYNQNFKGKTTLTADKSSNTAYMQLNSLTSEDSAVYYCARRADYGNYEYTWFAYWGQGTTVTVSSTRQSFGLLDPKLCYLLDGILFIYGVILTALFLRVKFSRSADAPAYQQGQNQLYNELNLGRREEYDVLDKRRGRDPEMGGKPQRRKNPQEGLYNELQKDKMAEAYSEIGMKGERRRGKGHDGLYQGLSTATKDTYDALHMQALPPR

SEQ ID NO: 19790 - protein, 458 aa, Artificial Sequence
  Synthetic Polypeptide
MALPVTALLLPLALLLHAARPRMAQVQLQQSGAELARPGASVKMSCKASGYTFTTYTIHWVRRRPGHDLEWIGYINPSSGCSDYNQNFKGKTTLTADKSSNTAYMQLNSLTSEDSAVYYCARRADYGNYEYTWFAYWGQGTTVTVSSGGGGSGGGGSGGGGSSVIELTQSPKFMSTSVGDRVNVTYKASQNVGTNVAWFQQKPGQSPKVLIYSASYRYSGVPDRFTGSGSGTDFTLTISNVQSEDLAEYFCQQYHTYPLTFGGGTKLEIKRTRDGNEEMGGITQTPYKVSISGTTVILTCPQYPGSEILWQHNDKNIGGDEDDKNIGSDEDHLSLKEFSELEQSGYYVCYPRGSKPEDANFYLYLRARVCENCMEMDVMSVATIVIVDICITGGLLLLVYYWSKNRKAKAKPVTRGAGAGGRQRGQNKERPPPVPNPDYEPIRKGQRDLYSGLNQRRI

SEQ ID NO: 19791 - protein, 423 aa, Artificial Sequence
  Synthetic Polypeptide
MALPVTALLLPLALLLHAARPRMAQVQLQQSGAELARPGASVKMSCKASGYTFTTYTIHWVRRRPGHDLEWIGYINPSSGCSDYNQNFKGKTTLTADKSSNTAYMQLNSLTSEDSAVYYCARRADYGNYEYTWFAYWGQGTTVTVSSGGGGSGGGGSGGGGSSVIELTQSPKFMSTSVGDRVNVTYKASQNVGTNVAWFQQKPGQSPKVLIYSASYRYSGVPDRFTGSGSGTDFTLTISNVQSEDLAEYFCQQYHTYPLTFGGGTKLEIKRTRFKIPIEELEDRVFVNCNTSITWVEGTVGTLLSDITRLDLGKRILDPRGIYRCNGTDIYKDKESTVQVHYRMCQSCVELDPATVAGIIVTDVIATLLLALGVFCFAGHETGRLSGAADTQALLRNDQVYQPLRDRDDAQYSHLGGNWARNK

SEQ ID NO: 19792 - protein, 433 aa, Artificial Sequence
  Synthetic Polypeptide
MALPVTALLLPLALLLHAARPRMAQVQLQQSGAELARPGASVKMSCKASGYTFTTYTIHWVRRRPGHDLEWIGYINPSSGCSDYNQNFKGKTTLTADKSSNTAYMQLNSLTSEDSAVYYCARRADYGNYEYTWFAYWGQGTTVTVSSGGGGSGGGGSGGGGSSVIELTQSPKFMSTSVGDRVNVTYKASQNVGTNVAWFQQKPGQSPKVLIYSASYRYSGVPDRFTGSGSGTDFTLTISNVQSEDLAEYFCQQYHTYPLTFGGGTKLEIKRTRQSIKGNHLVKVYDYQEDGSVLLTCDAEAKNITWFKDGKMIGFLTEDKKKWNLGSNAKDPRGMYQCKGSQNKSKPLQVYYRMCQNCIELNAATISGFLFAEIVSIFVLAVGVYFIAGQDGVRQSRASDKQTLLPNDQLYQPLKDREDDQYSHLQGNQLRRN

SEQ ID NO: 19793 - protein, 416 aa, Artificial Sequence
  Synthetic Polypeptide
MALPVTALLLPLALLLHAARPRMAQVQLQQSGAELARPGASVKMSCKASGYTFTTYTIHWVRRRPGHDLEWIGYINPSSGCSDYNQNFKGKTTLTADKSSNTAYMQLNSLTSEDSAVYYCARRADYGNYEYTWFAYWGQGTTVTVSSGGGGSGGGGSGGGGSSVIELTQSPKFMSTSVGDRVNVTYKASQNVGTNVAWFQQKPGQSPKVLIYSASYRYSGVPDRFTGSGSGTDFTLTISNVQSEDLAEYFCQQYHTYPLTFGGGTKLEIKRTRQSFGLLDPKLCYLLDGILFIYGVILTALFLRVKFSRSADAPAYQQGQNQLYNELNLGRREEYDVLDKRRGRDPEMGGKPQRRKNPQEGLYNELQKDKMAEAYSEIGMKGERRRGKGHDGLYQGLSTATKDTYDALHMQALPPR

SEQ ID NO: 19794 - protein, 649 aa, Artificial Sequence
  Synthetic Polypeptide
MALPVTALLLPLALLLHAARPSVIELTQSPKFMSTSVGDRVNVTYKASQNVGTNVAWFQQKPGQSPKVLIYSASYRYSGVPDRFTGSGSGTDFTLTISNVQSEDLAEYFCQQYHTYPLTFGGGTKLEIKRGGGGSGGGGSGGGGSRMAQVQLQQSGAELARPGASVKMSCKASGYTFTTYTIHWVRRRPGHDLEWIGYINPSSGCSDYNQNFKGKTTLTADKSSNTAYMQLNSLTSEDSAVYYCARRADYGNYEYTWFAYWGQGTTVTVSSTRGSGIQNPDPAVYQLRDSKSSDKSVCLFTDFDSQTNVSQSKDSDVYITDKTVLDMRSMDFKSNSAVAWSNKSDFACANAFNNSIIPEDTFFPSPESSCDVKLVEKSFETDTNLNFQNLSVIGFRILLLKVAGFNLLMTLRLWSSRAKRSGSGVKQTLNFDLLKLAGDVESNPGPSRGHMTEYKPTVRLATRDDVPRAVRTLAAAFADYPATRHTVDPDRHIERVTELQELFLTRVGLDIGKVWVADDGAAVAVWTTPESVEAGAVFAEIGPRMAELSGSRLAAQQQMEGLLAPHRPKEPAWFLATVGVSPDHQGKGLGSAVVLPGVEAAERAGVPAFLETSAPRNLPFYERLGFTVTADVEVPEGPRTWCMTRKPGA

SEQ ID NO: 19795 - protein, 681 aa, Artificial Sequence
  Synthetic Polypeptide
MALPVTALLLPLALLLHAARPSVIELTQSPKFMSTSVGDRVNVTYKASQNVGTNVAWFQQKPGQSPKVLIYSASYRYSGVPDRFTGSGSGTDFTLTISNVQSEDLAEYFCQQYHTYPLTFGGGTKLEIKRGGGGSGGGGSGGGGSRMAQVQLQQSGAELARPGASVKMSCKASGYTFTTYTIHWVRRRPGHDLEWIGYINPSSGCSDYNQNFKGKTTLTADKSSNTAYMQLNSLTSEDSAVYYCARRADYGNYEYTWFAYWGQGTTVTVSSLEDLKNVFPPEVAVFEPSEAEISHTQKATLVCLATGFYPDHVELSWWVNGKEVHSGVSTDPQPLKEQPALNDSRYCLSSRLRVSATFWQNPRNHFRCQVQFYGLSENDEWTQDRAKPVTQIVSAEAWGRADCGFTSESYQQGVLSATILYEILLGKATLYAVLVSALVLMAMVKRKDSRGRAKRSGSGATNFSLLKQAGDVEENPGPTRGHMTEYKPTVRLATRDDVPRAVRTLAAAFADYPATRHTVDPDRHIERVTELQELFLTRVGLDIGKVWVADDGAAVAVWTTPESVEAGAVFAEIGPRMAELSGSRLAAQQQMEGLLAPHRPKEPAWFLATVGVSPDHQGKGLGSAVVLPGVEAAERAGVPAFLETSAPRNLPFYERLGFTVTADVEVPEGPRTWCMTRKPGA

SEQ ID NO: 19796 - protein, 731 aa, Artificial Sequence
  Synthetic Polypeptide
MALPVTALLLPLALLLHAARPSVIELTQSPKFMSTSVGDRVNVTYKASQNVGTNVAWFQQKPGQSPKVLIYSASYRYSGVPDRFTGSGSGTDFTLTISNVQSEDLAEYFCQQYHTYPLTFGGGTKLEIKRGGGGSGGGGSGGGGSRMAQVQLQQSGAELARPGASVKMSCKASGYTFTTYTIHWVRRRPGHDLEWIGYINPSSGCSDYNQNFKGKTTLTADKSSNTAYMQLNSLTSEDSAVYYCARRADYGNYEYTWFAYWGQGTTVTVSSTREQKLISEEDLGSGTPFPSLAPPIMLLVDGKQQMVVVCLVLDVAPPGLDSPIWFSAGNGSALDAFTYGPSPATDGTWTNLAHLSLPSEELASWEPLVCHTGPGAEGHSRSTQPMHLSGEASTARTCPQEPLRGTPGGALWLGVLRLLLFKLLLFDLLLTCSCLCDPAGPLPSPATTTRLRALGSHRLHPATETGGREATSSPRPQPRDRRWGDTPPGRKPGSPVRAKRSGSGVKQTLNFDLLKLAGDVESNPGPSRSRGHMTEYKPTVRLATRDDVPRAVRTLAAAFADYPATRHTVDPDRHIERVTELQELFLTRVGLDIGKVWVADDGAAVAVWTTPESVEAGAVFAEIGPRMAELSGSRLAAQQQMEGLLAPHRPKEPAWFLATVGVSPDHQGKGLGSAVVLPGVEAAERAGVPAFLETSAPRNLPFYERLGFTVTADVEVPEGPRTWCMTRKPGA

SEQ ID NO: 19797 - protein, 540 aa, Artificial Sequence
  Synthetic Polypeptide
MALPVTALLLPLALLLHAARPSVIELTQSPKFMSTSVGDRVNVTYKASQNVGTNVAWFQQKPGQSPKVLIYSASYRYSGVPDRFTGSGSGTDFTLTISNVQSEDLAEYFCQQYHTYPLTFGGGTKLEIKRLEDLKNVFPPEVAVFEPSEAEISHTQKATLVCLATGFYPDHVELSWWVNGKEVHSGVSTDPQPLKEQPALNDSRYCLSSRLRVSATFWQNPRNHFRCQVQFYGLSENDEWTQDRAKPVTQIVSAEAWGRADCGFTSESYQQGVLSATILYEILLGKATLYAVLVSALVLMAMVKRKDSRGRAKRSGSGATNFSLLKQAGDVEENPGPTRGHMTEYKPTVRLATRDDVPRAVRTLAAAFADYPATRHTVDPDRHIERVTELQELFLTRVGLDIGKVWVADDGAAVAVWTTPESVEAGAVFAEIGPRMAELSGSRLAAQQQMEGLLAPHRPKEPAWFLATVGVSPDHQGKGLGSAVVLPGVEAAERAGVPAFLETSAPRNLPFYERLGFTVTADVEVPEGPRTWCMTRKPGA

SEQ ID NO: 19798 - protein, 310 aa, Artificial Sequence
  Synthetic Polypeptide
MALPVTALLLPLALLLHAARPSVIELTQSPKFMSTSVGDRVNVTYKASQNVGTNVAWFQQKPGQSPKVLIYSASYRYSGVPDRFTGSGSGTDFTLTISNVQSEDLAEYFCQQYHTYPLTFGGGTKLEIKRLEDLKNVFPPEVAVFEPSEAEISHTQKATLVCLATGFYPDHVELSWWVNGKEVHSGVSTDPQPLKEQPALNDSRYCLSSRLRVSATFWQNPRNHFRCQVQFYGLSENDEWTQDRAKPVTQIVSAEAWGRADCGFTSESYQQGVLSATILYEILLGKATLYAVLVSALVLMAMVKRKDSRG

SEQ ID NO: 19799 - protein, 455 aa, Artificial Sequence
  Synthetic Polypeptide
MDWIWRILFLVGAATGAHSFERMAQVQLQQSGAELARPGASVKMSCKASGYTFTTYTIHWVRRRPGHDLEWIGYINPSSGCSDYNQNFKGKTTLTADKSSNTAYMQLNSLTSEDSAVYYCARRADYGNYEYTWFAYWGQGTTVTVSSTRIQNPDPAVYQLRDSKSSDKSVCLFTDFDSQTNVSQSKDSDVYITDKTVLDMRSMDFKSNSAVAWSNKSDFACANAFNNSIIPEDTFFPSPESSCDVKLVEKSFETDTNLNFQNLSVIGFRILLLKVAGFNLLMTLRLWSSRAKRSGSGVKQTLNFDLLKLAGDVESNPGPSRGHMAKPLSQEESTLIERATATINSIPISEDYSVASAALSSDGRIFTGVNVYHFTGGPCAELVVLGTAAAAAAGNLTCIVAIGNENRGILSPCGRCRQVLLDLHPGIKAIVKDSDGQPTAVGIRELLPSGYVWEG

SEQ ID NO: 19800 - protein, 289 aa, Artificial Sequence
  Synthetic Polypeptide
MDWIWRILFLVGAATGAHSFERMAQVQLQQSGAELARPGASVKMSCKASGYTFTTYTIHWVRRRPGHDLEWIGYINPSSGCSDYNQNFKGKTTLTADKSSNTAYMQLNSLTSEDSAVYYCARRADYGNYEYTWFAYWGQGTTVTVSSTRIQNPDPAVYQLRDSKSSDKSVCLFTDFDSQTNVSQSKDSDVYITDKTVLDMRSMDFKSNSAVAWSNKSDFACANAFNNSIIPEDTFFPSPESSCDVKLVEKSFETDTNLNFQNLSVIGFRILLLKVAGFNLLMTLRLWSS

SEQ ID NO: 19801 - protein, 558 aa, Artificial Sequence
  Synthetic Polypeptide
MALPVTALLLPLALLLHAARPSVIELTQSPKFMSTSVGDRVNVTYKASQNVGTNVAWFQQKPGQSPKVLIYSASYRYSGVPDRFTGSGSGTDFTLTISNVQSEDLAEYFCQQYHTYPLTFGGGTKLEIKRLEGKPIPNPLLGLDSTGSGEDLKNVFPPEVAVFEPSEAEISHTQKATLVCLATGFYPDHVELSWWVNGKEVHSGVCTDPQPLKEQPALNDSRYCLSSRLRVSATFWQNPRNHFRCQVQFYGLSENDEWTQDRAKPVTQIVSAEAWGRADCGFTSESYQQGVLSATILYEILLGKATLYAVLVSALVLMAMVKRKDSRGRAKRSGSGATNFSLLKQAGDVEENPGPTRGHMTEYKPTVRLATRDDVPRAVRTLAAAFADYPATRHTVDPDRHIERVTELQELFLTRVGLDIGKVWVADDGAAVAVWTTPESVEAGAVFAEIGPRMAELSGSRLAAQQQMEGLLAPHRPKEPAWFLATVGVSPDHQGKGLGSAVVLPGVEAAERAGVPAFLETSAPRNLPFYERLGFTVTADVEVPEGPRTWCMTRKPGA

SEQ ID NO: 19802 - protein, 328 aa, Artificial Sequence
  Synthetic Polypeptide
MALPVTALLLPLALLLHAARPSVIELTQSPKFMSTSVGDRVNVTYKASQNVGTNVAWFQQKPGQSPKVLIYSASYRYSGVPDRFTGSGSGTDFTLTISNVQSEDLAEYFCQQYHTYPLTFGGGTKLEIKRLEGKPIPNPLLGLDSTGSGEDLKNVFPPEVAVFEPSEAEISHTQKATLVCLATGFYPDHVELSWWVNGKEVHSGVCTDPQPLKEQPALNDSRYCLSSRLRVSATFWQNPRNHFRCQVQFYGLSENDEWTQDRAKPVTQIVSAEAWGRADCGFTSESYQQGVLSATILYEILLGKATLYAVLVSALVLMAMVKRKDSRG

SEQ ID NO: 19803 - protein, 467 aa, Artificial Sequence
  Synthetic Polypeptide
MDWIWRILFLVGAATGAHSFERMAQVQLQQSGAELARPGASVKMSCKASGYTFTTYTIHWVRRRPGHDLEWIGYINPSSGCSDYNQNFKGKTTLTADKSSNTAYMQLNSLTSEDSAVYYCARRADYGNYEYTWFAYWGQGTTVTVSSTREQKLISEEDGSGIQNPDPAVYQLRDSKSSDKSVCLFTDFDSQTNVSQSKDSDVYITDKCVLDMRSMDFKSNSAVAWSNKSDFACANAFNNSIIPEDTFFPSPESSCDVKLVEKSFETDTNLNFQNLSVIGFRILLLKVAGFNLLMTLRLWSSRAKRSGSGVKQTLNFDLLKLAGDVESNPGPSRGHMAKPLSQEESTLIERATATINSIPISEDYSVASAALSSDGRIFTGVNVYHFTGGPCAELVVLGTAAAAAAGNLTCIVAIGNENRGILSPCGRCRQVLLDLHPGIKAIVKDSDGQPTAVGIRELLPSGYVWEG

SEQ ID NO: 19804 - protein, 301 aa, Artificial Sequence
  Synthetic Polypeptide
MDWIWRILFLVGAATGAHSFERMAQVQLQQSGAELARPGASVKMSCKASGYTFTTYTIHWVRRRPGHDLEWIGYINPSSGCSDYNQNFKGKTTLTADKSSNTAYMQLNSLTSEDSAVYYCARRADYGNYEYTWFAYWGQGTTVTVSSTREQKLISEEDGSGIQNPDPAVYQLRDSKSSDKSVCLFTDFDSQTNVSQSKDSDVYITDKCVLDMRSMDFKSNSAVAWSNKSDFACANAFNNSIIPEDTFFPSPESSCDVKLVEKSFETDTNLNFQNLSVIGFRILLLKVAGFNLLMTLRLWSS

SEQ ID NO: 19805 - protein, 649 aa, Artificial Sequence
  Synthetic Polypeptide
MALPVTALLLPLALLLHAARPSVIELTQSPKFMSTSVGDRVNVTYKASQNVGTNVAWFQQKPGQSPKVLIYSASYRYSGVPDRFTGSGSGTDFTLTISNVQSEDLAEYFCQQYHTYPLTFGGGTKLEIKRGGGGSGGGGSGGGGSRMAQVQLQQSGAELARPGASVKMSCKASGYTFTTYTIHWVRRRPGHDLEWIGYINPSSGCSDYNQNFKGKTTLTADKSSNTAYMQLNSLTSEDSAVYYCARRADYGNYEYTWFAYWGQGTTVTVSSTRGSGIQNPDPAVYQLRDSKSSDKSVCLFTDFDSQTNVSQSKDSDVYITDKTVLDMRSMDFKSNSAVAWSNKSDFACANAFNNSIIPEDTFFPSSDVPCDVKLVEKSFETDTNLNFQNLSVIGFRILLLKVAGFNLLMTLRLWSSRAKRSGSGVKQTLNFDLLKLAGDVESNPGPSRGHMTEYKPTVRLATRDDVPRAVRTLAAAFADYPATRHTVDPDRHIERVTELQELFLTRVGLDIGKVWVADDGAAVAVWTTPESVEAGAVFAEIGPRMAELSGSRLAAQQQMEGLLAPHRPKEPAWFLATVGVSPDHQGKGLGSAVVLPGVEAAERAGVPAFLETSAPRNLPFYERLGFTVTADVEVPEGPRTWCMTRKPGA

SEQ ID NO: 19806 - protein, 681 aa, Artificial Sequence
  Synthetic Polypeptide
MALPVTALLLPLALLLHAARPSVIELTQSPKFMSTSVGDRVNVTYKASQNVGTNVAWFQQKPGQSPKVLIYSASYRYSGVPDRFTGSGSGTDFTLTISNVQSEDLAEYFCQQYHTYPLTFGGGTKLEIKRGGGGSGGGGSGGGGSRMAQVQLQQSGAELARPGASVKMSCKASGYTFTTYTIHWVRRRPGHDLEWIGYINPSSGCSDYNQNFKGKTTLTADKSSNTAYMQLNSLTSEDSAVYYCARRADYGNYEYTWFAYWGQGTTVTVSSLEDLKNVFPPEVAVFEPSKAEIAHTQKATLVCLATGFYPDHVELSWWVNGKEVHSGVSTDPQPLKEQPALNDSRYCLSSRLRVSATFWQNPRNHFRCQVQFYGLSENDEWTQDRAKPVTQIVSAEAWGRADCGITSASYHQGVLSATILYEILLGKATLYAVLVSALVLMAMVKRKDSRGRAKRSGSGATNFSLLKQAGDVEENPGPTRGHMTEYKPTVRLATRDDVPRAVRTLAAAFADYPATRHTVDPDRHIERVTELQELFLTRVGLDIGKVWVADDGAAVAVWTTPESVEAGAVFAEIGPRMAELSGSRLAAQQQMEGLLAPHRPKEPAWFLATVGVSPDHQGKGLGSAVVLPGVEAAERAGVPAFLETSAPRNLPFYERLGFTVTADVEVPEGPRTWCMTRKPGA

SEQ ID NO: 19807 - protein, 704 aa, Artificial Sequence
  Synthetic Polypeptide
MALPVTALLLPLALLLHAARPSVIELTQSPKFMSTSVGDRVNVTYKASQNVGTNVAWFQQKPGQSPKVLIYSASYRYSGVPDRFTGSGSGTDFTLTISNVQSEDLAEYFCQQYHTYPLTFGGGTKLEIKRGGGGSGGGGSGGGGSRMAQVQLQQSGAELARPGASVKMSCKASGYTFTTYTIHWVRRRPGHDLEWIGYINPSSGCSDYNQNFKGKTTLTADKSSNTAYMQLNSLTSEDSAVYYCARRADYGNYEYTWFAYWGQGTTVTVSSTRGSGGGGSGGGGSGDGNEEMGGITQTPYKVSISGTTVILTCPQYPGSEILWQHNDKNIGGDEDDKNIGSDEDHLSLKEFSELEQSGYYVCYPRGSKPEDANFYLYLRARVCENCMEMDVMSVATIVIVDICITGGLLLLVYYWSKNRKAKAKPVTRGAGAGGRQRGQNKERPPPVPNPDYEPIRKGQRDLYSGLNQRRIRAKRSGSGVKQTLNFDLLKLAGDVESNPGPSRGHMTEYKPTVRLATRDDVPRAVRTLAAAFADYPATRHTVDPDRHIERVTELQELFLTRVGLDIGKVWVADDGAAVAVWTTPESVEAGAVFAEIGPRMAELSGSRLAAQQQMEGLLAPHRPKEPAWFLATVGVSPDHQGKGLGSAVVLPGVEAAERAGVPAFLETSAPRNLPFYERLGFTVTADVEVPEGPRTWCMTRKPGA

SEQ ID NO: 19808 - protein, 669 aa, Artificial Sequence
  Synthetic Polypeptide
MALPVTALLLPLALLLHAARPSVIELTQSPKFMSTSVGDRVNVTYKASQNVGTNVAWFQQKPGQSPKVLIYSASYRYSGVPDRFTGSGSGTDFTLTISNVQSEDLAEYFCQQYHTYPLTFGGGTKLEIKRGGGGSGGGGSGGGGSRMAQVQLQQSGAELARPGASVKMSCKASGYTFTTYTIHWVRRRPGHDLEWIGYINPSSGCSDYNQNFKGKTTLTADKSSNTAYMQLNSLTSEDSAVYYCARRADYGNYEYTWFAYWGQGTTVTVSSTRGSGGGGSGGGGSGFKIPIEELEDRVFVNCNTSITWVEGTVGTLLSDITRLDLGKRILDPRGIYRCNGTDIYKDKESTVQVHYRMCQSCVELDPATVAGIIVTDVIATLLLALGVFCFAGHETGRLSGAADTQALLRNDQVYQPLRDRDDAQYSHLGGNWARNKRAKRSGSGVKQTLNFDLLKLAGDVESNPGPSRGHMTEYKPTVRLATRDDVPRAVRTLAAAFADYPATRHTVDPDRHIERVTELQELFLTRVGLDIGKVWVADDGAAVAVWTTPESVEAGAVFAEIGPRMAELSGSRLAAQQQMEGLLAPHRPKEPAWFLATVGVSPDHQGKGLGSAVVLPGVEAAERAGVPAFLETSAPRNLPFYERLGFTVTADVEVPEGPRTWCMTRKPGA

SEQ ID NO: 19809 - protein, 679 aa, Artificial Sequence
  Synthetic Polypeptide
MALPVTALLLPLALLLHAARPSVIELTQSPKFMSTSVGDRVNVTYKASQNVGTNVAWFQQKPGQSPKVLIYSASYRYSGVPDRFTGSGSGTDFTLTISNVQSEDLAEYFCQQYHTYPLTFGGGTKLEIKRGGGGSGGGGSGGGGSRMAQVQLQQSGAELARPGASVKMSCKASGYTFTTYTIHWVRRRPGHDLEWIGYINPSSGCSDYNQNFKGKTTLTADKSSNTAYMQLNSLTSEDSAVYYCARRADYGNYEYTWFAYWGQGTTVTVSSTRGSGGGGSGGGGSGQSIKGNHLVKVYDYQEDGSVLLTCDAEAKNITWFKDGKMIGFLTEDKKKWNLGSNAKDPRGMYQCKGSQNKSKPLQVYYRMCQNCIELNAATISGFLFAEIVSIFVLAVGVYFIAGQDGVRQSRASDKQTLLPNDQLYQPLKDREDDQYSHLQGNQLRRNRAKRSGSGVKQTLNFDLLKLAGDVESNPGPSRGHMTEYKPTVRLATRDDVPRAVRTLAAAFADYPATRHTVDPDRHIERVTELQELFLTRVGLDIGKVWVADDGAAVAVWTTPESVEAGAVFAEIGPRMAELSGSRLAAQQQMEGLLAPHRPKEPAWFLATVGVSPDHQGKGLGSAVVLPGVEAAERAGVPAFLETSAPRNLPFYERLGFTVTADVEVPEGPRTWCMTRKPGA

SEQ ID NO: 19810 - protein, 662 aa, Artificial Sequence
  Synthetic Polypeptide
MALPVTALLLPLALLLHAARPSVIELTQSPKFMSTSVGDRVNVTYKASQNVGTNVAWFQQKPGQSPKVLIYSASYRYSGVPDRFTGSGSGTDFTLTISNVQSEDLAEYFCQQYHTYPLTFGGGTKLEIKRGGGGSGGGGSGGGGSRMAQVQLQQSGAELARPGASVKMSCKASGYTFTTYTIHWVRRRPGHDLEWIGYINPSSGCSDYNQNFKGKTTLTADKSSNTAYMQLNSLTSEDSAVYYCARRADYGNYEYTWFAYWGQGTTVTVSSTRGSGGGGSGGGGSGQSFGLLDPKLCYLLDGILFIYGVILTALFLRVKFSRSADAPAYQQGQNQLYNELNLGRREEYDVLDKRRGRDPEMGGKPQRRKNPQEGLYNELQKDKMAEAYSEIGMKGERRRGKGHDGLYQGLSTATKDTYDALHMQALPPRRAKRSGSGVKQTLNFDLLKLAGDVESNPGPSRGHMTEYKPTVRLATRDDVPRAVRTLAAAFADYPATRHTVDPDRHIERVTELQELFLTRVGLDIGKVWVADDGAAVAVWTTPESVEAGAVFAEIGPRMAELSGSRLAAQQQMEGLLAPHRPKEPAWFLATVGVSPDHQGKGLGSAVVLPGVEAAERAGVPAFLETSAPRNLPFYERLGFTVTADVEVPEGPRTWCMTRKPGA

SEQ ID NO: 19811 - protein, 763 aa, Artificial Sequence
  Synthetic Polypeptide
MALPVTALLLPLALLLHAARPEVQLVESGGGLVQPGGSLRLSCAASGFSFSDFWMSWVRQAPGKGLEWVATISQAGSEKDYVDSVKGRFTISRDNAKKSLYLQMNSLRAEDTAVYYCASGVYSFDYRGQGTLVTVSSGTGGGGSGGGGSGGGGSEFSVIELTQSPKFMSTSVGDRVNVTYKASQNVGTNVAWFQQKPGQSPKVLIYSASYRYSGVPDRFTGSGSGTDFTLTISNVQSEDLAEYFCQQYHTYPLTFGGGTKLEIKRLEDLKNVFPPEVAVFEPSEAEISHTQKATLVCLATGFYPDHVELSWWVNGKEVHSGVCTDPQPLKEQPALNDSRYCLSSRLRVSATFWQNPRNHFRCQVQFYGLSENDEWTQDRAKPVTQIVSAEAWGRADCGFTSESYQQGVLSATILYEILLGKATLYAVLVSALVLMAMVKRKDSRGRAKRSGSGATNFSLLKQAGDVEENPGPTSMDWIWRILFLVGAATGAHSFERMAQVQLQQSGAELARPGASVKMSCKASGYTFTTYTIHWVRRRPGHDLEWIGYINPSSGCSDYNQNFKGKTTLTADKSSNTAYMQLNSLTSEDSAVYYCARRADYGNYEYTWFAYWGQGTTVTVSSTRIQNPDPAVYQLRDSKSSDKSVCLFTDFDSQTNVSQSKDSDVYITDKCVLDMRSMDFKSNSAVAWSNKSDFACANAFNNSIIPEDTFFPSPESSCDVKLVEKSFETDTNLNFQNLSVIGFRILLLKVAGFNLLMTLRLWSS

SEQ ID NO: 19812 - protein, 767 aa, Artificial Sequence
  Synthetic Polypeptide
MALPVTALLLPLALLLHAARPEVQLVESGGGLVQPGGSLRLSCAASGFSFSDFWMSWVRQAPGKGLEWVATISQAGSEKDYVDSVKGRFTISRDNAKKSLYLQMNSLRAEDTAVYYCASGVYSFDYRGQGTLVTVSSGTGGGGSGGGGSGGGGSEFSVIELTQSPKFMSTSVGDRVNVTYKASQNVGTNVAWFQQKPGQSPKVLIYSASYRYSGVPDRFTGSGSGTDFTLTISNVQSEDLAEYFCQQYHTYPLTFGGGTKLEIKRLEIQNPDPAVYQLRDSKSSDKSVCLFTDFDSQTNVSQSKDSDVYITDKCVLDMRSMDFKSNSAVAWSNKSDFACANAFNNSIIPEDTFFPSPESSCDVKLVEKSFETDTNLNFQNLSVIGFRILLLKVAGFNLLMTLRLWSSRAKRSGSGVKQTLNFDLLKLAGDVESNPGPTSMDWIWRILFLVGAATGAHSFERMAQVQLQQSGAELARPGASVKMSCKASGYTFTTYTIHWVRRRPGHDLEWIGYINPSSGCSDYNQNFKGKTTLTADKSSNTAYMQLNSLTSEDSAVYYCARRADYGNYEYTWFAYWGQGTTVTVSSTREDLKNVFPPEVAVFEPSEAEISHTQKATLVCLATGFYPDHVELSWWVNGKEVHSGVCTDPQPLKEQPALNDSRYCLSSRLRVSATFWQNPRNHFRCQVQFYGLSENDEWTQDRAKPVTQIVSAEAWGRADCGFTSESYQQGVLSATILYEILLGKATLYAVLVSALVLMAMVKRKDSRG

SEQ ID NO: 19813 - protein, 959 aa, Artificial Sequence
  Synthetic Polypeptide
MALPVTALLLPLALLLHAARPEVQLVESGGGLVQPGGSLRLSCAASGFSFSDFWMSWVRQAPGKGLEWVATISQAGSEKDYVDSVKGRFTISRDNAKKSLYLQMNSLRAEDTAVYYCASGVYSFDYRGQGTLVTVSSGTGGGGSGGGGSGGGGSEFSVIELTQSPKFMSTSVGDRVNVTYKASQNVGTNVAWFQQKPGQSPKVLIYSASYRYSGVPDRFTGSGSGTDFTLTISNVQSEDLAEYFCQQYHTYPLTFGGGTKLEIKRLEDLKNVFPPEVAVFEPSEAEISHTQKATLVCLATGFYPDHVELSWWVNGKEVHSGVSTDPQPLKEQPALNDSRYCLSSRLRVSATFWQNPRNHFRCQVQFYGLSENDEWTQDRAKPVTQIVSAEAWGRADCGSQSFGLLDPKLCYLLDGILFIYGVILTALFLRVKFSRSADAPAYQQGQNQLYNELNLGRREEYDVLDKRRGRDPEMGGKPQRRKNPQEGLYNELQKDKMAEAYSEIGMKGERRRGKGHDGLYQGLSTATKDTYDALHMQALPPRRAKRSGSGATNFSLLKQAGDVEENPGPTSMDWIWRILFLVGAATGAHSFERMAQVQLQQSGAELARPGASVKMSCKASGYTFTTYTIHWVRRRPGHDLEWIGYINPSSGCSDYNQNFKGKTTLTADKSSNTAYMQLNSLTSEDSAVYYCARRADYGNYEYTWFAYWGQGTTVTVSSTRIQNPDPAVYQLRDSKSSDKSVCLFTDFDSQTNVSQSKDSDVYITDKTVLDMRSMDFKSNSAVAWSNKSDFACANAFNNSIIPEDTFFPSPESSCGTQSFGLLDPKLCYLLDGILFIYGVILTALFLRVKFSRSADAPAYQQGQNQLYNELNLGRREEYDVLDKRRGRDPEMGGKPQRRKNPQEGLYNELQKDKMAEAYSEIGMKGERRRGKGHDGLYQGLSTATKDTYDALHMQALPPR

SEQ ID NO: 19814 - protein, 789 aa, Artificial Sequence
  Synthetic Polypeptide
MALPVTALLLPLALLLHAARPEVQLVESGGGLVQPGGSLRLSCAASGFSFSDFWMSWVRQAPGKGLEWVATISQAGSEKDYVDSVKGRFTISRDNAKKSLYLQMNSLRAEDTAVYYCASGVYSFDYRGQGTLVTVSSGTGGGGSGGGGSGGGGSEFSVIELTQSPKFMSTSVGDRVNVTYKASQNVGTNVAWFQQKPGQSPKVLIYSASYRYSGVPDRFTGSGSGTDFTLTISNVQSEDLAEYFCQQYHTYPLTFGGGTKLEIKRLEGQPKANPTVTLFPPSSEELQANKATLVCLISDFYPGAVTVAWKADGSPVKAGVETTKPSKQSNNKYAASSYLSLTPEQWKSHRSYSCQVTHEGSTVEKTVAPTECSPIKTDVITMDPKDNCSKDANDTLLLQLTNTSAYYMYLLLLLKSVVYFAIITCCLLRRTAFCCNGEKSRAKRSGSGATNFSLLKQAGDVEENPGPTSMDWIWRILFLVGAATGAHSFERMAQVQLQQSGAELARPGASVKMSCKASGYTFTTYTIHWVRRRPGHDLEWIGYINPSSGCSDYNQNFKGKTTLTADKSSNTAYMQLNSLTSEDSAVYYCARRADYGNYEYTWFAYWGQGTTVTVSSTRASTKGPSVFPLAPSSKSTSGGTAALGCLVKDYFPEPVTVSWNSGALTSGVHTFPAVLQSSGLYSLSSVVTVPSSSLGTQTYICNVNHKPSNTKVDKRVEPKSCEVKTDSTDHVKPKETENTKQPSKSCHKPKAIVHTEKVNMMSLTVLGLRMLFAKTVAVNFLLTAKLFFL

SEQ ID NO: 19815 - protein, 770 aa, Artificial Sequence
  Synthetic Polypeptide
MALPVTALLLPLALLLHAARPEVQLVESGGGLVQPGGSLRLSCAASGFSFSDFWMSWVRQAPGKGLEWVATISQAGSEKDYVDSVKGRFTISRDNAKKSLYLQMNSLRAEDTAVYYCASGVYSFDYRGQGTLVTVSSGTGGGGSGGGGSGGGGSEFSVIELTQSPKFMSTSVGDRVNVTYKASQNVGTNVAWFQQKPGQSPKVLIYSASYRYSGVPDRFTGSGSGTDFTLTISNVQSEDLAEYFCQQYHTYPLTFGGGTKLEIKRLEGQPKANPTVTLFPPSSEELQANKATLVCLISDFYPGAVTVAWKADGSPVKAGVETTKPSKQSNNKYAASSYLSLTPEQWKSHRSYSCQVTHEGSTVEKTVAPTECSGRADCGFTSESYQQGVLSATILYEILLGKATLYAVLVSALVLMAMVKRKDSRGRAKRSGSGVKQTLNFDLLKLAGDVESNPGPTSMDWIWRILFLVGAATGAHSFERMAQVQLQQSGAELARPGASVKMSCKASGYTFTTYTIHWVRRRPGHDLEWIGYINPSSGCSDYNQNFKGKTTLTADKSSNTAYMQLNSLTSEDSAVYYCARRADYGNYEYTWFAYWGQGTTVTVSSTRASTKGPSVFPLAPSSKSTSGGTAALGCLVKDYFPEPVTVSWNSGALTSGVHTFPAVLQSSGLYSLSSVVTVPSSSLGTQTYICNVNHKPSNTKVDKRVEPKSCIPEDTFFPSPESSCDVKLVEKSFETDTNLNFQNLSVIGFRILLLKVAGFNLLMTLRLWSS

SEQ ID NO: 19816 - protein, 904 aa, Artificial Sequence
  Synthetic Polypeptide
MALPVTALLLPLALLLHAARPEVQLVESGGGLVQPGGSLRLSCAASGFSFSDFWMSWVRQAPGKGLEWVATISQAGSEKDYVDSVKGRFTISRDNAKKSLYLQMNSLRAEDTAVYYCASGVYSFDYRGQGTLVTVSSGTGGGGSGGGGSGGGGSEFSVIELTQSPKFMSTSVGDRVNVTYKASQNVGTNVAWFQQKPGQSPKVLIYSASYRYSGVPDRFTGSGSGTDFTLTISNVQSEDLAEYFCQQYHTYPLTFGGGTKLEIKRLEIQNPDPAVYQLRDSKSSDKSVCLFTDFDSQTNVSQSKDSDVYITDKCVLDMRSMDFKSNSAVAWSNKSDFACANAFNNSIIPEDTFFPSPESSCDVKLVEKSFETDTNLNFQNLSVIGFRILLLKVAGFNLLMTLRLWSSRAKRSGSGVKQTLNFDLLKLAGDVESNPGPTSMDWIWRILFLVGAATGAHSGPQLQLQESGPGLVKPSETLSLTCTVSGDSISSGDYYWGWIRQPPGKGLEWIGHIYYSGVTYYNPSLKSRVTISVDTSRNQFSLKLSSVTAADTAVYYCTREDSSNWRSRGQGTLVTVSSGSGGGGSGGGGSGGGGSFERMAQVQLQQSGAELARPGASVKMSCKASGYTFTTYTIHWVRRRPGHDLEWIGYINPSSGCSDYNQNFKGKTTLTADKSSNTAYMQLNSLTSEDSAVYYCARRADYGNYEYTWFAYWGQGTTVTVSSTREDLKNVFPPEVAVFEPSEAEISHTQKATLVCLATGFYPDHVELSWWVNGKEVHSGVCTDPQPLKEQPALNDSRYCLSSRLRVSATFWQNPRNHFRCQVQFYGLSENDEWTQDRAKPVTQIVSAEAWGRADCGFTSESYQQGVLSATILYEILLGKATLYAVLVSALVLMAMVKRKDSRG

SEQ ID NO: 19817 - protein, 1096 aa, Artificial Sequence
  Synthetic Polypeptide
MALPVTALLLPLALLLHAARPEVQLVESGGGLVQPGGSLRLSCAASGFSFSDFWMSWVRQAPGKGLEWVATISQAGSEKDYVDSVKGRFTISRDNAKKSLYLQMNSLRAEDTAVYYCASGVYSFDYRGQGTLVTVSSGTGGGGSGGGGSGGGGSEFSVIELTQSPKFMSTSVGDRVNVTYKASQNVGTNVAWFQQKPGQSPKVLIYSASYRYSGVPDRFTGSGSGTDFTLTISNVQSEDLAEYFCQQYHTYPLTFGGGTKLEIKRLEDLKNVFPPEVAVFEPSEAEISHTQKATLVCLATGFYPDHVELSWWVNGKEVHSGVSTDPQPLKEQPALNDSRYCLSSRLRVSATFWQNPRNHFRCQVQFYGLSENDEWTQDRAKPVTQIVSAEAWGRADCGSQSFGLLDPKLCYLLDGILFIYGVILTALFLRVKFSRSADAPAYQQGQNQLYNELNLGRREEYDVLDKRRGRDPEMGGKPQRRKNPQEGLYNELQKDKMAEAYSEIGMKGERRRGKGHDGLYQGLSTATKDTYDALHMQALPPRRAKRSGSGATNFSLLKQAGDVEENPGPTSMDWIWRILFLVGAATGAHSGPQLQLQESGPGLVKPSETLSLTCTVSGDSISSGDYYWGWIRQPPGKGLEWIGHIYYSGVTYYNPSLKSRVTISVDTSRNQFSLKLSSVTAADTAVYYCTREDSSNWRSRGQGTLVTVSSGSGGGGSGGGGSGGGGSFERMAQVQLQQSGAELARPGASVKMSCKASGYTFTTYTIHWVRRRPGHDLEWIGYINPSSGCSDYNQNFKGKTTLTADKSSNTAYMQLNSLTSEDSAVYYCARRADYGNYEYTWFAYWGQGTTVTVSSTRIQNPDPAVYQLRDSKSSDKSVCLFTDFDSQTNVSQSKDSDVYITDKTVLDMRSMDFKSNSAVAWSNKSDFACANAFNNSIIPEDTFFPSPESSCGTQSFGLLDPKLCYLLDGILFIYGVILTALFLRVKFSRSADAPAYQQGQNQLYNELNLGRREEYDVLDKRRGRDPEMGGKPQRRKNPQEGLYNELQKDKMAEAYSEIGMKGERRRGKGHDGLYQGLSTATKDTYDALHMQALPPR

SEQ ID NO: 19818 - protein, 926 aa, Artificial Sequence
  Synthetic Polypeptide
MALPVTALLLPLALLLHAARPEVQLVESGGGLVQPGGSLRLSCAASGFSFSDFWMSWVRQAPGKGLEWVATISQAGSEKDYVDSVKGRFTISRDNAKKSLYLQMNSLRAEDTAVYYCASGVYSFDYRGQGTLVTVSSGTGGGGSGGGGSGGGGSEFSVIELTQSPKFMSTSVGDRVNVTYKASQNVGTNVAWFQQKPGQSPKVLIYSASYRYSGVPDRFTGSGSGTDFTLTISNVQSEDLAEYFCQQYHTYPLTFGGGTKLEIKRLEGQPKANPTVTLFPPSSEELQANKATLVCLISDFYPGAVTVAWKADGSPVKAGVETTKPSKQSNNKYAASSYLSLTPEQWKSHRSYSCQVTHEGSTVEKTVAPTECSPIKTDVITMDPKDNCSKDANDTLLLQLTNTSAYYMYLLLLLKSVVYFAIITCCLLRRTAFCCNGEKSRAKRSGSGATNFSLLKQAGDVEENPGPTSMDWIWRILFLVGAATGAHSGPQLQLQESGPGLVKPSETLSLTCTVSGDSISSGDYYWGWIRQPPGKGLEWIGHIYYSGVTYYNPSLKSRVTISVDTSRNQFSLKLSSVTAADTAVYYCTREDSSNWRSRGQGTLVTVSSGSGGGGSGGGGSGGGGSFERMAQVQLQQSGAELARPGASVKMSCKASGYTFTTYTIHWVRRRPGHDLEWIGYINPSSGCSDYNQNFKGKTTLTADKSSNTAYMQLNSLTSEDSAVYYCARRADYGNYEYTWFAYWGQGTTVTVSSTRASTKGPSVFPLAPSSKSTSGGTAALGCLVKDYFPEPVTVSWNSGALTSGVHTFPAVLQSSGLYSLSSVVTVPSSSLGTQTYICNVNHKPSNTKVDKRVEPKSCEVKTDSTDHVKPKETENTKQPSKSCHKPKAIVHTEKVNMMSLTVLGLRMLFAKTVAVNFLLTAKLFFL

SEQ ID NO: 19819 - protein, 907 aa, Artificial Sequence
  Synthetic Polypeptide
MALPVTALLLPLALLLHAARPEVQLVESGGGLVQPGGSLRLSCAASGFSFSDFWMSWVRQAPGKGLEWVATISQAGSEKDYVDSVKGRFTISRDNAKKSLYLQMNSLRAEDTAVYYCASGVYSFDYRGQGTLVTVSSGTGGGGSGGGGSGGGGSEFSVIELTQSPKFMSTSVGDRVNVTYKASQNVGTNVAWFQQKPGQSPKVLIYSASYRYSGVPDRFTGSGSGTDFTLTISNVQSEDLAEYFCQQYHTYPLTFGGGTKLEIKRLEGQPKANPTVTLFPPSSEELQANKATLVCLISDFYPGAVTVAWKADGSPVKAGVETTKPSKQSNNKYAASSYLSLTPEQWKSHRSYSCQVTHEGSTVEKTVAPTECSGRADCGFTSESYQQGVLSATILYEILLGKATLYAVLVSALVLMAMVKRKDSRGRAKRSGSGVKQTLNFDLLKLAGDVESNPGPTSMDWIWRILFLVGAATGAHSGPQLQLQESGPGLVKPSETLSLTCTVSGDSISSGDYYWGWIRQPPGKGLEWIGHIYYSGVTYYNPSLKSRVTISVDTSRNQFSLKLSSVTAADTAVYYCTREDSSNWRSRGQGTLVTVSSGSGGGGSGGGGSGGGGSFERMAQVQLQQSGAELARPGASVKMSCKASGYTFTTYTIHWVRRRPGHDLEWIGYINPSSGCSDYNQNFKGKTTLTADKSSNTAYMQLNSLTSEDSAVYYCARRADYGNYEYTWFAYWGQGTTVTVSSTRASTKGPSVFPLAPSSKSTSGGTAALGCLVKDYFPEPVTVSWNSGALTSGVHTFPAVLQSSGLYSLSSVVTVPSSSLGTQTYICNVNHKPSNTKVDKRVEPKSCIPEDTFFPSPESSCDVKLVEKSFETDTNLNFQNLSVIGFRILLLKVAGFNLLMTLRLWSS

SEQ ID NO: 19820 - protein, 764 aa, Artificial Sequence
  Synthetic Polypeptide
MALPVTALLLPLALLLHAARPEVQVLESGGGLVQPGGSLRLSCAASGFTFSNFAMSWVRQAPGKGLEWVSTISGSAGTTDYADSVKGRFTISRDNSKKTLYLQMNSLRVEDTAVYYCADGRGPFFDYRGQGTLVTVSSGTGGGGSGGGGSGGGGSEFSVIELTQSPKFMSTSVGDRVNVTYKASQNVGTNVAWFQQKPGQSPKVLIYSASYRYSGVPDRFTGSGSGTDFTLTISNVQSEDLAEYFCQQYHTYPLTFGGGTKLEIKRLEDLKNVFPPEVAVFEPSEAEISHTQKATLVCLATGFYPDHVELSWWVNGKEVHSGVCTDPQPLKEQPALNDSRYCLSSRLRVSATFWQNPRNHFRCQVQFYGLSENDEWTQDRAKPVTQIVSAEAWGRADCGFTSESYQQGVLSATILYEILLGKATLYAVLVSALVLMAMVKRKDSRGRAKRSGSGATNFSLLKQAGDVEENPGPTSMDWIWRILFLVGAATGAHSFERMAQVQLQQSGAELARPGASVKMSCKASGYTFTTYTIHWVRRRPGHDLEWIGYINPSSGCSDYNQNFKGKTTLTADKSSNTAYMQLNSLTSEDSAVYYCARRADYGNYEYTWFAYWGQGTTVTVSSTRIQNPDPAVYQLRDSKSSDKSVCLFTDFDSQTNVSQSKDSDVYITDKCVLDMRSMDFKSNSAVAWSNKSDFACANAFNNSIIPEDTFFPSPESSCDVKLVEKSFETDTNLNFQNLSVIGFRILLLKVAGFNLLMTLRLWSS

SEQ ID NO: 19821 - protein, 765 aa, Artificial Sequence
  Synthetic Polypeptide
MALPVTALLLPLALLLHAARPSVIELTQSPKFMSTSVGDRVNVTYKASQNVGTNVAWFQQKPGQSPKVLIYSASYRYSGVPDRFTGSGSGTDFTLTISNVQSEDLAEYFCQQYHTYPLTFGGGTKLEIKRLEDLKNVFPPEVAVFEPSEAEISHTQKATLVCLATGFYPDHVELSWWVNGKEVHSGVCTDPQPLKEQPALNDSRYCLSSRLRVSATFWQNPRNHFRCQVQFYGLSENDEWTQDRAKPVTQIVSAEAWGRADCGFTSESYQQGVLSATILYEILLGKATLYAVLVSALVLMAMVKRKDSRGRAKRSGSGATNFSLLKQAGDVEENPGPTSMDWIWRILFLVGAATGAHSGPEVQLVESGGGLVQAGGSLRLSCAASGRTFSMGWFRQAPGKEREFVAAITYSGGSPYYADSVKGRFTISRDNAKNTVYLQMNSLKPEDTAVYYCAANPTYGSDWNAENWGQGTQVTVSSGSGGGGSGGGGSGGGGSFERMAQVQLQQSGAELARPGASVKMSCKASGYTFTTYTIHWVRRRPGHDLEWIGYINPSSGCSDYNQNFKGKTTLTADKSSNTAYMQLNSLTSEDSAVYYCARRADYGNYEYTWFAYWGQGTTVTVSSTRIQNPDPAVYQLRDSKSSDKSVCLFTDFDSQTNVSQSKDSDVYITDKCVLDMRSMDFKSNSAVAWSNKSDFACANAFNNSIIPEDTFFPSPESSCDVKLVEKSFETDTNLNFQNLSVIGFRILLLKVAGFNLLMTLRLWSS

SEQ ID NO: 19822 - protein, 892 aa, Artificial Sequence
  Synthetic Polypeptide
MALPVTALLLPLALLLHAARPSVIELTQSPKFMSTSVGDRVNVTYKASQNVGTNVAWFQQKPGQSPKVLIYSASYRYSGVPDRFTGSGSGTDFTLTISNVQSEDLAEYFCQQYHTYPLTFGGGTKLEIKRLEDLKNVFPPEVAVFEPSEAEISHTQKATLVCLATGFYPDHVELSWWVNGKEVHSGVCTDPQPLKEQPALNDSRYCLSSRLRVSATFWQNPRNHFRCQVQFYGLSENDEWTQDRAKPVTQIVSAEAWGRADCGFTSESYQQGVLSATILYEILLGKATLYAVLVSALVLMAMVKRKDSRGRAKRSGSGATNFSLLKQAGDVEENPGPTSMDWIWRILFLVGAATGAHSQLQLQESGPGLVKPSETLSLTCTVSGGSISSGDYYWGWIRQPPGKGLEWIGSISYSGSTYYNPSLKSRVTISVDTSRNQFSLKLSSVTAADTAVYYCTREDSSNWRSRGQGTLVTVSSSGGGGSGGGGSEVQLVESGGGLVQAGGSLRLSCAASGRTFSMGWFRQAPGKEREFVAAITYSGGSPYYADSVKGRFTISRDNAKNTVYLQMNSLKPEDTAVYYCAANPTYGSDWNAENWGQGTQVTVSSGSGGGGSGGGGSGGGGSFERMAQVQLQQSGAELARPGASVKMSCKASGYTFTTYTIHWVRRRPGHDLEWIGYINPSSGCSDYNQNFKGKTTLTADKSSNTAYMQLNSLTSEDSAVYYCARRADYGNYEYTWFAYWGQGTTVTVSSTRIQNPDPAVYQLRDSKSSDKSVCLFTDFDSQTNVSQSKDSDVYITDKCVLDMRSMDFKSNSAVAWSNKSDFACANAFNNSIIPEDTFFPSPESSCDVKLVEKSFETDTNLNFQNLSVIGFRILLLKVAGFNLLMTLRLWSS

SEQ ID NO: 19823 - protein, 901 aa, Artificial Sequence
  Synthetic Polypeptide
MALPVTALLLPLALLLHAARPEVQVLESGGGLVQPGGSLRLSCAASGFTFSNFAMSWVRQAPGKGLEWVSTISGSAGTTDYADSVKGRFTISRDNSKKTLYLQMNSLRVEDTAVYYCADGRGPFFDYRGQGTLVTVSSGTGGGGSGGGGSGGGGSEFSVIELTQSPKFMSTSVGDRVNVTYKASQNVGTNVAWFQQKPGQSPKVLIYSASYRYSGVPDRFTGSGSGTDFTLTISNVQSEDLAEYFCQQYHTYPLTFGGGTKLEIKRLEDLKNVFPPEVAVFEPSEAEISHTQKATLVCLATGFYPDHVELSWWVNGKEVHSGVCTDPQPLKEQPALNDSRYCLSSRLRVSATFWQNPRNHFRCQVQFYGLSENDEWTQDRAKPVTQIVSAEAWGRADCGFTSESYQQGVLSATILYEILLGKATLYAVLVSALVLMAMVKRKDSRGRAKRSGSGATNFSLLKQAGDVEENPGPTSMDWIWRILFLVGAATGAHSGPEVQLVESGGGLVQAGGSLRLSCAASGRTFSMGWFRQAPGKEREFVAAITYSGGSPYYASSVRGRFTISRDNAKNTVYLQMNSLKPEDTAVYYCAANPTYGSDWNAENWGQGTQVTVSSGSGGGGSGGGGSGGGGSFERMAQVQLQQSGAELARPGASVKMSCKASGYTFTTYTIHWVRRRPGHDLEWIGYINPSSGCSDYNQNFKGKTTLTADKSSNTAYMQLNSLTSEDSAVYYCARRADYGNYEYTWFAYWGQGTTVTVSSTRIQNPDPAVYQLRDSKSSDKSVCLFTDFDSQTNVSQSKDSDVYITDKCVLDMRSMDFKSNSAVAWSNKSDFACANAFNNSIIPEDTFFPSPESSCDVKLVEKSFETDTNLNFQNLSVIGFRILLLKVAGFNLLMTLRLWSS

SEQ ID NO: 19824 - protein, 723 aa, Artificial Sequence
  Synthetic Polypeptide
MALPVTALLLPLALLLHAARPDIQMTQSPSSVSASVGDRVTITCRASQSVSSYLNWYQQKPGKAPKLLIYAASSLQSGVPSRFSGSGSGTDFTLTISSLQPEDFATYYCQQSYSTPWTFGQGTKLEIKRGGGGSGGGGSGGGGSEVQLVESGGGLVQPGRSLRLSCAASGFTFDDYGMHWVRQAPGKGLEWVSGISWNSGSIGYADSAKGRFTISRDNSKNTLYLQMNSLRAEDTAVYYCAKRGNSNSFDYWGQGTLVTVSSTREQKLISEEDLAKPTTTPAPRPPTPAPTIASQPLSLRPEACRPAAGGAVHTRGLDFACDIYIWAPLAGTCGVLLLSLVITLYCKRGRKKLLYIFKQPFMRPVQTTQEEDGCSCRFPEEEEGGCELRVKFSRSADAPAYQQGQNQLYNELNLGRREEYDVLDKRRGRDPEMGGKPRRKNPQEGLYNELQKDKMAEAYSEIGMKGERRRGKGHDGLYQGLSTATKDTYDALHMQALPPRSSGSGEGRGSLLTCGDVEENPGPHMTEYKPTVRLATRDDVPRAVRTLAAAFADYPATRHTVDPDRHIERVTELQELFLTRVGLDIGKVWVADDGAAVAVWTTPESVEAGAVFAEIGPRMAELSGSRLAAQQQMEGLLAPHRPKEPAWFLATVGVSPDHQGKGLGSAVVLPGVEAAERAGVPAFLETSAPRNLPFYERLGFTVTADVEVPEGPRTWCMTRKPGA

SEQ ID NO: 19825 - protein, 717 aa, Artificial Sequence
  Synthetic Polypeptide
MALPVTALLLPLALLLHAARPDIQMTQSPSSVSASVGDRVTITCRASQSVSSYLNWYQQKPGKAPKLLIYAASSLQSGVPSRFSGSGSGTDFTLTISSLQPEDFATYYCQQSYSTPWTFGQGTKLEIKRGGGGSGGGGSGGGGSEVQLVESGGGLVQPGRSLRLSCAASGFTFDDYGMHWVRQAPGKGLEWVSGISWNSGSIGYADSAKGRFTISRDNSKNTLYLQMNSLRAEDTAVYYCAKRGNSNSFDYWGQGTLVTVSSTREQKLISEEDLKIEVMYPPPYLDNEKSNGTIIHVKGKHLCPSPLFPGPSKPFWVLVVVGGVLACYSLLVTVAFIIFWVRSKRSRLLHSDYMNMTPRRPGPTRKHYQPYAPPRDFAAYRSRVKFSRSADAPAYQQGQNQLYNELNLGRREEYDVLDKRRGRDPEMGGKPRRKNPQEGLYNELQKDKMAEAYSEIGMKGERRRGKGHDGLYQGLSTATKDTYDALHMQALPPRSSGSGEGRGSLLTCGDVEENPGPHMTEYKPTVRLATRDDVPRAVRTLAAAFADYPATRHTVDPDRHIERVTELQELFLTRVGLDIGKVWVADDGAAVAVWTTPESVEAGAVFAEIGPRMAELSGSRLAAQQQMEGLLAPHRPKEPAWFLATVGVSPDHQGKGLGSAVVLPGVEAAERAGVPAFLETSAPRNLPFYERLGFTVTADVEVPEGPRTWCMTRKPGA

SEQ ID NO: 19826 - protein, 494 aa, Artificial Sequence
  Synthetic Polypeptide
MALPVTALLLPLALLLHAARPDIQMTQSPSSVSASVGDRVTITCRASQSVSSYLNWYQQKPGKAPKLLIYAASSLQSGVPSRFSGSGSGTDFTLTISSLQPEDFATYYCQQSYSTPWTFGQGTKLEIKRGGGGSGGGGSGGGGSEVQLVESGGGLVQPGRSLRLSCAASGFTFDDYGMHWVRQAPGKGLEWVSGISWNSGSIGYADSAKGRFTISRDNSKNTLYLQMNSLRAEDTAVYYCAKRGNSNSFDYWGQGTLVTVSSTREQKLISEEDLKIEVMYPPPYLDNEKSNGTIIHVKGKHLCPSPLFPGPSKPFWVLVVVGGVLACYSLLVTVAFIIFWVRSKRSRLLHSDYMNMTPRRPGPTRKHYQPYAPPRDFAAYRSRVKFSRSADAPAYQQGQNQLYNELNLGRREEYDVLDKRRGRDPEMGGKPRRKNPQEGLYNELQKDKMAEAYSEIGMKGERRRGKGHDGLYQGLSTATKDTYDALHMQALPPR

SEQ ID NO: 19827 - protein, 500 aa, Artificial Sequence
  Synthetic Polypeptide
MALPVTALLLPLALLLHAARPDIQMTQSPSSVSASVGDRVTITCRASQSVSSYLNWYQQKPGKAPKLLIYAASSLQSGVPSRFSGSGSGTDFTLTISSLQPEDFATYYCQQSYSTPWTFGQGTKLEIKRGGGGSGGGGSGGGGSEVQLVESGGGLVQPGRSLRLSCAASGFTFDDYGMHWVRQAPGKGLEWVSGISWNSGSIGYADSAKGRFTISRDNSKNTLYLQMNSLRAEDTAVYYCAKRGNSNSFDYWGQGTLVTVSSTREQKLISEEDLAKPTTTPAPRPPTPAPTIASQPLSLRPEACRPAAGGAVHTRGLDFACDIYIWAPLAGTCGVLLLSLVITLYCKRGRKKLLYIFKQPFMRPVQTTQEEDGCSCRFPEEEEGGCELRVKFSRSADAPAYQQGQNQLYNELNLGRREEYDVLDKRRGRDPEMGGKPRRKNPQEGLYNELQKDKMAEAYSEIGMKGERRRGKGHDGLYQGLSTATKDTYDALHMQALPPR

SEQ ID NO: 19828 - protein, 500 aa, Artificial Sequence
  Synthetic Polypeptide
MALPVTALLLPLALLLHAARPEVQLVESGGGLVQPGRSLRLSCAASGFTFDDYGMHWVRQAPGKGLEWVSGISWNSGSIGYADSAKGRFTISRDNSKNTLYLQMNSLRAEDTAVYYCAKRGNSNSFDYWGQGTLVTVSSGGGGSGGGGSGGGGSDIQMTQSPSSVSASVGDRVTITCRASQSVSSYLNWYQQKPGKAPKLLIYAASSLQSGVPSRFSGSGSGTDFTLTISSLQPEDFATYYCQQSYSTPWTFGQGTKLEIKRTREQKLISEEDLAKPTTTPAPRPPTPAPTIASQPLSLRPEACRPAAGGAVHTRGLDFACDIYIWAPLAGTCGVLLLSLVITLYCKRGRKKLLYIFKQPFMRPVQTTQEEDGCSCRFPEEEEGGCELRVKFSRSADAPAYQQGQNQLYNELNLGRREEYDVLDKRRGRDPEMGGKPRRKNPQEGLYNELQKDKMAEAYSEIGMKGERRRGKGHDGLYQGLSTATKDTYDALHMQALPPR

SEQ ID NO: 19829 - protein, 913 aa, Artificial Sequence
  Synthetic Polypeptide
MALPVTALLLPLALLLHAARPDIQMTQSPSSVSASVGDRVTITCRASQSVSSYLNWYQQKPGKAPKLLIYAASSLQSGVPSRFSGSGSGTDFTLTISSLQPEDFATYYCQQSYSTPWTFGQGTKLEIKRGGGGSGGGGSGGGGSEVQLVESGGGLVQPGRSLRLSCAASGFTFDDYGMHWVRQAPGKGLEWVSGISWNSGSIGYADSAKGRFTISRDNSKNTLYLQMNSLRAEDTAVYYCAKRGNSNSFDYWGQGTLVTVSSTREQKLISEEDLAKPTTTPAPRPPTPAPTIASQPLSLRPEACRPAAGGAVHTRGLDFACDIYIWAPLAGTCGVLLLSLVITLYCGRARVKFSRSADAPAYQQGQNQLYNELNLGRREEYDVLDKRRGRDPEMGGKPRRKNPQEGLYNELQKDKMAEAYSEIGMKGERRRGKGHDGLYQGLSTATKDTYDALHMQALPPRSRGSGATNFSLLKQAGDVEENPGPGIHMATYEVLCEVARKLGTDDREVVLFLLNVFIPQPTLAQLIGALRALKEEGRLTFPLLAECLFRAGRRDLLRDLLHLDPRFLERHLAGTMSYFSPYQLTVLHVDGELCARDIRSLIFLSKDTIGSRSTPQTFLHWVYCMENLDLLGPTDVDALMSMLRSLSRVDLQRQVQTLMGLHLSGPSHSQHYRHTPLETDFYDYKDDDDKTSGSGEGRGSLLTCGDVEENPGPHMTEYKPTVRLATRDDVPRAVRTLAAAFADYPATRHTVDPDRHIERVTELQELFLTRVGLDIGKVWVADDGAAVAVWTTPESVEAGAVFAEIGPRMAELSGSRLAAQQQMEGLLAPHRPKEPAWFLATVGVSPDHQGKGLGSAVVLPGVEAAERAGVPAFLETSAPRNLPFYERLGFTVTADVEVPEGPRTWCMTRKPGA

SEQ ID NO: 19830 - protein, 853 aa, Artificial Sequence
  Synthetic Polypeptide
MALPVTALLLPLALLLHAARPDIQMTQSPSSVSASVGDRVTITCRASQSVSSYLNWYQQKPGKAPKLLIYAASSLQSGVPSRFSGSGSGTDFTLTISSLQPEDFATYYCQQSYSTPWTFGQGTKLEIKRLEIQNPDPAVYQLRDSKSSDKSVCLFTDFDSQTNVSQSKDSDVYITDKCVLDMRSMDFKSNSAVAWSNKSDFACANAFNNSIIPEDTFFPSSDVPCDVKLVEKSFETDTNLNFQNLSVIGFRILLLKVAGFNLLMTLRLWSSRAKRSGSGVKQTLNFDLLKLAGDVESNPGPTSMDWIWRILFLVGAATGAHSFEEVQLVESGGGLVQPGRSLRLSCAASGFTFDDYGMHWVRQAPGKGLEWVSGISWNSGSIGYADSAKGRFTISRDNSKNTLYLQMNSLRAEDTAVYYCAKRGNSNSFDYWGQGTLVTVSSTREDLKNVFPPEVAVFEPSKAEIAHTQKATLVCLATGFYPDHVELSWWVNGKEVHSGVCTDPQPLKEQPALNDSRYCLSSRLRVSATFWQNPRNHFRCQVQFYGLSENDEWTQDRAKPVTQIVSAEAWGRADCGITSASYHQGVLSATILYEILLGKATLYAVLVSALVLMAMVKRKDSRGRAKRSGSGATNFSLLKQAGDVEENPGPSRGHMTEYKPTVRLATRDDVPRAVRTLAAAFADYPATRHTVDPDRHIERVTELQELFLTRVGLDIGKVWVADDGAAVAVWTTPESVEAGAVFAEIGPRMAELSGSRLAAQQQMEGLLAPHRPKEPAWFLATVGVSPDHQGKGLGSAVVLPGVEAAERAGVPAFLETSAPRNLPFYERLGFTVTADVEVPEGPRTWCMTRKPGA

SEQ ID NO: 19831 - protein, 852 aa, Artificial Sequence
  Synthetic Polypeptide
MALPVTALLLPLALLLHAARPDIQMTQSPSSVSASVGDRVTITCRASQSVSSYLNWYQQKPGKAPKLLIYAASSLQSGVPSRFSGSGSGTDFTLTISSLQPEDFATYYCQQSYSTPWTFGQGTKLEIKRLEDLKNVFPPEVAVFEPSKAEIAHTQKATLVCLATGFYPDHVELSWWVNGKEVHSGVCTDPQPLKEQPALNDSRYCLSSRLRVSATFWQNPRNHFRCQVQFYGLSENDEWTQDRAKPVTQIVSAEAWGRADCGITSASYHQGVLSATILYEILLGKATLYAVLVSALVLMAMVKRKDSRGRAKRSGSGATNFSLLKQAGDVEENPGPTSMDWIWRILFLVGAATGAHSFEEVQLVESGGGLVQPGRSLRLSCAASGFTFDDYGMHWVRQAPGKGLEWVSGISWNSGSIGYADSAKGRFTISRDNSKNTLYLQMNSLRAEDTAVYYCAKRGNSNSFDYWGQGTLVTVSSTRIQNPDPAVYQLRDSKSSDKSVCLFTDFDSQTNVSQSKDSDVYITDKCVLDMRSMDFKSNSAVAWSNKSDFACANAFNNSIIPEDTFFPSSDVPCDVKLVEKSFETDTNLNFQNLSVIGFRILLLKVAGFNLLMTLRLWSSRAKRSGSGVKQTLNFDLLKLAGDVESNPGPSRGHMTEYKPTVRLATRDDVPRAVRTLAAAFADYPATRHTVDPDRHIERVTELQELFLTRVGLDIGKVWVADDGAAVAVWTTPESVEAGAVFAEIGPRMAELSGSRLAAQQQMEGLLAPHRPKEPAWFLATVGVSPDHQGKGLGSAVVLPGVEAAERAGVPAFLETSAPRNLPFYERLGFTVTADVEVPEGPRTWCMTRKPGA

SEQ ID NO: 19832 - protein, 619 aa, Artificial Sequence
  Synthetic Polypeptide
MALPVTALLLPLALLLHAARPDIQMTQSPSSVSASVGDRVTITCRASQSVSSYLNWYQQKPGKAPKLLIYAASSLQSGVPSRFSGSGSGTDFTLTISSLQPEDFATYYCQQSYSTPWTFGQGTKLEIKRLEDLKNVFPPEVAVFEPSEAEISHTQKATLVCLATGFYPDHVELSWWVNGKEVHSGVCTDPQPLKEQPALNDSRYCLSSRLRVSATFWQNPRNHFRCQVQFYGLSENDEWTQDRAKPVTQIVSAEAWGRADCGFTSESYQQGVLSATILYEILLGKATLYAVLVSALVLMAMVKRKDSRGRAKRSGSGATNFSLLKQAGDVEENPGPTSMDWIWRILFLVGAATGAHSFEEVQLVESGGGLVQPGRSLRLSCAASGFTFDDYGMHWVRQAPGKGLEWVSGISWNSGSIGYADSAKGRFTISRDNSKNTLYLQMNSLRAEDTAVYYCAKRGNSNSFDYWGQGTLVTVSSTRIQNPDPAVYQLRDSKSSDKSVCLFTDFDSQTNVSQSKDSDVYITDKCVLDMRSMDFKSNSAVAWSNKSDFACANAFNNSIIPEDTFFPSPESSCDVKLVEKSFETDTNLNFQNLSVIGFRILLLKVAGFNLLMTLRLWSS

SEQ ID NO: 19833 - protein, 844 aa, Artificial Sequence
  Synthetic Polypeptide
MALPVTALLLPLALLLHAARPDIQMTQSPSSVSASVGDRVTITCRASQSVSSYLNWYQQKPGKAPKLLIYAASSLQSGVPSRFSGSGSGTDFTLTISSLQPEDFATYYCQQSYSTPWTFGQGTKLEIKRLEDLKNVFPPEVAVFEPSEAEISHTQKATLVCLATGFYPDHVELSWWVNGKEVHSGVCTDPQPLKEQPALNDSRYCLSSRLRVSATFWQNPRNHFRCQVQFYGLSENDEWTQDRAKPVTQIVSAEAWGRADCGFTSESYQQGVLSATILYEILLGKATLYAVLVSALVLMAMVKRKDSRGRAKRSGSGATNFSLLKQAGDVEENPGPTSMDWIWRILFLVGAATGAHSFEEVQLVESGGGLVQPGRSLRLSCAASGFTFDDYGMHWVRQAPGKGLEWVSGISWNSGSIGYADSAKGRFTISRDNSKNTLYLQMNSLRAEDTAVYYCAKRGNSNSFDYWGQGTLVTVSSTRIQNPDPAVYQLRDSKSSDKSVCLFTDFDSQTNVSQSKDSDVYITDKCVLDMRSMDFKSNSAVAWSNKSDFACANAFNNSIIPEDTFFPSPESSCDVKLVEKSFETDTNLNFQNLSVIGFRILLLKVAGFNLLMTLRLWSSRAKRSGSGVKQTLNFDLLKLAGDVESNPGPSRGGIHTMATYEVLCEVARKLGTDDREVVLFLLNVFIPQPTLAQLIGALRALKEEGRLTFPLLAECLFRAGRRDLLRDLLHLDPRFLERHLAGTMSYFSPYQLTVLHVDGELCARDIRSLIFLSKDTIGSRSTPQTFLHWVYCMENLDLLGPTDVDALMSMLRSLSRVDLQRQVQTLMGLHLSGPSHSQHYRHTP

SEQ ID NO: 19834 - protein, 623 aa, Artificial Sequence
  Synthetic Polypeptide
MALPVTALLLPLALLLHAARPDIQMTQSPSSVSASVGDRVTITCRASQSVSSYLNWYQQKPGKAPKLLIYAASSLQSGVPSRFSGSGSGTDFTLTISSLQPEDFATYYCQQSYSTPWTFGQGTKLEIKRLEIQNPDPAVYQLRDSKSSDKSVCLFTDFDSQTNVSQSKDSDVYITDKCVLDMRSMDFKSNSAVAWSNKSDFACANAFNNSIIPEDTFFPSPESSCDVKLVEKSFETDTNLNFQNLSVIGFRILLLKVAGFNLLMTLRLWSSRAKRSGSGVKQTLNFDLLKLAGDVESNPGPTSMDWIWRILFLVGAATGAHSFEEVQLVESGGGLVQPGRSLRLSCAASGFTFDDYGMHWVRQAPGKGLEWVSGISWNSGSIGYADSAKGRFTISRDNSKNTLYLQMNSLRAEDTAVYYCAKRGNSNSFDYWGQGTLVTVSSTREDLKNVFPPEVAVFEPSEAEISHTQKATLVCLATGFYPDHVELSWWVNGKEVHSGVCTDPQPLKEQPALNDSRYCLSSRLRVSATFWQNPRNHFRCQVQFYGLSENDEWTQDRAKPVTQIVSAEAWGRADCGFTSESYQQGVLSATILYEILLGKATLYAVLVSALVLMAMVKRKDSRG

SEQ ID NO: 19835 - protein, 845 aa, Artificial Sequence
  Synthetic Polypeptide
MALPVTALLLPLALLLHAARPDIQMTQSPSSVSASVGDRVTITCRASQSVSSYLNWYQQKPGKAPKLLIYAASSLQSGVPSRFSGSGSGTDFTLTISSLQPEDFATYYCQQSYSTPWTFGQGTKLEIKRLEIQNPDPAVYQLRDSKSSDKSVCLFTDFDSQTNVSQSKDSDVYITDKCVLDMRSMDFKSNSAVAWSNKSDFACANAFNNSIIPEDTFFPSPESSCDVKLVEKSFETDTNLNFQNLSVIGFRILLLKVAGFNLLMTLRLWSSRAKRSGSGVKQTLNFDLLKLAGDVESNPGPTSMDWIWRILFLVGAATGAHSFEEVQLVESGGGLVQPGRSLRLSCAASGFTFDDYGMHWVRQAPGKGLEWVSGISWNSGSIGYADSAKGRFTISRDNSKNTLYLQMNSLRAEDTAVYYCAKRGNSNSFDYWGQGTLVTVSSTREDLKNVFPPEVAVFEPSEAEISHTQKATLVCLATGFYPDHVELSWWVNGKEVHSGVCTDPQPLKEQPALNDSRYCLSSRLRVSATFWQNPRNHFRCQVQFYGLSENDEWTQDRAKPVTQIVSAEAWGRADCGFTSESYQQGVLSATILYEILLGKATLYAVLVSALVLMAMVKRKDSRGRAKRSGSGATNFSLLKQAGDVEENPGPSRGGIHTMATYEVLCEVARKLGTDDREVVLFLLNVFIPQPTLAQLIGALRALKEEGRLTFPLLAECLFRAGRRDLLRDLLHLDPRFLERHLAGTMSYFSPYQLTVLHVDGELCARDIRSLIFLSKDTIGSRSTPQTFLHWVYCMENLDLLGPTDVDALMSMLRSLSRVDLQRQVQTLMGLHLSGPSHSQHYRHTP

SEQ ID NO: 19836 - protein, 897 aa, Artificial Sequence
  Synthetic Polypeptide
MALPVTALLLPLALLLHAARPLEGKPIPNPLLGLDSTGSGEDLKNVFPPEVAVFEPSKAEIAHTQKATLVCLATGFYPDHVELSWWVNGKEVHSGVCTDPQPLKEQPALNDSRYCLSSRLRVSATFWQNPRNHFRCQVQFYGLSENDEWTQDRAKPVTQIVSAEAWGRADCGITSASYHQGVLSATILYEILLGKATLYAVLVSALVLMAMVKRKDSRGRAKRSGSGATNFSLLKQAGDVEENPGPTSMALPVTALLLPLALLLHAARPDIQMTQSPSSVSASVGDRVTITCRASQSVSSYLNWYQQKPGKAPKLLIYAASSLQSGVPSRFSGSGSGTDFTLTISSLQPEDFATYYCQQSYSTPWTFGQGTKLEIKRGGGGSGGGGSGGGGSEVQLVESGGGLVQPGRSLRLSCAASGFTFDDYGMHWVRQAPGKGLEWVSGISWNSGSIGYADSAKGRFTISRDNSKNTLYLQMNSLRAEDTAVYYCAKRGNSNSFDYWGQGTLVTVSSTREQKLISEEDGSGIQNPDPAVYQLRDSKSSDKSVCLFTDFDSQTNVSQSKDSDVYITDKCVLDMRSMDFKSNSAVAWSNKSDFACANAFNNSIIPEDTFFPSSDVPCDVKLVEKSFETDTNLNFQNLSVIGFRILLLKVAGFNLLMTLRLWSSRAKRSGSGVKQTLNFDLLKLAGDVESNPGPSRGHMTEYKPTVRLATRDDVPRAVRTLAAAFADYPATRHTVDPDRHIERVTELQELFLTRVGLDIGKVWVADDGAAVAVWTTPESVEAGAVFAEIGPRMAELSGSRLAAQQQMEGLLAPHRPKEPAWFLATVGVSPDHQGKGLGSAVVLPGVEAAERAGVPAFLETSAPRNLPFYERLGFTVTADVEVPEGPRTWCMTRKPGA

SEQ ID NO: 19837 - protein, 898 aa, Artificial Sequence
  Synthetic Polypeptide
MALPVTALLLPLALLLHAARPLEQKLISEEDLGSGDRPDPAVYQLRDSKSSDKSVCLFTDFDSQTNVSQSKDSDVYITDKCVLDMRSMDFKSNSAVAWSNKSDFACANAFNNSIIPEDTFFPSPESSCDVKLVEKSFETDTNLNFQNLSVIGFRILLLKVAGFNLLMTLRLWSSSSRAKRSGSGVKQTLNFDLLKLAGDVESNPGPTSMALPVTALLLPLALLLHAARPDIQMTQSPSSVSASVGDRVTITCRASQSVSSYLNWYQQKPGKAPKLLIYAASSLQSGVPSRFSGSGSGTDFTLTISSLQPEDFATYYCQQSYSTPWTFGQGTKLEIKRGGGGSGGGGSGGGGSEVQLVESGGGLVQPGRSLRLSCAASGFTFDDYGMHWVRQAPGKGLEWVSGISWNSGSIGYADSAKGRFTISRDNSKNTLYLQMNSLRAEDTAVYYCAKRGNSNSFDYWGQGTLVTVSSTRGKPIPNPLLGLDSTGSGEDLKNVFPPEVAVFEPSEAEISHTQKATLVCLATGFYPDHVELSWWVNGKEVHSGVCTDPQPLKEQPALNDSRYCLSSRLRVSATFWQNPRNHFRCQVQFYGLSENDEWTQDRAKPVTQIVSAEAWGRADCGFTSESYQQGVLSATILYEILLGKATLYAVLVSALVLMAMVKRKDSRGRAKRSGSGATNFSLLKQAGDVEENPGPSRGHMTEYKPTVRLATRDDVPRAVRTLAAAFADYPATRHTVDPDRHIERVTELQELFLTRVGLDIGKVWVADDGAAVAVWTTPESVEAGAVFAEIGPRMAELSGSRLAAQQQMEGLLAPHRPKEPAWFLATVGVSPDHQGKGLGSAVVLPGVEAAERAGVPAFLETSAPRNLPFYERLGFTVTADVEVPEGPRTWCMTRKPGA

SEQ ID NO: 19838 - protein, 852 aa, Artificial Sequence
  Synthetic Polypeptide
MALPVTALLLPLALLLHAARPDIQMTQSPSSVSASVGDRVTITCRASQSVSSYLNWYQQKPGKAPKLLIYAASSLQSGVPSRFSGSGSGTDFTLTISSLQPEDFATYYCQQSYSTPWTFGQGTKLEIKRLEDLKNVFPPEVAVFEPSEAEISHTQKATLVCLATGFYPDHVELSWWVNGKEVHSGVSTDPQPLKEQPALNDSRYCLSSRLRVSATFWQNPRNHFRCQVQFYGLSENDEWTQDRAKPVTQIVSAEAWGRADCGFTSESYQQGVLSATILYEILLGKATLYAVLVSALVLMAMVKRKDSRGRAKRSGSGATNFSLLKQAGDVEENPGPTSMDWIWRILFLVGAATGAHSFEEVQLVESGGGLVQPGRSLRLSCAASGFTFDDYGMHWVRQAPGKGLEWVSGISWNSGSIGYADSAKGRFTISRDNSKNTLYLQMNSLRAEDTAVYYCAKRGNSNSFDYWGQGTLVTVSSTRIQNPDPAVYQLRDSKSSDKSVCLFTDFDSQTNVSQSKDSDVYITDKTVLDMRSMDFKSNSAVAWSNKSDFACANAFNNSIIPEDTFFPSPESSCDVKLVEKSFETDTNLNFQNLSVIGFRILLLKVAGFNLLMTLRLWSSRAKRSGSGVKQTLNFDLLKLAGDVESNPGPSRGHMTEYKPTVRLATRDDVPRAVRTLAAAFADYPATRHTVDPDRHIERVTELQELFLTRVGLDIGKVWVADDGAAVAVWTTPESVEAGAVFAEIGPRMAELSGSRLAAQQQMEGLLAPHRPKEPAWFLATVGVSPDHQGKGLGSAVVLPGVEAAERAGVPAFLETSAPRNLPFYERLGFTVTADVEVPEGPRTWCMTRKPGA

SEQ ID NO: 19839 - protein, 934 aa, Artificial Sequence
  Synthetic Polypeptide
MALPVTALLLPLALLLHAARPDIQMTQSPSSVSASVGDRVTITCRASQSVSSYLNWYQQKPGKAPKLLIYAASSLQSGVPSRFSGSGSGTDFTLTISSLQPEDFATYYCQQSYSTPWTFGQGTKLEIKRLEDLKNVFPPEVAVFEPSEAEISHTQKATLVCLATGFYPDHVELSWWVNGKEVHSGVSTDPQPLKEQPALNDSRYCLSSRLRVSATFWQNPRNHFRCQVQFYGLSENDEWTQDRAKPVTQIVSAEAWGRADCGFTSESYQQGVLSATILYEILLGKATLYAVLVSALVLMAMVKRKDSRGRAKRSGSGATNFSLLKQAGDVEENPGPTSMDWIWRILFLVGAATGAHSFEEVQLVESGGGLVQPGRSLRLSCAASGFTFDDYGMHWVRQAPGKGLEWVSGISWNSGSIGYADSAKGRFTISRDNSKNTLYLQMNSLRAEDTAVYYCAKRGNSNSFDYWGQGTLVTVSSTREQKLISEEDGSGTPFPSLAPPIMLLVDGKQQMVVVCLVLDVAPPGLDSPIWFSAGNGSALDAFTYGPSPATDGTWTNLAHLSLPSEELASWEPLVCHTGPGAEGHSRSTQPMHLSGEASTARTCPQEPLRGTPGGALWLGVLRLLLFKLLLFDLLLTCSCLCDPAGPLPSPATTTRLRALGSHRLHPATETGGREATSSPRPQPRDRRWGDTPPGRKPGSPVRAKRSGSGVKQTLNFDLLKLAGDVESNPGPSRGHMTEYKPTVRLATRDDVPRAVRTLAAAFADYPATRHTVDPDRHIERVTELQELFLTRVGLDIGKVWVADDGAAVAVWTTPESVEAGAVFAEIGPRMAELSGSRLAAQQQMEGLLAPHRPKEPAWFLATVGVSPDHQGKGLGSAVVLPGVEAAERAGVPAFLETSAPRNLPFYERLGFTVTADVEVPEGPRTWCMTRKPGA

SEQ ID NO: 19840 - protein, 952 aa, Artificial Sequence
  Synthetic Polypeptide
MALPVTALLLPLALLLHAARPLEDLKNVFPPEVAVFEPSEAEISHTQKATLVCLATGFYPDHVELSWWVNGKEVHSGVSTDPQPLKEQPALNDSRYCLSSRLRVSATFWQNPRNHFRCQVQFYGLSENDEWTQDRAKPVTQIVSAEAWGRADCGFTSESYQQGVLSATILYEILLGKATLYAVLVSALVLMAMVKRKDSRGRAKRSGSGATNFSLLKQAGDVEENPGPTSMALPVTALLLPLALLLHAARPDIQMTQSPSSVSASVGDRVTITCRASQSVSSYLNWYQQKPGKAPKLLIYAASSLQSGVPSRFSGSGSGTDFTLTISSLQPEDFATYYCQQSYSTPWTFGQGTKLEIKRGGGGSGGGGSGGGGSEVQLVESGGGLVQPGRSLRLSCAASGFTFDDYGMHWVRQAPGKGLEWVSGISWNSGSIGYADSAKGRFTISRDNSKNTLYLQMNSLRAEDTAVYYCAKRGNSNSFDYWGQGTLVTVSSTREQKLISEEDLGSGTPFPSLAPPIMLLVDGKQQMVVVCLVLDVAPPGLDSPIWFSAGNGSALDAFTYGPSPATDGTWTNLAHLSLPSEELASWEPLVCHTGPGAEGHSRSTQPMHLSGEASTARTCPQEPLRGTPGGALWLGVLRLLLFKLLLFDLLLTCSCLCDPAGPLPSPATTTRLRALGSHRLHPATETGGREATSSPRPQPRDRRWGDTPPGRKPGSPVRAKRSGSGVKQTLNFDLLKLAGDVESNPGPSRSRGHMTEYKPTVRLATRDDVPRAVRTLAAAFADYPATRHTVDPDRHIERVTELQELFLTRVGLDIGKVWVADDGAAVAVWTTPESVEAGAVFAEIGPRMAELSGSRLAAQQQMEGLLAPHRPKEPAWFLATVGVSPDHQGKGLGSAVVLPGVEAAERAGVPAFLETSAPRNLPFYERLGFTVTADVEVPEGPRTWCMTRKPGA

SEQ ID NO: 19841 - protein, 889 aa, Artificial Sequence
  Synthetic Polypeptide
MALPVTALLLPLALLLHAARPDIQMTQSPSSVSASVGDRVTITCRASQSVSSYLNWYQQKPGKAPKLLIYAASSLQSGVPSRFSGSGSGTDFTLTISSLQPEDFATYYCQQSYSTPWTFGQGTKLEIKRLEGKPIPNPLLGLDSTGSGDKQLDADVSPKPTIFLPSIAETKLQKAGTYLCLLEKFFPDVIKIHWQEKKSNTILGSQEGNTMKTNDTYMKFSWLTVPEKSLDKEHRCIVRHENNKNGVDQEIIFPPIKTDVITMDPKDNCSKDANDTLLLQLTNTSAYYMYLLLLLKSVVYFAIITCCLLRRTAFCCNGEKSRAKRSGSGATNFSLLKQAGDVEENPGPTSMDWIWRILFLVGAATGAHSFEEVQLVESGGGLVQPGRSLRLSCAASGFTFDDYGMHWVRQAPGKGLEWVSGISWNSGSIGYADSAKGRFTISRDNSKNTLYLQMNSLRAEDTAVYYCAKRGNSNSFDYWGQGTLVTVSSTREQKLISEEDGSGSQPHTKPSVFVMKNGTNVACLVKEFYPKDIRINLVSSKKITEFDPAIVISPSGKYNAVKLGKYEDSNSVTCSVQHDNKTVHSTDFEVKTDSTDHVKPKETENTKQPSKSCHKPKAIVHTEKVNMMSLTVLGLRMLFAKTVAVNFLLTAKLFFLRAKRSGSGVKQTLNFDLLKLAGDVESNPGPSRGHMTEYKPTVRLATRDDVPRAVRTLAAAFADYPATRHTVDPDRHIERVTELQELFLTRVGLDIGKVWVADDGAAVAVWTTPESVEAGAVFAEIGPRMAELSGSRLAAQQQMEGLLAPHRPKEPAWFLATVGVSPDHQGKGLGSAVVLPGVEAAERAGVPAFLETSAPRNLPFYERLGFTVTADVEVPEGPRTWCMTRKPGA

SEQ ID NO: 19842 - protein, 627 aa, Artificial Sequence
  Synthetic Polypeptide
MALPVTALLLPLALLLHAARPDIQMTQSPSSVSASVGDRVTITCRASQSVSSYLNWYQQKPGKAPKLLIYAASSLQSGVPSRFSGSGSGTDFTLTISSLQPEDFATYYCQQSYSTPWTFGQGTKLEIKRLESQPHTKPSVFVMKNGTNVACLVKEFYPKDIRINLVSSKKITEFDPAIVISPSGKYNAVKLGKYEDSNSVTCSVQHDNKTVHSTDFEVKTDSTDHVKPKETENTKQPSKSCHKPKAIVHTEKVNMMSLTVLGLRMLFAKTVAVNFLLTAKLFFLRAKRSGSGATNFSLLKQAGDVEENPGPTSMDWIWRILFLVGAATGAHSFEEVQLVESGGGLVQPGRSLRLSCAASGFTFDDYGMHWVRQAPGKGLEWVSGISWNSGSIGYADSAKGRFTISRDNSKNTLYLQMNSLRAEDTAVYYCAKRGNSNSFDYWGQGTLVTVSSTRDKQLDADVSPKPTIFLPSIAETKLQKAGTYLCLLEKFFPDVIKIHWQEKKSNTILGSQEGNTMKTNDTYMKFSWLTVPEKSLDKEHRCIVRHENNKNGVDQEIIFPPIKTDVITMDPKDNCSKDANDTLLLQLTNTSAYYMYLLLLLKSVVYFAIITCCLLRRTAFCCNGEKS

SEQ ID NO: 19843 - protein, 904 aa, Artificial Sequence
  Synthetic Polypeptide
MALPVTALLLPLALLLHAARPLEGKPIPNPLLGLDSTGSGDKQLDADVSPKPTIFLPSIAETKLQKAGTYLCLLEKFFPDVIKIHWQEKKSNTILGSQEGNTMKTNDTYMKFSWLTVPEKSLDKEHRCIVRHENNKNGVDQEIIFPPIKTDVITMDPKDNCSKDANDTLLLQLTNTSAYYMYLLLLLKSVVYFAIITCCLLRRTAFCCNGEKSRAKRSGSGATNFSLLKQAGDVEENPGPTSMALPVTALLLPLALLLHAARPDIQMTQSPSSVSASVGDRVTITCRASQSVSSYLNWYQQKPGKAPKLLIYAASSLQSGVPSRFSGSGSGTDFTLTISSLQPEDFATYYCQQSYSTPWTFGQGTKLEIKRGGGGSGGGGSGGGGSEVQLVESGGGLVQPGRSLRLSCAASGFTFDDYGMHWVRQAPGKGLEWVSGISWNSGSIGYADSAKGRFTISRDNSKNTLYLQMNSLRAEDTAVYYCAKRGNSNSFDYWGQGTLVTVSSTREQKLISEEDGSGSQPHTKPSVFVMKNGTNVACLVKEFYPKDIRINLVSSKKITEFDPAIVISPSGKYNAVKLGKYEDSNSVTCSVQHDNKTVHSTDFEVKTDSTDHVKPKETENTKQPSKSCHKPKAIVHTEKVNMMSLTVLGLRMLFAKTVAVNFLLTAKLFFLRAKRSGSGVKQTLNFDLLKLAGDVESNPGPSRGHMTEYKPTVRLATRDDVPRAVRTLAAAFADYPATRHTVDPDRHIERVTELQELFLTRVGLDIGKVWVADDGAAVAVWTTPESVEAGAVFAEIGPRMAELSGSRLAAQQQMEGLLAPHRPKEPAWFLATVGVSPDHQGKGLGSAVVLPGVEAAERAGVPAFLETSAPRNLPFYERLGFTVTADVEVPEGPRTWCMTRKPGA

SEQ ID NO: 19844 - protein, 1029 aa, Artificial Sequence
  Synthetic Polypeptide
MALPVTALLLPLALLLHAARPDIQMTQSPSSVSASVGDRVTITCRASQSVSSYLNWYQQKPGKAPKLLIYAASSLQSGVPSRFSGSGSGTDFTLTISSLQPEDFATYYCQQSYSTPWTFGQGTKLEIKRGQPKANPTVTLFPPSSEELQANKATLVCLISDFYPGAVTVAWKADGSPVKAGVETTKPSKQSNNKYAASSYLSLTPEQWKSHRSYSCQVTHEGSTVEKTVAPTECSGSQSFGLLDPKLCYLLDGILFIYGVILTALFLRVKFSRSADAPAYQQGQNQLYNELNLGRREEYDVLDKRRGRDPEMGGKPQRRKNPQEGLYNELQKDKMAEAYSEIGMKGERRRGKGHDGLYQGLSTATKDTYDALHMQALPPRRAKRSGSGATNFSLLKQAGDVEENPGPTSMDWIWRILFLVGAATGAHSFEEVQLVESGGGLVQPGRSLRLSCAASGFTFDDYGMHWVRQAPGKGLEWVSGISWNSGSIGYADSAKGRFTISRDNSKNTLYLQMNSLRAEDTAVYYCAKRGNSNSFDYWGQGTLVTVSSASTKGPSVFPLAPSSKSTSGGTAALGCLVKDYFPEPVTVSWNSGALTSGVHTFPAVLQSSGLYSLSSVVTVPSSSLGTQTYICNVNHKPSNTKVDKRVEPKSCGTQSFGLLDPKLCYLLDGILFIYGVILTALFLRVKFSRSADAPAYQQGQNQLYNELNLGRREEYDVLDKRRGRDPEMGGKPQRRKNPQEGLYNELQKDKMAEAYSEIGMKGERRRGKGHDGLYQGLSTATKDTYDALHMQALPPRRAKRSGSGVKQTLNFDLLKLAGDVESNPGPSRGHMTEYKPTVRLATRDDVPRAVRTLAAAFADYPATRHTVDPDRHIERVTELQELFLTRVGLDIGKVWVADDGAAVAVWTTPESVEAGAVFAEIGPRMAELSGSRLAAQQQMEGLLAPHRPKEPAWFLATVGVSPDHQGKGLGSAVVLPGVEAAERAGVPAFLETSAPRNLPFYERLGFTVTADVEVPEGPRTWCMTRKPGA

SEQ ID NO: 19845 - protein, 815 aa, Artificial Sequence
  Synthetic Polypeptide
MALPVTALLLPLALLLHAARPDIQMTQSPSSVSASVGDRVTITCRASQSVSSYLNWYQQKPGKAPKLLIYAASSLQSGVPSRFSGSGSGTDFTLTISSLQPEDFATYYCQQSYSTPWTFGQGTKLEIKRLEDLKNVFPPEVAVFEPSEAEISHTQKATLVCLATGFYPDHVELSWWVNGKEVHSGVSTDPQPLKEQPALNDSRYCLSSRLRVSATFWQNPRNHFRCQVQFYGLSENDEWTQDRAKPVTQIVSAEAWGRADCGSQSFGLLDPKLCYLLDGILFIYGVILTALFLRVKFSRSADAPAYQQGQNQLYNELNLGRREEYDVLDKRRGRDPEMGGKPQRRKNPQEGLYNELQKDKMAEAYSEIGMKGERRRGKGHDGLYQGLSTATKDTYDALHMQALPPRRAKRSGSGATNFSLLKQAGDVEENPGPTSMDWIWRILFLVGAATGAHSFEEVQLVESGGGLVQPGRSLRLSCAASGFTFDDYGMHWVRQAPGKGLEWVSGISWNSGSIGYADSAKGRFTISRDNSKNTLYLQMNSLRAEDTAVYYCAKRGNSNSFDYWGQGTLVTVSSTRIQNPDPAVYQLRDSKSSDKSVCLFTDFDSQTNVSQSKDSDVYITDKTVLDMRSMDFKSNSAVAWSNKSDFACANAFNNSIIPEDTFFPSPESSCGTQSFGLLDPKLCYLLDGILFIYGVILTALFLRVKFSRSADAPAYQQGQNQLYNELNLGRREEYDVLDKRRGRDPEMGGKPQRRKNPQEGLYNELQKDKMAEAYSEIGMKGERRRGKGHDGLYQGLSTATKDTYDALHMQALPPR

SEQ ID NO: 19846 - protein, 815 aa, Artificial Sequence
  Synthetic Polypeptide
MALPVTALLLPLALLLHAARPDIQMTQSPSSVSASVGDRVTITCRASQSVSSYLNWYQQKPGKAPKLLIYAASSLQSGVPSRFSGSGSGTDFTLTISSLQPEDFATYYCQQSYSTPWTFGQGTKLEIKRLEDLKNVFPPEVAVFEPSKAEIAHTQKATLVCLATGFYPDHVELSWWVNGKEVHSGVCTDPQPLKEQPALNDSRYCLSSRLRVSATFWQNPRNHFRCQVQFYGLSENDEWTQDRAKPVTQIVSAEAWGRADCGSQSFGLLDPKLCYLLDGILFIYGVILTALFLRVKFSRSADAPAYQQGQNQLYNELNLGRREEYDVLDKRRGRDPEMGGKPQRRKNPQEGLYNELQKDKMAEAYSEIGMKGERRRGKGHDGLYQGLSTATKDTYDALHMQALPPRRAKRSGSGATNFSLLKQAGDVEENPGPTSMDWIWRILFLVGAATGAHSFEEVQLVESGGGLVQPGRSLRLSCAASGFTFDDYGMHWVRQAPGKGLEWVSGISWNSGSIGYADSAKGRFTISRDNSKNTLYLQMNSLRAEDTAVYYCAKRGNSNSFDYWGQGTLVTVSSTRIQNPDPAVYQLRDSKSSDKSVCLFTDFDSQTNVSQSKDSDVYITDKCVLDMRSMDFKSNSAVAWSNKSDFACANAFNNSIIPEDTFFPSSDVPCGTQSFGLLDPKLCYLLDGILFIYGVILTALFLRVKFSRSADAPAYQQGQNQLYNELNLGRREEYDVLDKRRGRDPEMGGKPQRRKNPQEGLYNELQKDKMAEAYSEIGMKGERRRGKGHDGLYQGLSTATKDTYDALHMQALPPR

SEQ ID NO: 19847 - protein, 886 aa, Artificial Sequence
  Synthetic Polypeptide
MALPVTALLLPLALLLHAARPDIQMTQSPSSVSASVGDRVTITCRASQSVSSYLNWYQQKPGKAPKLLIYAASSLQSGVPSRFSGSGSGTDFTLTISSLQPEDFATYYCQQSYSTPWTFGQGTKLEIKRLEGKPIPNPLLGLDSTGSGEDLKNVFPPEVAVFEPSEAEISHTQKATLVCLATGFYPDHVELSWWVNGKEVHSGVSTDPQPLKEQPALNDSRYCLSSRLRVSATFWQNPRNHFRCQVQFYGLSENDEWTQDRAKPVTQIVSAEAWGRADCGSQSFGLLDPKLCYLLDGILFIYGVILTALFLRVKFSRSADAPAYQQGQNQLYNELNLGRREEYDVLDKRRGRDPEMGGKPQRRKNPQEGLYNELQKDKMAEAYSEIGMKGERRRGKGHDGLYQGLSTATKDTYDALHMQALPPRRAKRSGSGATNFSLLKQAGDVEENPGPTSMDWIWRILFLVGAATGAHSFEEVQLVESGGGLVQPGRSLRLSCAASGFTFDDYGMHWVRQAPGKGLEWVSGISWNSGSIGYADSAKGRFTISRDNSKNTLYLQMNSLRAEDTAVYYCAKRGNSNSFDYWGQGTLVTVSSTREQKLISEEDGSGIQNPDPAVYQLRDSKSSDKSVCLFTDFDSQTNVSQSKDSDVYITDKTVLDMRSMDFKSNSAVAWSNKSDFACANAFNNSIIPEDTFFPSPESSCGTQSFGLLDPKLCYLLDGILFIYGVILTALFLRSKRSRLLHSDYMNMTPRRPGPTRKHYQPYAPPRDFAAYRSRVKFSRSADAPAYQQGQNQLYNELNLGRREEYDVLDKRRGRDPEMGGKPQRRKNPQEGLYNELQKDKMAEAYSEIGMKGERRRGKGHDGLYQGLSTATKDTYDALHMQALPPR

SEQ ID NO: 19848 - protein, 927 aa, Artificial Sequence
  Synthetic Polypeptide
MALPVTALLLPLALLLHAARPDIQMTQSPSSVSASVGDRVTITCRASQSVSSYLNWYQQKPGKAPKLLIYAASSLQSGVPSRFSGSGSGTDFTLTISSLQPEDFATYYCQQSYSTPWTFGQGTKLEIKRLEGKPIPNPLLGLDSTGSGEDLKNVFPPEVAVFEPSEAEISHTQKATLVCLATGFYPDHVELSWWVNGKEVHSGVSTDPQPLKEQPALNDSRYCLSSRLRVSATFWQNPRNHFRCQVQFYGLSENDEWTQDRAKPVTQIVSAEAWGRADCGSQSFGLLDPKLCYLLDGILFIYGVILTALFLRSKRSRLLHSDYMNMTPRRPGPTRKHYQPYAPPRDFAAYRSRVKFSRSADAPAYQQGQNQLYNELNLGRREEYDVLDKRRGRDPEMGGKPQRRKNPQEGLYNELQKDKMAEAYSEIGMKGERRRGKGHDGLYQGLSTATKDTYDALHMQALPPRRAKRSGSGATNFSLLKQAGDVEENPGPTSMDWIWRILFLVGAATGAHSFEEVQLVESGGGLVQPGRSLRLSCAASGFTFDDYGMHWVRQAPGKGLEWVSGISWNSGSIGYADSAKGRFTISRDNSKNTLYLQMNSLRAEDTAVYYCAKRGNSNSFDYWGQGTLVTVSSTREQKLISEEDGSGIQNPDPAVYQLRDSKSSDKSVCLFTDFDSQTNVSQSKDSDVYITDKTVLDMRSMDFKSNSAVAWSNKSDFACANAFNNSIIPEDTFFPSPESSCGTQSFGLLDPKLCYLLDGILFIYGVILTALFLRSKRSRLLHSDYMNMTPRRPGPTRKHYQPYAPPRDFAAYRSRVKFSRSADAPAYQQGQNQLYNELNLGRREEYDVLDKRRGRDPEMGGKPQRRKNPQEGLYNELQKDKMAEAYSEIGMKGERRRGKGHDGLYQGLSTATKDTYDALHMQALPPR

SEQ ID NO: 19849 - protein, 888 aa, Artificial Sequence
  Synthetic Polypeptide
MALPVTALLLPLALLLHAARPDIQMTQSPSSVSASVGDRVTITCRASQSVSSYLNWYQQKPGKAPKLLIYAASSLQSGVPSRFSGSGSGTDFTLTISSLQPEDFATYYCQQSYSTPWTFGQGTKLEIKRLEGKPIPNPLLGLDSTGSGEDLKNVFPPEVAVFEPSEAEISHTQKATLVCLATGFYPDHVELSWWVNGKEVHSGVSTDPQPLKEQPALNDSRYCLSSRLRVSATFWQNPRNHFRCQVQFYGLSENDEWTQDRAKPVTQIVSAEAWGRADCGSQSFGLLDPKLCYLLDGILFIYGVILTALFLRVKFSRSADAPAYQQGQNQLYNELNLGRREEYDVLDKRRGRDPEMGGKPQRRKNPQEGLYNELQKDKMAEAYSEIGMKGERRRGKGHDGLYQGLSTATKDTYDALHMQALPPRRAKRSGSGATNFSLLKQAGDVEENPGPTSMDWIWRILFLVGAATGAHSFEEVQLVESGGGLVQPGRSLRLSCAASGFTFDDYGMHWVRQAPGKGLEWVSGISWNSGSIGYADSAKGRFTISRDNSKNTLYLQMNSLRAEDTAVYYCAKRGNSNSFDYWGQGTLVTVSSTREQKLISEEDLGSGIQNPDPAVYQLRDSKSSDKSVCLFTDFDSQTNVSQSKDSDVYITDKTVLDMRSMDFKSNSAVAWSNKSDFACANAFNNSIIPEDTFFPSPESSCGTQSFGLLDPKLCYLLDGILFIYGVILTALFLKRGRKKLLYIFKQPFMRPVQTTQEEDGCSCRFPEEEEGGCELRVKFSRSADAPAYQQGQNQLYNELNLGRREEYDVLDKRRGRDPEMGGKPQRRKNPQEGLYNELQKDKMAEAYSEIGMKGERRRGKGHDGLYQGLSTATKDTYDALHMQALPPR

SEQ ID NO: 19850 - protein, 930 aa, Artificial Sequence
  Synthetic Polypeptide
MALPVTALLLPLALLLHAARPDIQMTQSPSSVSASVGDRVTITCRASQSVSSYLNWYQQKPGKAPKLLIYAASSLQSGVPSRFSGSGSGTDFTLTISSLQPEDFATYYCQQSYSTPWTFGQGTKLEIKRLEGKPIPNPLLGLDSTGSGEDLKNVFPPEVAVFEPSEAEISHTQKATLVCLATGFYPDHVELSWWVNGKEVHSGVSTDPQPLKEQPALNDSRYCLSSRLRVSATFWQNPRNHFRCQVQFYGLSENDEWTQDRAKPVTQIVSAEAWGRADCGSQSFGLLDPKLCYLLDGILFIYGVILTALFLKRGRKKLLYIFKQPFMRPVQTTQEEDGCSCRFPEEEEGGCELRVKFSRSADAPAYQQGQNQLYNELNLGRREEYDVLDKRRGRDPEMGGKPQRRKNPQEGLYNELQKDKMAEAYSEIGMKGERRRGKGHDGLYQGLSTATKDTYDALHMQALPPRRAKRSGSGATNFSLLKQAGDVEENPGPTSMDWIWRILFLVGAATGAHSFEEVQLVESGGGLVQPGRSLRLSCAASGFTFDDYGMHWVRQAPGKGLEWVSGISWNSGSIGYADSAKGRFTISRDNSKNTLYLQMNSLRAEDTAVYYCAKRGNSNSFDYWGQGTLVTVSSTREQKLISEEDLGSGIQNPDPAVYQLRDSKSSDKSVCLFTDFDSQTNVSQSKDSDVYITDKTVLDMRSMDFKSNSAVAWSNKSDFACANAFNNSIIPEDTFFPSPESSCGTQSFGLLDPKLCYLLDGILFIYGVILTALFLKRGRKKLLYIFKQPFMRPVQTTQEEDGCSCRFPEEEEGGCELRVKFSRSADAPAYQQGQNQLYNELNLGRREEYDVLDKRRGRDPEMGGKPQRRKNPQEGLYNELQKDKMAEAYSEIGMKGERRRGKGHDGLYQGLSTATKDTYDALHMQALPPR

SEQ ID NO: 19851 - protein, 820 aa, Artificial Sequence
  Synthetic Polypeptide
MALPVTALLLPLALLLHAARPDIQMTQSPSSVSASVGDRVTITCRASQSVSSYLNWYQQKPGKAPKLLIYAASSLQSGVPSRFSGSGSGTDFTLTISSLQPEDFATYYCQQSYSTPWTFGQGTKLEIKRLEQSFGLLDPKLCYLLDGILFIYGVILTALFLRVKFSRSADAPAYQQGQNQLYNELNLGRREEYDVLDKRRGRDPEMGGKPQRRKNPQEGLYNELQKDKMAEAYSEIGMKGERRRGKGHDGLYQGLSTATKDTYDALHMQALPPRRAKRSGSGATNFSLLKQAGDVEENPGPTSMDWIWRILFLVGAATGAHSFEEVQLVESGGGLVQPGRSLRLSCAASGFTFDDYGMHWVRQAPGKGLEWVSGISWNSGSIGYADSAKGRFTISRDNSKNTLYLQMNSLRAEDTAVYYCAKRGNSNSFDYWGQGTLVTVSSTRQSFGLLDPKLCYLLDGILFIYGVILTALFLRVKFSRSADAPAYQQGQNQLYNELNLGRREEYDVLDKRRGRDPEMGGKPQRRKNPQEGLYNELQKDKMAEAYSEIGMKGERRRGKGHDGLYQGLSTATKDTYDALHMQALPPRRAKRSGSGVKQTLNFDLLKLAGDVESNPGPSRGHMTEYKPTVRLATRDDVPRAVRTLAAAFADYPATRHTVDPDRHIERVTELQELFLTRVGLDIGKVWVADDGAAVAVWTTPESVEAGAVFAEIGPRMAELSGSRLAAQQQMEGLLAPHRPKEPAWFLATVGVSPDHQGKGLGSAVVLPGVEAAERAGVPAFLETSAPRNLPFYERLGFTVTADVEVPEGPRTWCMTRKPGA

SEQ ID NO: 19852 - protein, 645 aa, Artificial Sequence
  Synthetic Polypeptide
MALPVTALLLPLALLLHAARPDIQMTQSPSSVSASVGDRVTITCRASQSVSSYLNWYQQKPGKAPKLLIYAASSLQSGVPSRFSGSGSGTDFTLTISSLQPEDFATYYCQQSYSTPWTFGQGTKLEIKRLEGQPKANPTVTLFPPSSEELQANKATLVCLISDFYPGAVTVAWKADGSPVKAGVETTKPSKQSNNKYAASSYLSLTPEQWKSHRSYSCQVTHEGSTVEKTVAPTECSPIKTDVITMDPKDNCSKDANDTLLLQLTNTSAYYMYLLLLLKSVVYFAIITCCLLRRTAFCCNGEKSRAKRSGSGATNFSLLKQAGDVEENPGPTSMDWIWRILFLVGAATGAHSFEEVQLVESGGGLVQPGRSLRLSCAASGFTFDDYGMHWVRQAPGKGLEWVSGISWNSGSIGYADSAKGRFTISRDNSKNTLYLQMNSLRAEDTAVYYCAKRGNSNSFDYWGQGTLVTVSSTRASTKGPSVFPLAPSSKSTSGGTAALGCLVKDYFPEPVTVSWNSGALTSGVHTFPAVLQSSGLYSLSSVVTVPSSSLGTQTYICNVNHKPSNTKVDKRVEPKSCEVKTDSTDHVKPKETENTKQPSKSCHKPKAIVHTEKVNMMSLTVLGLRMLFAKTVAVNFLLTAKLFFL

SEQ ID NO: 19853 - protein, 623 aa, Artificial Sequence
  Synthetic Polypeptide
MALPVTALLLPLALLLHAARPDIQMTQSPSSVSASVGDRVTITCRASQSVSSYLNWYQQKPGKAPKLLIYAASSLQSGVPSRFSGSGSGTDFTLTISSLQPEDFATYYCQQSYSTPWTFGQGTKLEIKRLEGQPKANPTVTLFPPSSEELQANKATLVCLISDFYPGAVTVAWKADGSPVKAGVETTKPSKQSNNKYAASSYLSLTPEQWKSHRSYSCQVTHEGSTVEKTVAPTECSGRADCGITSASYHQGVLSATILYEILLGKATLYAVLVSALVLMAMVKRKDSRGRAKRSGSGATNFSLLKQAGDVEENPGPTSMDWIWRILFLVGAATGAHSFEEVQLVESGGGLVQPGRSLRLSCAASGFTFDDYGMHWVRQAPGKGLEWVSGISWNSGSIGYADSAKGRFTISRDNSKNTLYLQMNSLRAEDTAVYYCAKRGNSNSFDYWGQGTLVTVSSTRASTKGPSVFPLAPSSKSTSGGTAALGCLVKDYFPEPVTVSWNSGALTSGVHTFPAVLQSSGLYSLSSVVTVPSSSLGTQTYICNVNHKPSNTKVDKRVEPKSCIPEDTFFPSSDVPCDVKLVEKSFETDTNLNFQNLSVIGFRILLLKVAGFNLLMTLRLWSS

SEQ ID NO: 19854 - protein, 623 aa, Artificial Sequence
  Synthetic Polypeptide
MALPVTALLLPLALLLHAARPDIQMTQSPSSVSASVGDRVTITCRASQSVSSYLNWYQQKPGKAPKLLIYAASSLQSGVPSRFSGSGSGTDFTLTISSLQPEDFATYYCQQSYSTPWTFGQGTKLEIKRLEGQPKANPTVTLFPPSSEELQANKATLVCLISDFYPGAVTVAWKADGSPVKAGVETTKPSKQSNNKYAASSYLSLTPEQWKSHRSYSCQVTHEGSTVEKTVAPTECSGRADCGFTSESYQQGVLSATILYEILLGKATLYAVLVSALVLMAMVKRKDSRGRAKRSGSGATNFSLLKQAGDVEENPGPTSMDWIWRILFLVGAATGAHSFEEVQLVESGGGLVQPGRSLRLSCAASGFTFDDYGMHWVRQAPGKGLEWVSGISWNSGSIGYADSAKGRFTISRDNSKNTLYLQMNSLRAEDTAVYYCAKRGNSNSFDYWGQGTLVTVSSTRASTKGPSVFPLAPSSKSTSGGTAALGCLVKDYFPEPVTVSWNSGALTSGVHTFPAVLQSSGLYSLSSVVTVPSSSLGTQTYICNVNHKPSNTKVDKRVEPKSCIPEDTFFPSPESSCDVKLVEKSFETDTNLNFQNLSVIGFRILLLKVAGFNLLMTLRLWSS

SEQ ID NO: 19855 - protein, 449 aa, Artificial Sequence
  Synthetic Polypeptide
MALPVTALLLPLALLLHAARPDIQMTQSPSSVSASVGDRVTITCRASQSVSSYLNWYQQKPGKAPKLLIYAASSLQSGVPSRFSGSGSGTDFTLTISSLQPEDFATYYCQQSYSTPWTFGQGTKLEIKRGGGGSGGGGSGGGGSEVQLVESGGGLVQPGRSLRLSCAASGFTFDDYGMHWVRQAPGKGLEWVSGISWNSGSIGYADSAKGRFTISRDNSKNTLYLQMNSLRAEDTAVYYCAKRGNSNSFDYWGQGTLVTVSSTRDGNEEMGGITQTPYKVSISGTTVILTCPQYPGSEILWQHNDKNIGGDEDDKNIGSDEDHLSLKEFSELEQSGYYVCYPRGSKPEDANFYLYLRARVCENCMEMDVMSVATIVIVDICITGGLLLLVYYWSKNRKAKAKPVTRGAGAGGRQRGQNKERPPPVPNPDYEPIRKGQRDLYSGLNQRRI

SEQ ID NO: 19856 - protein, 414 aa, Artificial Sequence
  Synthetic Polypeptide
MALPVTALLLPLALLLHAARPDIQMTQSPSSVSASVGDRVTITCRASQSVSSYLNWYQQKPGKAPKLLIYAASSLQSGVPSRFSGSGSGTDFTLTISSLQPEDFATYYCQQSYSTPWTFGQGTKLEIKRGGGGSGGGGSGGGGSEVQLVESGGGLVQPGRSLRLSCAASGFTFDDYGMHWVRQAPGKGLEWVSGISWNSGSIGYADSAKGRFTISRDNSKNTLYLQMNSLRAEDTAVYYCAKRGNSNSFDYWGQGTLVTVSSTRFKIPIEELEDRVFVNCNTSITWVEGTVGTLLSDITRLDLGKRILDPRGIYRCNGTDIYKDKESTVQVHYRMCQSCVELDPATVAGIIVTDVIATLLLALGVFCFAGHETGRLSGAADTQALLRNDQVYQPLRDRDDAQYSHLGGNWARNK

SEQ ID NO: 19857 - protein, 424 aa, Artificial Sequence
  Synthetic Polypeptide
MALPVTALLLPLALLLHAARPDIQMTQSPSSVSASVGDRVTITCRASQSVSSYLNWYQQKPGKAPKLLIYAASSLQSGVPSRFSGSGSGTDFTLTISSLQPEDFATYYCQQSYSTPWTFGQGTKLEIKRGGGGSGGGGSGGGGSEVQLVESGGGLVQPGRSLRLSCAASGFTFDDYGMHWVRQAPGKGLEWVSGISWNSGSIGYADSAKGRFTISRDNSKNTLYLQMNSLRAEDTAVYYCAKRGNSNSFDYWGQGTLVTVSSTRQSIKGNHLVKVYDYQEDGSVLLTCDAEAKNITWFKDGKMIGFLTEDKKKWNLGSNAKDPRGMYQCKGSQNKSKPLQVYYRMCQNCIELNAATISGFLFAEIVSIFVLAVGVYFIAGQDGVRQSRASDKQTLLPNDQLYQPLKDREDDQYSHLQGNQLRRN

SEQ ID NO: 19858 - protein, 407 aa, Artificial Sequence
  Synthetic Polypeptide
MALPVTALLLPLALLLHAARPDIQMTQSPSSVSASVGDRVTITCRASQSVSSYLNWYQQKPGKAPKLLIYAASSLQSGVPSRFSGSGSGTDFTLTISSLQPEDFATYYCQQSYSTPWTFGQGTKLEIKRGGGGSGGGGSGGGGSEVQLVESGGGLVQPGRSLRLSCAASGFTFDDYGMHWVRQAPGKGLEWVSGISWNSGSIGYADSAKGRFTISRDNSKNTLYLQMNSLRAEDTAVYYCAKRGNSNSFDYWGQGTLVTVSSTRQSFGLLDPKLCYLLDGILFIYGVILTALFLRVKFSRSADAPAYQQGQNQLYNELNLGRREEYDVLDKRRGRDPEMGGKPQRRKNPQEGLYNELQKDKMAEAYSEIGMKGERRRGKGHDGLYQGLSTATKDTYDALHMQALPPR

SEQ ID NO: 19859 - protein, 449 aa, Artificial Sequence
  Synthetic Polypeptide
MALPVTALLLPLALLLHAARPEVQLVESGGGLVQPGRSLRLSCAASGFTFDDYGMHWVRQAPGKGLEWVSGISWNSGSIGYADSAKGRFTISRDNSKNTLYLQMNSLRAEDTAVYYCAKRGNSNSFDYWGQGTLVTVSSGGGGSGGGGSGGGGSDIQMTQSPSSVSASVGDRVTITCRASQSVSSYLNWYQQKPGKAPKLLIYAASSLQSGVPSRFSGSGSGTDFTLTISSLQPEDFATYYCQQSYSTPWTFGQGTKLEIKRTRDGNEEMGGITQTPYKVSISGTTVILTCPQYPGSEILWQHNDKNIGGDEDDKNIGSDEDHLSLKEFSELEQSGYYVCYPRGSKPEDANFYLYLRARVCENCMEMDVMSVATIVIVDICITGGLLLLVYYWSKNRKAKAKPVTRGAGAGGRQRGQNKERPPPVPNPDYEPIRKGQRDLYSGLNQRRI

SEQ ID NO: 19860 - protein, 414 aa, Artificial Sequence
  Synthetic Polypeptide
MALPVTALLLPLALLLHAARPEVQLVESGGGLVQPGRSLRLSCAASGFTFDDYGMHWVRQAPGKGLEWVSGISWNSGSIGYADSAKGRFTISRDNSKNTLYLQMNSLRAEDTAVYYCAKRGNSNSFDYWGQGTLVTVSSGGGGSGGGGSGGGGSDIQMTQSPSSVSASVGDRVTITCRASQSVSSYLNWYQQKPGKAPKLLIYAASSLQSGVPSRFSGSGSGTDFTLTISSLQPEDFATYYCQQSYSTPWTFGQGTKLEIKRTRFKIPIEELEDRVFVNCNTSITWVEGTVGTLLSDITRLDLGKRILDPRGIYRCNGTDIYKDKESTVQVHYRMCQSCVELDPATVAGIIVTDVIATLLLALGVFCFAGHETGRLSGAADTQALLRNDQVYQPLRDRDDAQYSHLGGNWARNK

SEQ ID NO: 19861 - protein, 424 aa, Artificial Sequence
  Synthetic Polypeptide
MALPVTALLLPLALLLHAARPEVQLVESGGGLVQPGRSLRLSCAASGFTFDDYGMHWVRQAPGKGLEWVSGISWNSGSIGYADSAKGRFTISRDNSKNTLYLQMNSLRAEDTAVYYCAKRGNSNSFDYWGQGTLVTVSSGGGGSGGGGSGGGGSDIQMTQSPSSVSASVGDRVTITCRASQSVSSYLNWYQQKPGKAPKLLIYAASSLQSGVPSRFSGSGSGTDFTLTISSLQPEDFATYYCQQSYSTPWTFGQGTKLEIKRTRQSIKGNHLVKVYDYQEDGSVLLTCDAEAKNITWFKDGKMIGFLTEDKKKWNLGSNAKDPRGMYQCKGSQNKSKPLQVYYRMCQNCIELNAATISGFLFAEIVSIFVLAVGVYFIAGQDGVRQSRASDKQTLLPNDQLYQPLKDREDDQYSHLQGNQLRRN

SEQ ID NO: 19862 - protein, 407 aa, Artificial Sequence
  Synthetic Polypeptide
MALPVTALLLPLALLLHAARPEVQLVESGGGLVQPGRSLRLSCAASGFTFDDYGMHWVRQAPGKGLEWVSGISWNSGSIGYADSAKGRFTISRDNSKNTLYLQMNSLRAEDTAVYYCAKRGNSNSFDYWGQGTLVTVSSGGGGSGGGGSGGGGSDIQMTQSPSSVSASVGDRVTITCRASQSVSSYLNWYQQKPGKAPKLLIYAASSLQSGVPSRFSGSGSGTDFTLTISSLQPEDFATYYCQQSYSTPWTFGQGTKLEIKRTRQSFGLLDPKLCYLLDGILFIYGVILTALFLRVKFSRSADAPAYQQGQNQLYNELNLGRREEYDVLDKRRGRDPEMGGKPQRRKNPQEGLYNELQKDKMAEAYSEIGMKGERRRGKGHDGLYQGLSTATKDTYDALHMQALPPR

SEQ ID NO: 19863 - protein, 640 aa, Artificial Sequence
  Synthetic Polypeptide
MALPVTALLLPLALLLHAARPDIQMTQSPSSVSASVGDRVTITCRASQSVSSYLNWYQQKPGKAPKLLIYAASSLQSGVPSRFSGSGSGTDFTLTISSLQPEDFATYYCQQSYSTPWTFGQGTKLEIKRGGGGSGGGGSGGGGSEVQLVESGGGLVQPGRSLRLSCAASGFTFDDYGMHWVRQAPGKGLEWVSGISWNSGSIGYADSAKGRFTISRDNSKNTLYLQMNSLRAEDTAVYYCAKRGNSNSFDYWGQGTLVTVSSTRGSGIQNPDPAVYQLRDSKSSDKSVCLFTDFDSQTNVSQSKDSDVYITDKTVLDMRSMDFKSNSAVAWSNKSDFACANAFNNSIIPEDTFFPSPESSCDVKLVEKSFETDTNLNFQNLSVIGFRILLLKVAGFNLLMTLRLWSSRAKRSGSGVKQTLNFDLLKLAGDVESNPGPSRGHMTEYKPTVRLATRDDVPRAVRTLAAAFADYPATRHTVDPDRHIERVTELQELFLTRVGLDIGKVWVADDGAAVAVWTTPESVEAGAVFAEIGPRMAELSGSRLAAQQQMEGLLAPHRPKEPAWFLATVGVSPDHQGKGLGSAVVLPGVEAAERAGVPAFLETSAPRNLPFYERLGFTVTADVEVPEGPRTWCMTRKPGA

SEQ ID NO: 19864 - protein, 672 aa, Artificial Sequence
  Synthetic Polypeptide
MALPVTALLLPLALLLHAARPDIQMTQSPSSVSASVGDRVTITCRASQSVSSYLNWYQQKPGKAPKLLIYAASSLQSGVPSRFSGSGSGTDFTLTISSLQPEDFATYYCQQSYSTPWTFGQGTKLEIKRGGGGSGGGGSGGGGSEVQLVESGGGLVQPGRSLRLSCAASGFTFDDYGMHWVRQAPGKGLEWVSGISWNSGSIGYADSAKGRFTISRDNSKNTLYLQMNSLRAEDTAVYYCAKRGNSNSFDYWGQGTLVTVSSLEDLKNVFPPEVAVFEPSEAEISHTQKATLVCLATGFYPDHVELSWWVNGKEVHSGVSTDPQPLKEQPALNDSRYCLSSRLRVSATFWQNPRNHFRCQVQFYGLSENDEWTQDRAKPVTQIVSAEAWGRADCGFTSESYQQGVLSATILYEILLGKATLYAVLVSALVLMAMVKRKDSRGRAKRSGSGATNFSLLKQAGDVEENPGPTRGHMTEYKPTVRLATRDDVPRAVRTLAAAFADYPATRHTVDPDRHIERVTELQELFLTRVGLDIGKVWVADDGAAVAVWTTPESVEAGAVFAEIGPRMAELSGSRLAAQQQMEGLLAPHRPKEPAWFLATVGVSPDHQGKGLGSAVVLPGVEAAERAGVPAFLETSAPRNLPFYERLGFTVTADVEVPEGPRTWCMTRKPGA

SEQ ID NO: 19865 - protein, 722 aa, Artificial Sequence
  Synthetic Polypeptide
MALPVTALLLPLALLLHAARPDIQMTQSPSSVSASVGDRVTITCRASQSVSSYLNWYQQKPGKAPKLLIYAASSLQSGVPSRFSGSGSGTDFTLTISSLQPEDFATYYCQQSYSTPWTFGQGTKLEIKRGGGGSGGGGSGGGGSEVQLVESGGGLVQPGRSLRLSCAASGFTFDDYGMHWVRQAPGKGLEWVSGISWNSGSIGYADSAKGRFTISRDNSKNTLYLQMNSLRAEDTAVYYCAKRGNSNSFDYWGQGTLVTVSSTREQKLISEEDLGSGTPFPSLAPPIMLLVDGKQQMVVVCLVLDVAPPGLDSPIWFSAGNGSALDAFTYGPSPATDGTWTNLAHLSLPSEELASWEPLVCHTGPGAEGHSRSTQPMHLSGEASTARTCPQEPLRGTPGGALWLGVLRLLLFKLLLFDLLLTCSCLCDPAGPLPSPATTTRLRALGSHRLHPATETGGREATSSPRPQPRDRRWGDTPPGRKPGSPVRAKRSGSGVKQTLNFDLLKLAGDVESNPGPSRSRGHMTEYKPTVRLATRDDVPRAVRTLAAAFADYPATRHTVDPDRHIERVTELQELFLTRVGLDIGKVWVADDGAAVAVWTTPESVEAGAVFAEIGPRMAELSGSRLAAQQQMEGLLAPHRPKEPAWFLATVGVSPDHQGKGLGSAVVLPGVEAAERAGVPAFLETSAPRNLPFYERLGFTVTADVEVPEGPRTWCMTRKPGA

SEQ ID NO: 19866 - protein, 539 aa, Artificial Sequence
  Synthetic Polypeptide
MALPVTALLLPLALLLHAARPDIQMTQSPSSVSASVGDRVTITCRASQSVSSYLNWYQQKPGKAPKLLIYAASSLQSGVPSRFSGSGSGTDFTLTISSLQPEDFATYYCQQSYSTPWTFGQGTKLEIKRLEDLKNVFPPEVAVFEPSEAEISHTQKATLVCLATGFYPDHVELSWWVNGKEVHSGVSTDPQPLKEQPALNDSRYCLSSRLRVSATFWQNPRNHFRCQVQFYGLSENDEWTQDRAKPVTQIVSAEAWGRADCGFTSESYQQGVLSATILYEILLGKATLYAVLVSALVLMAMVKRKDSRGRAKRSGSGATNFSLLKQAGDVEENPGPTRGHMTEYKPTVRLATRDDVPRAVRTLAAAFADYPATRHTVDPDRHIERVTELQELFLTRVGLDIGKVWVADDGAAVAVWTTPESVEAGAVFAEIGPRMAELSGSRLAAQQQMEGLLAPHRPKEPAWFLATVGVSPDHQGKGLGSAVVLPGVEAAERAGVPAFLETSAPRNLPFYERLGFTVTADVEVPEGPRTWCMTRKPGA

SEQ ID NO: 19867 - protein, 309 aa, Artificial Sequence
  Synthetic Polypeptide
MALPVTALLLPLALLLHAARPDIQMTQSPSSVSASVGDRVTITCRASQSVSSYLNWYQQKPGKAPKLLIYAASSLQSGVPSRFSGSGSGTDFTLTISSLQPEDFATYYCQQSYSTPWTFGQGTKLEIKRLEDLKNVFPPEVAVFEPSEAEISHTQKATLVCLATGFYPDHVELSWWVNGKEVHSGVSTDPQPLKEQPALNDSRYCLSSRLRVSATFWQNPRNHFRCQVQFYGLSENDEWTQDRAKPVTQIVSAEAWGRADCGFTSESYQQGVLSATILYEILLGKATLYAVLVSALVLMAMVKRKDSRG

SEQ ID NO: 19868 - protein, 447 aa, Artificial Sequence
  Synthetic Polypeptide
MDWIWRILFLVGAATGAHSFEEVQLVESGGGLVQPGRSLRLSCAASGFTFDDYGMHWVRQAPGKGLEWVSGISWNSGSIGYADSAKGRFTISRDNSKNTLYLQMNSLRAEDTAVYYCAKRGNSNSFDYWGQGTLVTVSSTRIQNPDPAVYQLRDSKSSDKSVCLFTDFDSQTNVSQSKDSDVYITDKTVLDMRSMDFKSNSAVAWSNKSDFACANAFNNSIIPEDTFFPSPESSCDVKLVEKSFETDTNLNFQNLSVIGFRILLLKVAGFNLLMTLRLWSSRAKRSGSGVKQTLNFDLLKLAGDVESNPGPSRGHMAKPLSQEESTLIERATATINSIPISEDYSVASAALSSDGRIFTGVNVYHFTGGPCAELVVLGTAAAAAAGNLTCIVAIGNENRGILSPCGRCRQVLLDLHPGIKAIVKDSDGQPTAVGIRELLPSGYVWEG

SEQ ID NO: 19869 - protein, 281 aa, Artificial Sequence
  Synthetic Polypeptide
MDWIWRILFLVGAATGAHSFEEVQLVESGGGLVQPGRSLRLSCAASGFTFDDYGMHWVRQAPGKGLEWVSGISWNSGSIGYADSAKGRFTISRDNSKNTLYLQMNSLRAEDTAVYYCAKRGNSNSFDYWGQGTLVTVSSTRIQNPDPAVYQLRDSKSSDKSVCLFTDFDSQTNVSQSKDSDVYITDKTVLDMRSMDFKSNSAVAWSNKSDFACANAFNNSIIPEDTFFPSPESSCDVKLVEKSFETDTNLNFQNLSVIGFRILLLKVAGFNLLMTLRLWSS

SEQ ID NO: 19870 - protein, 557 aa, Artificial Sequence
  Synthetic Polypeptide
MALPVTALLLPLALLLHAARPDIQMTQSPSSVSASVGDRVTITCRASQSVSSYLNWYQQKPGKAPKLLIYAASSLQSGVPSRFSGSGSGTDFTLTISSLQPEDFATYYCQQSYSTPWTFGQGTKLEIKRLEGKPIPNPLLGLDSTGSGEDLKNVFPPEVAVFEPSEAEISHTQKATLVCLATGFYPDHVELSWWVNGKEVHSGVCTDPQPLKEQPALNDSRYCLSSRLRVSATFWQNPRNHFRCQVQFYGLSENDEWTQDRAKPVTQIVSAEAWGRADCGFTSESYQQGVLSATILYEILLGKATLYAVLVSALVLMAMVKRKDSRGRAKRSGSGATNFSLLKQAGDVEENPGPTRGHMTEYKPTVRLATRDDVPRAVRTLAAAFADYPATRHTVDPDRHIERVTELQELFLTRVGLDIGKVWVADDGAAVAVWTTPESVEAGAVFAEIGPRMAELSGSRLAAQQQMEGLLAPHRPKEPAWFLATVGVSPDHQGKGLGSAVVLPGVEAAERAGVPAFLETSAPRNLPFYERLGFTVTADVEVPEGPRTWCMTRKPGA

SEQ ID NO: 19871 - protein, 327 aa, Artificial Sequence
  Synthetic Polypeptide
MALPVTALLLPLALLLHAARPDIQMTQSPSSVSASVGDRVTITCRASQSVSSYLNWYQQKPGKAPKLLIYAASSLQSGVPSRFSGSGSGTDFTLTISSLQPEDFATYYCQQSYSTPWTFGQGTKLEIKRLEGKPIPNPLLGLDSTGSGEDLKNVFPPEVAVFEPSEAEISHTQKATLVCLATGFYPDHVELSWWVNGKEVHSGVCTDPQPLKEQPALNDSRYCLSSRLRVSATFWQNPRNHFRCQVQFYGLSENDEWTQDRAKPVTQIVSAEAWGRADCGFTSESYQQGVLSATILYEILLGKATLYAVLVSALVLMAMVKRKDSRG

SEQ ID NO: 19872 - protein, 459 aa, Artificial Sequence
  Synthetic Polypeptide
MDWIWRILFLVGAATGAHSFEEVQLVESGGGLVQPGRSLRLSCAASGFTFDDYGMHWVRQAPGKGLEWVSGISWNSGSIGYADSAKGRFTISRDNSKNTLYLQMNSLRAEDTAVYYCAKRGNSNSFDYWGQGTLVTVSSTREQKLISEEDGSGIQNPDPAVYQLRDSKSSDKSVCLFTDFDSQTNVSQSKDSDVYITDKCVLDMRSMDFKSNSAVAWSNKSDFACANAFNNSIIPEDTFFPSPESSCDVKLVEKSFETDTNLNFQNLSVIGFRILLLKVAGFNLLMTLRLWSSRAKRSGSGVKQTLNFDLLKLAGDVESNPGPSRGHMAKPLSQEESTLIERATATINSIPISEDYSVASAALSSDGRIFTGVNVYHFTGGPCAELVVLGTAAAAAAGNLTCIVAIGNENRGILSPCGRCRQVLLDLHPGIKAIVKDSDGQPTAVGIRELLPSGYVWEG

SEQ ID NO: 19873 - protein, 293 aa, Artificial Sequence
  Synthetic Polypeptide
MDWIWRILFLVGAATGAHSFEEVQLVESGGGLVQPGRSLRLSCAASGFTFDDYGMHWVRQAPGKGLEWVSGISWNSGSIGYADSAKGRFTISRDNSKNTLYLQMNSLRAEDTAVYYCAKRGNSNSFDYWGQGTLVTVSSTREQKLISEEDGSGIQNPDPAVYQLRDSKSSDKSVCLFTDFDSQTNVSQSKDSDVYITDKCVLDMRSMDFKSNSAVAWSNKSDFACANAFNNSIIPEDTFFPSPESSCDVKLVEKSFETDTNLNFQNLSVIGFRILLLKVAGFNLLMTLRLWSS

SEQ ID NO: 19874 - protein, 640 aa, Artificial Sequence
  Synthetic Polypeptide
MALPVTALLLPLALLLHAARPDIQMTQSPSSVSASVGDRVTITCRASQSVSSYLNWYQQKPGKAPKLLIYAASSLQSGVPSRFSGSGSGTDFTLTISSLQPEDFATYYCQQSYSTPWTFGQGTKLEIKRGGGGSGGGGSGGGGSEVQLVESGGGLVQPGRSLRLSCAASGFTFDDYGMHWVRQAPGKGLEWVSGISWNSGSIGYADSAKGRFTISRDNSKNTLYLQMNSLRAEDTAVYYCAKRGNSNSFDYWGQGTLVTVSSTRGSGIQNPDPAVYQLRDSKSSDKSVCLFTDFDSQTNVSQSKDSDVYITDKTVLDMRSMDFKSNSAVAWSNKSDFACANAFNNSIIPEDTFFPSSDVPCDVKLVEKSFETDTNLNFQNLSVIGFRILLLKVAGFNLLMTLRLWSSRAKRSGSGVKQTLNFDLLKLAGDVESNPGPSRGHMTEYKPTVRLATRDDVPRAVRTLAAAFADYPATRHTVDPDRHIERVTELQELFLTRVGLDIGKVWVADDGAAVAVWTTPESVEAGAVFAEIGPRMAELSGSRLAAQQQMEGLLAPHRPKEPAWFLATVGVSPDHQGKGLGSAVVLPGVEAAERAGVPAFLETSAPRNLPFYERLGFTVTADVEVPEGPRTWCMTRKPGA

SEQ ID NO: 19875 - protein, 672 aa, Artificial Sequence
  Synthetic Polypeptide
MALPVTALLLPLALLLHAARPDIQMTQSPSSVSASVGDRVTITCRASQSVSSYLNWYQQKPGKAPKLLIYAASSLQSGVPSRFSGSGSGTDFTLTISSLQPEDFATYYCQQSYSTPWTFGQGTKLEIKRGGGGSGGGGSGGGGSEVQLVESGGGLVQPGRSLRLSCAASGFTFDDYGMHWVRQAPGKGLEWVSGISWNSGSIGYADSAKGRFTISRDNSKNTLYLQMNSLRAEDTAVYYCAKRGNSNSFDYWGQGTLVTVSSLEDLKNVFPPEVAVFEPSKAEIAHTQKATLVCLATGFYPDHVELSWWVNGKEVHSGVSTDPQPLKEQPALNDSRYCLSSRLRVSATFWQNPRNHFRCQVQFYGLSENDEWTQDRAKPVTQIVSAEAWGRADCGITSASYHQGVLSATILYEILLGKATLYAVLVSALVLMAMVKRKDSRGRAKRSGSGATNFSLLKQAGDVEENPGPTRGHMTEYKPTVRLATRDDVPRAVRTLAAAFADYPATRHTVDPDRHIERVTELQELFLTRVGLDIGKVWVADDGAAVAVWTTPESVEAGAVFAEIGPRMAELSGSRLAAQQQMEGLLAPHRPKEPAWFLATVGVSPDHQGKGLGSAVVLPGVEAAERAGVPAFLETSAPRNLPFYERLGFTVTADVEVPEGPRTWCMTRKPGA

SEQ ID NO: 19876 - protein, 695 aa, Artificial Sequence
  Synthetic Polypeptide
MALPVTALLLPLALLLHAARPDIQMTQSPSSVSASVGDRVTITCRASQSVSSYLNWYQQKPGKAPKLLIYAASSLQSGVPSRFSGSGSGTDFTLTISSLQPEDFATYYCQQSYSTPWTFGQGTKLEIKRGGGGSGGGGSGGGGSEVQLVESGGGLVQPGRSLRLSCAASGFTFDDYGMHWVRQAPGKGLEWVSGISWNSGSIGYADSAKGRFTISRDNSKNTLYLQMNSLRAEDTAVYYCAKRGNSNSFDYWGQGTLVTVSSTRGSGGGGSGGGGSGDGNEEMGGITQTPYKVSISGTTVILTCPQYPGSEILWQHNDKNIGGDEDDKNIGSDEDHLSLKEFSELEQSGYYVCYPRGSKPEDANFYLYLRARVCENCMEMDVMSVATIVIVDICITGGLLLLVYYWSKNRKAKAKPVTRGAGAGGRQRGQNKERPPPVPNPDYEPIRKGQRDLYSGLNQRRIRAKRSGSGVKQTLNFDLLKLAGDVESNPGPSRGHMTEYKPTVRLATRDDVPRAVRTLAAAFADYPATRHTVDPDRHIERVTELQELFLTRVGLDIGKVWVADDGAAVAVWTTPESVEAGAVFAEIGPRMAELSGSRLAAQQQMEGLLAPHRPKEPAWFLATVGVSPDHQGKGLGSAVVLPGVEAAERAGVPAFLETSAPRNLPFYERLGFTVTADVEVPEGPRTWCMTRKPGA

SEQ ID NO: 19877 - protein, 660 aa, Artificial Sequence
  Synthetic Polypeptide
MALPVTALLLPLALLLHAARPDIQMTQSPSSVSASVGDRVTITCRASQSVSSYLNWYQQKPGKAPKLLIYAASSLQSGVPSRFSGSGSGTDFTLTISSLQPEDFATYYCQQSYSTPWTFGQGTKLEIKRGGGGSGGGGSGGGGSEVQLVESGGGLVQPGRSLRLSCAASGFTFDDYGMHWVRQAPGKGLEWVSGISWNSGSIGYADSAKGRFTISRDNSKNTLYLQMNSLRAEDTAVYYCAKRGNSNSFDYWGQGTLVTVSSTRGSGGGGSGGGGSGFKIPIEELEDRVFVNCNTSITWVEGTVGTLLSDITRLDLGKRILDPRGIYRCNGTDIYKDKESTVQVHYRMCQSCVELDPATVAGIIVTDVIATLLLALGVFCFAGHETGRLSGAADTQALLRNDQVYQPLRDRDDAQYSHLGGNWARNKRAKRSGSGVKQTLNFDLLKLAGDVESNPGPSRGHMTEYKPTVRLATRDDVPRAVRTLAAAFADYPATRHTVDPDRHIERVTELQELFLTRVGLDIGKVWVADDGAAVAVWTTPESVEAGAVFAEIGPRMAELSGSRLAAQQQMEGLLAPHRPKEPAWFLATVGVSPDHQGKGLGSAVVLPGVEAAERAGVPAFLETSAPRNLPFYERLGFTVTADVEVPEGPRTWCMTRKPGA

SEQ ID NO: 19878 - protein, 670 aa, Artificial Sequence
  Synthetic Polypeptide
MALPVTALLLPLALLLHAARPDIQMTQSPSSVSASVGDRVTITCRASQSVSSYLNWYQQKPGKAPKLLIYAASSLQSGVPSRFSGSGSGTDFTLTISSLQPEDFATYYCQQSYSTPWTFGQGTKLEIKRGGGGSGGGGSGGGGSEVQLVESGGGLVQPGRSLRLSCAASGFTFDDYGMHWVRQAPGKGLEWVSGISWNSGSIGYADSAKGRFTISRDNSKNTLYLQMNSLRAEDTAVYYCAKRGNSNSFDYWGQGTLVTVSSTRGSGGGGSGGGGSGQSIKGNHLVKVYDYQEDGSVLLTCDAEAKNITWFKDGKMIGFLTEDKKKWNLGSNAKDPRGMYQCKGSQNKSKPLQVYYRMCQNCIELNAATISGFLFAEIVSIFVLAVGVYFIAGQDGVRQSRASDKQTLLPNDQLYQPLKDREDDQYSHLQGNQLRRNRAKRSGSGVKQTLNFDLLKLAGDVESNPGPSRGHMTEYKPTVRLATRDDVPRAVRTLAAAFADYPATRHTVDPDRHIERVTELQELFLTRVGLDIGKVWVADDGAAVAVWTTPESVEAGAVFAEIGPRMAELSGSRLAAQQQMEGLLAPHRPKEPAWFLATVGVSPDHQGKGLGSAVVLPGVEAAERAGVPAFLETSAPRNLPFYERLGFTVTADVEVPEGPRTWCMTRKPGA

SEQ ID NO: 19879 - protein, 653 aa, Artificial Sequence
  Synthetic Polypeptide
MALPVTALLLPLALLLHAARPDIQMTQSPSSVSASVGDRVTITCRASQSVSSYLNWYQQKPGKAPKLLIYAASSLQSGVPSRFSGSGSGTDFTLTISSLQPEDFATYYCQQSYSTPWTFGQGTKLEIKRGGGGSGGGGSGGGGSEVQLVESGGGLVQPGRSLRLSCAASGFTFDDYGMHWVRQAPGKGLEWVSGISWNSGSIGYADSAKGRFTISRDNSKNTLYLQMNSLRAEDTAVYYCAKRGNSNSFDYWGQGTLVTVSSTRGSGGGGSGGGGSGQSFGLLDPKLCYLLDGILFIYGVILTALFLRVKFSRSADAPAYQQGQNQLYNELNLGRREEYDVLDKRRGRDPEMGGKPQRRKNPQEGLYNELQKDKMAEAYSEIGMKGERRRGKGHDGLYQGLSTATKDTYDALHMQALPPRRAKRSGSGVKQTLNFDLLKLAGDVESNPGPSRGHMTEYKPTVRLATRDDVPRAVRTLAAAFADYPATRHTVDPDRHIERVTELQELFLTRVGLDIGKVWVADDGAAVAVWTTPESVEAGAVFAEIGPRMAELSGSRLAAQQQMEGLLAPHRPKEPAWFLATVGVSPDHQGKGLGSAVVLPGVEAAERAGVPAFLETSAPRNLPFYERLGFTVTADVEVPEGPRTWCMTRKPGA

SEQ ID NO: 19880 - protein, 754 aa, Artificial Sequence
  Synthetic Polypeptide
MALPVTALLLPLALLLHAARPEVQLVESGGGLVQPGGSLRLSCAASGFSFSDFWMSWVRQAPGKGLEWVATISQAGSEKDYVDSVKGRFTISRDNAKKSLYLQMNSLRAEDTAVYYCASGVYSFDYRGQGTLVTVSSGTGGGGSGGGGSGGGGSEFDIQMTQSPSSVSASVGDRVTITCRASQSVSSYLNWYQQKPGKAPKLLIYAASSLQSGVPSRFSGSGSGTDFTLTISSLQPEDFATYYCQQSYSTPWTFGQGTKLEIKRLEDLKNVFPPEVAVFEPSEAEISHTQKATLVCLATGFYPDHVELSWWVNGKEVHSGVCTDPQPLKEQPALNDSRYCLSSRLRVSATFWQNPRNHFRCQVQFYGLSENDEWTQDRAKPVTQIVSAEAWGRADCGFTSESYQQGVLSATILYEILLGKATLYAVLVSALVLMAMVKRKDSRGRAKRSGSGATNFSLLKQAGDVEENPGPTSMDWIWRILFLVGAATGAHSFEEVQLVESGGGLVQPGRSLRLSCAASGFTFDDYGMHWVRQAPGKGLEWVSGISWNSGSIGYADSAKGRFTISRDNSKNTLYLQMNSLRAEDTAVYYCAKRGNSNSFDYWGQGTLVTVSSTRIQNPDPAVYQLRDSKSSDKSVCLFTDFDSQTNVSQSKDSDVYITDKCVLDMRSMDFKSNSAVAWSNKSDFACANAFNNSIIPEDTFFPSPESSCDVKLVEKSFETDTNLNFQNLSVIGFRILLLKVAGFNLLMTLRLWSS

SEQ ID NO: 19881 - protein, 758 aa, Artificial Sequence
  Synthetic Polypeptide
MALPVTALLLPLALLLHAARPEVQLVESGGGLVQPGGSLRLSCAASGFSFSDFWMSWVRQAPGKGLEWVATISQAGSEKDYVDSVKGRFTISRDNAKKSLYLQMNSLRAEDTAVYYCASGVYSFDYRGQGTLVTVSSGTGGGGSGGGGSGGGGSEFDIQMTQSPSSVSASVGDRVTITCRASQSVSSYLNWYQQKPGKAPKLLIYAASSLQSGVPSRFSGSGSGTDFTLTISSLQPEDFATYYCQQSYSTPWTFGQGTKLEIKRLEIQNPDPAVYQLRDSKSSDKSVCLFTDFDSQTNVSQSKDSDVYITDKCVLDMRSMDFKSNSAVAWSNKSDFACANAFNNSIIPEDTFFPSPESSCDVKLVEKSFETDTNLNFQNLSVIGFRILLLKVAGFNLLMTLRLWSSRAKRSGSGVKQTLNFDLLKLAGDVESNPGPTSMDWIWRILFLVGAATGAHSFEEVQLVESGGGLVQPGRSLRLSCAASGFTFDDYGMHWVRQAPGKGLEWVSGISWNSGSIGYADSAKGRFTISRDNSKNTLYLQMNSLRAEDTAVYYCAKRGNSNSFDYWGQGTLVTVSSTREDLKNVFPPEVAVFEPSEAEISHTQKATLVCLATGFYPDHVELSWWVNGKEVHSGVCTDPQPLKEQPALNDSRYCLSSRLRVSATFWQNPRNHFRCQVQFYGLSENDEWTQDRAKPVTQIVSAEAWGRADCGFTSESYQQGVLSATILYEILLGKATLYAVLVSALVLMAMVKRKDSRG

SEQ ID NO: 19882 - protein, 950 aa, Artificial Sequence
  Synthetic Polypeptide
MALPVTALLLPLALLLHAARPEVQLVESGGGLVQPGGSLRLSCAASGFSFSDFWMSWVRQAPGKGLEWVATISQAGSEKDYVDSVKGRFTISRDNAKKSLYLQMNSLRAEDTAVYYCASGVYSFDYRGQGTLVTVSSGTGGGGSGGGGSGGGGSEFDIQMTQSPSSVSASVGDRVTITCRASQSVSSYLNWYQQKPGKAPKLLIYAASSLQSGVPSRFSGSGSGTDFTLTISSLQPEDFATYYCQQSYSTPWTFGQGTKLEIKRLEDLKNVFPPEVAVFEPSEAEISHTQKATLVCLATGFYPDHVELSWWVNGKEVHSGVSTDPQPLKEQPALNDSRYCLSSRLRVSATFWQNPRNHFRCQVQFYGLSENDEWTQDRAKPVTQIVSAEAWGRADCGSQSFGLLDPKLCYLLDGILFIYGVILTALFLRVKFSRSADAPAYQQGQNQLYNELNLGRREEYDVLDKRRGRDPEMGGKPQRRKNPQEGLYNELQKDKMAEAYSEIGMKGERRRGKGHDGLYQGLSTATKDTYDALHMQALPPRRAKRSGSGATNFSLLKQAGDVEENPGPTSMDWIWRILFLVGAATGAHSFEEVQLVESGGGLVQPGRSLRLSCAASGFTFDDYGMHWVRQAPGKGLEWVSGISWNSGSIGYADSAKGRFTISRDNSKNTLYLQMNSLRAEDTAVYYCAKRGNSNSFDYWGQGTLVTVSSTRIQNPDPAVYQLRDSKSSDKSVCLFTDFDSQTNVSQSKDSDVYITDKTVLDMRSMDFKSNSAVAWSNKSDFACANAFNNSIIPEDTFFPSPESSCGTQSFGLLDPKLCYLLDGILFIYGVILTALFLRVKFSRSADAPAYQQGQNQLYNELNLGRREEYDVLDKRRGRDPEMGGKPQRRKNPQEGLYNELQKDKMAEAYSEIGMKGERRRGKGHDGLYQGLSTATKDTYDALHMQALPPR

SEQ ID NO: 19883 - protein, 780 aa, Artificial Sequence
  Synthetic Polypeptide
MALPVTALLLPLALLLHAARPEVQLVESGGGLVQPGGSLRLSCAASGFSFSDFWMSWVRQAPGKGLEWVATISQAGSEKDYVDSVKGRFTISRDNAKKSLYLQMNSLRAEDTAVYYCASGVYSFDYRGQGTLVTVSSGTGGGGSGGGGSGGGGSEFDIQMTQSPSSVSASVGDRVTITCRASQSVSSYLNWYQQKPGKAPKLLIYAASSLQSGVPSRFSGSGSGTDFTLTISSLQPEDFATYYCQQSYSTPWTFGQGTKLEIKRLEGQPKANPTVTLFPPSSEELQANKATLVCLISDFYPGAVTVAWKADGSPVKAGVETTKPSKQSNNKYAASSYLSLTPEQWKSHRSYSCQVTHEGSTVEKTVAPTECSPIKTDVITMDPKDNCSKDANDTLLLQLTNTSAYYMYLLLLLKSVVYFAIITCCLLRRTAFCCNGEKSRAKRSGSGATNFSLLKQAGDVEENPGPTSMDWIWRILFLVGAATGAHSFEEVQLVESGGGLVQPGRSLRLSCAASGFTFDDYGMHWVRQAPGKGLEWVSGISWNSGSIGYADSAKGRFTISRDNSKNTLYLQMNSLRAEDTAVYYCAKRGNSNSFDYWGQGTLVTVSSTRASTKGPSVFPLAPSSKSTSGGTAALGCLVKDYFPEPVTVSWNSGALTSGVHTFPAVLQSSGLYSLSSVVTVPSSSLGTQTYICNVNHKPSNTKVDKRVEPKSCEVKTDSTDHVKPKETENTKQPSKSCHKPKAIVHTEKVNMMSLTVLGLRMLFAKTVAVNFLLTAKLFFL

SEQ ID NO: 19884 - protein, 761 aa, Artificial Sequence
  Synthetic Polypeptide
MALPVTALLLPLALLLHAARPEVQLVESGGGLVQPGGSLRLSCAASGFSFSDFWMSWVRQAPGKGLEWVATISQAGSEKDYVDSVKGRFTISRDNAKKSLYLQMNSLRAEDTAVYYCASGVYSFDYRGQGTLVTVSSGTGGGGSGGGGSGGGGSEFDIQMTQSPSSVSASVGDRVTITCRASQSVSSYLNWYQQKPGKAPKLLIYAASSLQSGVPSRFSGSGSGTDFTLTISSLQPEDFATYYCQQSYSTPWTFGQGTKLEIKRLEGQPKANPTVTLFPPSSEELQANKATLVCLISDFYPGAVTVAWKADGSPVKAGVETTKPSKQSNNKYAASSYLSLTPEQWKSHRSYSCQVTHEGSTVEKTVAPTECSGRADCGFTSESYQQGVLSATILYEILLGKATLYAVLVSALVLMAMVKRKDSRGRAKRSGSGVKQTLNFDLLKLAGDVESNPGPTSMDWIWRILFLVGAATGAHSFEEVQLVESGGGLVQPGRSLRLSCAASGFTFDDYGMHWVRQAPGKGLEWVSGISWNSGSIGYADSAKGRFTISRDNSKNTLYLQMNSLRAEDTAVYYCAKRGNSNSFDYWGQGTLVTVSSTRASTKGPSVFPLAPSSKSTSGGTAALGCLVKDYFPEPVTVSWNSGALTSGVHTFPAVLQSSGLYSLSSVVTVPSSSLGTQTYICNVNHKPSNTKVDKRVEPKSCIPEDTFFPSPESSCDVKLVEKSFETDTNLNFQNLSVIGFRILLLKVAGFNLLMTLRLWSS

SEQ ID NO: 19885 - protein, 895 aa, Artificial Sequence
  Synthetic Polypeptide
MALPVTALLLPLALLLHAARPEVQLVESGGGLVQPGGSLRLSCAASGFSFSDFWMSWVRQAPGKGLEWVATISQAGSEKDYVDSVKGRFTISRDNAKKSLYLQMNSLRAEDTAVYYCASGVYSFDYRGQGTLVTVSSGTGGGGSGGGGSGGGGSEFDIQMTQSPSSVSASVGDRVTITCRASQSVSSYLNWYQQKPGKAPKLLIYAASSLQSGVPSRFSGSGSGTDFTLTISSLQPEDFATYYCQQSYSTPWTFGQGTKLEIKRLEIQNPDPAVYQLRDSKSSDKSVCLFTDFDSQTNVSQSKDSDVYITDKCVLDMRSMDFKSNSAVAWSNKSDFACANAFNNSIIPEDTFFPSPESSCDVKLVEKSFETDTNLNFQNLSVIGFRILLLKVAGFNLLMTLRLWSSRAKRSGSGVKQTLNFDLLKLAGDVESNPGPTSMDWIWRILFLVGAATGAHSGPQLQLQESGPGLVKPSETLSLTCTVSGDSISSGDYYWGWIRQPPGKGLEWIGHIYYSGVTYYNPSLKSRVTISVDTSRNQFSLKLSSVTAADTAVYYCTREDSSNWRSRGQGTLVTVSSGSGGGGSGGGGSGGGGSFEEVQLVESGGGLVQPGRSLRLSCAASGFTFDDYGMHWVRQAPGKGLEWVSGISWNSGSIGYADSAKGRFTISRDNSKNTLYLQMNSLRAEDTAVYYCAKRGNSNSFDYWGQGTLVTVSSTREDLKNVFPPEVAVFEPSEAEISHTQKATLVCLATGFYPDHVELSWWVNGKEVHSGVCTDPQPLKEQPALNDSRYCLSSRLRVSATFWQNPRNHFRCQVQFYGLSENDEWTQDRAKPVTQIVSAEAWGRADCGFTSESYQQGVLSATILYEILLGKATLYAVLVSALVLMAMVKRKDSRG

SEQ ID NO: 19886 - protein, 1087 aa, Artificial Sequence
  Synthetic Polypeptide
MALPVTALLLPLALLLHAARPEVQLVESGGGLVQPGGSLRLSCAASGFSFSDFWMSWVRQAPGKGLEWVATISQAGSEKDYVDSVKGRFTISRDNAKKSLYLQMNSLRAEDTAVYYCASGVYSFDYRGQGTLVTVSSGTGGGGSGGGGSGGGGSEFDIQMTQSPSSVSASVGDRVTITCRASQSVSSYLNWYQQKPGKAPKLLIYAASSLQSGVPSRFSGSGSGTDFTLTISSLQPEDFATYYCQQSYSTPWTFGQGTKLEIKRLEDLKNVFPPEVAVFEPSEAEISHTQKATLVCLATGFYPDHVELSWWVNGKEVHSGVSTDPQPLKEQPALNDSRYCLSSRLRVSATFWQNPRNHFRCQVQFYGLSENDEWTQDRAKPVTQIVSAEAWGRADCGSQSFGLLDPKLCYLLDGILFIYGVILTALFLRVKFSRSADAPAYQQGQNQLYNELNLGRREEYDVLDKRRGRDPEMGGKPQRRKNPQEGLYNELQKDKMAEAYSEIGMKGERRRGKGHDGLYQGLSTATKDTYDALHMQALPPRRAKRSGSGATNFSLLKQAGDVEENPGPTSMDWIWRILFLVGAATGAHSGPQLQLQESGPGLVKPSETLSLTCTVSGDSISSGDYYWGWIRQPPGKGLEWIGHIYYSGVTYYNPSLKSRVTISVDTSRNQFSLKLSSVTAADTAVYYCTREDSSNWRSRGQGTLVTVSSGSGGGGSGGGGSGGGGSFEEVQLVESGGGLVQPGRSLRLSCAASGFTFDDYGMHWVRQAPGKGLEWVSGISWNSGSIGYADSAKGRFTISRDNSKNTLYLQMNSLRAEDTAVYYCAKRGNSNSFDYWGQGTLVTVSSTRIQNPDPAVYQLRDSKSSDKSVCLFTDFDSQTNVSQSKDSDVYITDKTVLDMRSMDFKSNSAVAWSNKSDFACANAFNNSIIPEDTFFPSPESSCGTQSFGLLDPKLCYLLDGILFIYGVILTALFLRVKFSRSADAPAYQQGQNQLYNELNLGRREEYDVLDKRRGRDPEMGGKPQRRKNPQEGLYNELQKDKMAEAYSEIGMKGERRRGKGHDGLYQGLSTATKDTYDALHMQALPPR

SEQ ID NO: 19887 - protein, 917 aa, Artificial Sequence
  Synthetic Polypeptide
MALPVTALLLPLALLLHAARPEVQLVESGGGLVQPGGSLRLSCAASGFSFSDFWMSWVRQAPGKGLEWVATISQAGSEKDYVDSVKGRFTISRDNAKKSLYLQMNSLRAEDTAVYYCASGVYSFDYRGQGTLVTVSSGTGGGGSGGGGSGGGGSEFDIQMTQSPSSVSASVGDRVTITCRASQSVSSYLNWYQQKPGKAPKLLIYAASSLQSGVPSRFSGSGSGTDFTLTISSLQPEDFATYYCQQSYSTPWTFGQGTKLEIKRLEGQPKANPTVTLFPPSSEELQANKATLVCLISDFYPGAVTVAWKADGSPVKAGVETTKPSKQSNNKYAASSYLSLTPEQWKSHRSYSCQVTHEGSTVEKTVAPTECSPIKTDVITMDPKDNCSKDANDTLLLQLTNTSAYYMYLLLLLKSVVYFAIITCCLLRRTAFCCNGEKSRAKRSGSGATNFSLLKQAGDVEENPGPTSMDWIWRILFLVGAATGAHSGPQLQLQESGPGLVKPSETLSLTCTVSGDSISSGDYYWGWIRQPPGKGLEWIGHIYYSGVTYYNPSLKSRVTISVDTSRNQFSLKLSSVTAADTAVYYCTREDSSNWRSRGQGTLVTVSSGSGGGGSGGGGSGGGGSFEEVQLVESGGGLVQPGRSLRLSCAASGFTFDDYGMHWVRQAPGKGLEWVSGISWNSGSIGYADSAKGRFTISRDNSKNTLYLQMNSLRAEDTAVYYCAKRGNSNSFDYWGQGTLVTVSSTRASTKGPSVFPLAPSSKSTSGGTAALGCLVKDYFPEPVTVSWNSGALTSGVHTFPAVLQSSGLYSLSSVVTVPSSSLGTQTYICNVNHKPSNTKVDKRVEPKSCEVKTDSTDHVKPKETENTKQPSKSCHKPKAIVHTEKVNMMSLTVLGLRMLFAKTVAVNFLLTAKLFFL

SEQ ID NO: 19888 - protein, 898 aa, Artificial Sequence
  Synthetic Polypeptide
MALPVTALLLPLALLLHAARPEVQLVESGGGLVQPGGSLRLSCAASGFSFSDFWMSWVRQAPGKGLEWVATISQAGSEKDYVDSVKGRFTISRDNAKKSLYLQMNSLRAEDTAVYYCASGVYSFDYRGQGTLVTVSSGTGGGGSGGGGSGGGGSEFDIQMTQSPSSVSASVGDRVTITCRASQSVSSYLNWYQQKPGKAPKLLIYAASSLQSGVPSRFSGSGSGTDFTLTISSLQPEDFATYYCQQSYSTPWTFGQGTKLEIKRLEGQPKANPTVTLFPPSSEELQANKATLVCLISDFYPGAVTVAWKADGSPVKAGVETTKPSKQSNNKYAASSYLSLTPEQWKSHRSYSCQVTHEGSTVEKTVAPTECSGRADCGFTSESYQQGVLSATILYEILLGKATLYAVLVSALVLMAMVKRKDSRGRAKRSGSGVKQTLNFDLLKLAGDVESNPGPTSMDWIWRILFLVGAATGAHSGPQLQLQESGPGLVKPSETLSLTCTVSGDSISSGDYYWGWIRQPPGKGLEWIGHIYYSGVTYYNPSLKSRVTISVDTSRNQFSLKLSSVTAADTAVYYCTREDSSNWRSRGQGTLVTVSSGSGGGGSGGGGSGGGGSFEEVQLVESGGGLVQPGRSLRLSCAASGFTFDDYGMHWVRQAPGKGLEWVSGISWNSGSIGYADSAKGRFTISRDNSKNTLYLQMNSLRAEDTAVYYCAKRGNSNSFDYWGQGTLVTVSSTRASTKGPSVFPLAPSSKSTSGGTAALGCLVKDYFPEPVTVSWNSGALTSGVHTFPAVLQSSGLYSLSSVVTVPSSSLGTQTYICNVNHKPSNTKVDKRVEPKSCIPEDTFFPSPESSCDVKLVEKSFETDTNLNFQNLSVIGFRILLLKVAGFNLLMTLRLWSS

SEQ ID NO: 19889 - protein, 755 aa, Artificial Sequence
  Synthetic Polypeptide
MALPVTALLLPLALLLHAARPEVQVLESGGGLVQPGGSLRLSCAASGFTFSNFAMSWVRQAPGKGLEWVSTISGSAGTTDYADSVKGRFTISRDNSKKTLYLQMNSLRVEDTAVYYCADGRGPFFDYRGQGTLVTVSSGTGGGGSGGGGSGGGGSEFDIQMTQSPSSVSASVGDRVTITCRASQSVSSYLNWYQQKPGKAPKLLIYAASSLQSGVPSRFSGSGSGTDFTLTISSLQPEDFATYYCQQSYSTPWTFGQGTKLEIKRLEDLKNVFPPEVAVFEPSEAEISHTQKATLVCLATGFYPDHVELSWWVNGKEVHSGVCTDPQPLKEQPALNDSRYCLSSRLRVSATFWQNPRNHFRCQVQFYGLSENDEWTQDRAKPVTQIVSAEAWGRADCGFTSESYQQGVLSATILYEILLGKATLYAVLVSALVLMAMVKRKDSRGRAKRSGSGATNFSLLKQAGDVEENPGPTSMDWIWRILFLVGAATGAHSFEEVQLVESGGGLVQPGRSLRLSCAASGFTFDDYGMHWVRQAPGKGLEWVSGISWNSGSIGYADSAKGRFTISRDNSKNTLYLQMNSLRAEDTAVYYCAKRGNSNSFDYWGQGTLVTVSSTRIQNPDPAVYQLRDSKSSDKSVCLFTDFDSQTNVSQSKDSDVYITDKCVLDMRSMDFKSNSAVAWSNKSDFACANAFNNSIIPEDTFFPSPESSCDVKLVEKSFETDTNLNFQNLSVIGFRILLLKVAGFNLLMTLRLWSS

SEQ ID NO: 19890 - protein, 756 aa, Artificial Sequence
  Synthetic Polypeptide
MALPVTALLLPLALLLHAARPDIQMTQSPSSVSASVGDRVTITCRASQSVSSYLNWYQQKPGKAPKLLIYAASSLQSGVPSRFSGSGSGTDFTLTISSLQPEDFATYYCQQSYSTPWTFGQGTKLEIKRLEDLKNVFPPEVAVFEPSEAEISHTQKATLVCLATGFYPDHVELSWWVNGKEVHSGVCTDPQPLKEQPALNDSRYCLSSRLRVSATFWQNPRNHFRCQVQFYGLSENDEWTQDRAKPVTQIVSAEAWGRADCGFTSESYQQGVLSATILYEILLGKATLYAVLVSALVLMAMVKRKDSRGRAKRSGSGATNFSLLKQAGDVEENPGPTSMDWIWRILFLVGAATGAHSGPEVQLVESGGGLVQAGGSLRLSCAASGRTFSMGWFRQAPGKEREFVAAITYSGGSPYYADSVKGRFTISRDNAKNTVYLQMNSLKPEDTAVYYCAANPTYGSDWNAENWGQGTQVTVSSGSGGGGSGGGGSGGGGSFEEVQLVESGGGLVQPGRSLRLSCAASGFTFDDYGMHWVRQAPGKGLEWVSGISWNSGSIGYADSAKGRFTISRDNSKNTLYLQMNSLRAEDTAVYYCAKRGNSNSFDYWGQGTLVTVSSTRIQNPDPAVYQLRDSKSSDKSVCLFTDFDSQTNVSQSKDSDVYITDKCVLDMRSMDFKSNSAVAWSNKSDFACANAFNNSIIPEDTFFPSPESSCDVKLVEKSFETDTNLNFQNLSVIGFRILLLKVAGFNLLMTLRLWSS

SEQ ID NO: 19891 - protein, 883 aa, Artificial Sequence
  Synthetic Polypeptide
MALPVTALLLPLALLLHAARPDIQMTQSPSSVSASVGDRVTITCRASQSVSSYLNWYQQKPGKAPKLLIYAASSLQSGVPSRFSGSGSGTDFTLTISSLQPEDFATYYCQQSYSTPWTFGQGTKLEIKRLEDLKNVFPPEVAVFEPSEAEISHTQKATLVCLATGFYPDHVELSWWVNGKEVHSGVCTDPQPLKEQPALNDSRYCLSSRLRVSATFWQNPRNHFRCQVQFYGLSENDEWTQDRAKPVTQIVSAEAWGRADCGFTSESYQQGVLSATILYEILLGKATLYAVLVSALVLMAMVKRKDSRGRAKRSGSGATNFSLLKQAGDVEENPGPTSMDWIWRILFLVGAATGAHSQLQLQESGPGLVKPSETLSLTCTVSGGSISSGDYYWGWIRQPPGKGLEWIGSISYSGSTYYNPSLKSRVTISVDTSRNQFSLKLSSVTAADTAVYYCTREDSSNWRSRGQGTLVTVSSSGGGGSGGGGSEVQLVESGGGLVQAGGSLRLSCAASGRTFSMGWFRQAPGKEREFVAAITYSGGSPYYADSVKGRFTISRDNAKNTVYLQMNSLKPEDTAVYYCAANPTYGSDWNAENWGQGTQVTVSSGSGGGGSGGGGSGGGGSFEEVQLVESGGGLVQPGRSLRLSCAASGFTFDDYGMHWVRQAPGKGLEWVSGISWNSGSIGYADSAKGRFTISRDNSKNTLYLQMNSLRAEDTAVYYCAKRGNSNSFDYWGQGTLVTVSSTRIQNPDPAVYQLRDSKSSDKSVCLFTDFDSQTNVSQSKDSDVYITDKCVLDMRSMDFKSNSAVAWSNKSDFACANAFNNSIIPEDTFFPSPESSCDVKLVEKSFETDTNLNFQNLSVIGFRILLLKVAGFNLLMTLRLWSS

SEQ ID NO: 19892 - protein, 892 aa, Artificial Sequence
  Synthetic Polypeptide
MALPVTALLLPLALLLHAARPEVQVLESGGGLVQPGGSLRLSCAASGFTFSNFAMSWVRQAPGKGLEWVSTISGSAGTTDYADSVKGRFTISRDNSKKTLYLQMNSLRVEDTAVYYCADGRGPFFDYRGQGTLVTVSSGTGGGGSGGGGSGGGGSEFDIQMTQSPSSVSASVGDRVTITCRASQSVSSYLNWYQQKPGKAPKLLIYAASSLQSGVPSRFSGSGSGTDFTLTISSLQPEDFATYYCQQSYSTPWTFGQGTKLEIKRLEDLKNVFPPEVAVFEPSEAEISHTQKATLVCLATGFYPDHVELSWWVNGKEVHSGVCTDPQPLKEQPALNDSRYCLSSRLRVSATFWQNPRNHFRCQVQFYGLSENDEWTQDRAKPVTQIVSAEAWGRADCGFTSESYQQGVLSATILYEILLGKATLYAVLVSALVLMAMVKRKDSRGRAKRSGSGATNFSLLKQAGDVEENPGPTSMDWIWRILFLVGAATGAHSGPEVQLVESGGGLVQAGGSLRLSCAASGRTFSMGWFRQAPGKEREFVAAITYSGGSPYYASSVRGRFTISRDNAKNTVYLQMNSLKPEDTAVYYCAANPTYGSDWNAENWGQGTQVTVSSGSGGGGSGGGGSGGGGSFEEVQLVESGGGLVQPGRSLRLSCAASGFTFDDYGMHWVRQAPGKGLEWVSGISWNSGSIGYADSAKGRFTISRDNSKNTLYLQMNSLRAEDTAVYYCAKRGNSNSFDYWGQGTLVTVSSTRIQNPDPAVYQLRDSKSSDKSVCLFTDFDSQTNVSQSKDSDVYITDKCVLDMRSMDFKSNSAVAWSNKSDFACANAFNNSIIPEDTFFPSPESSCDVKLVEKSFETDTNLNFQNLSVIGFRILLLKVAGFNLLMTLRLWSS

SEQ ID NO: 19893 - protein, 730 aa, Artificial Sequence
  Synthetic Polypeptide
MALPVTALLLPLALLLHAARPQSALTQPRSVSGSPGQSVTISCTGTSSDVGSYNYVSWYQQSPGKAPKLMIYDVSNRPSGVSNRFSGSKSGNTASLTISGLQSEDEADYYCTSYGSYDIPVIFGGGTKVEIKGGGGSGGGGSGGGGSQMQLVQSGAEVKKPGSSVKVSCKASGGTFSSYAISWVRQAPGQGLEWMGGIIPIFGTANYAQKFQGRVTITADKSTSTAYMELSSLRSDDTAVYYCARDELWATNYYYMDVWGKGTLVTVSSTREQKLISEEDLAKPTTTPAPRPPTPAPTIASQPLSLRPEACRPAAGGAVHTRGLDFACDIYIWAPLAGTCGVLLLSLVITLYCKRGRKKLLYIFKQPFMRPVQTTQEEDGCSCRFPEEEEGGCELRVKFSRSADAPAYQQGQNQLYNELNLGRREEYDVLDKRRGRDPEMGGKPRRKNPQEGLYNELQKDKMAEAYSEIGMKGERRRGKGHDGLYQGLSTATKDTYDALHMQALPPRSSGSGEGRGSLLTCGDVEENPGPHMTEYKPTVRLATRDDVPRAVRTLAAAFADYPATRHTVDPDRHIERVTELQELFLTRVGLDIGKVWVADDGAAVAVWTTPESVEAGAVFAEIGPRMAELSGSRLAAQQQMEGLLAPHRPKEPAWFLATVGVSPDHQGKGLGSAVVLPGVEAAERAGVPAFLETSAPRNLPFYERLGFTVTADVEVPEGPRTWCMTRKPGA

SEQ ID NO: 19894 - protein, 724 aa, Artificial Sequence
  Synthetic Polypeptide
MALPVTALLLPLALLLHAARPQSALTQPRSVSGSPGQSVTISCTGTSSDVGSYNYVSWYQQSPGKAPKLMIYDVSNRPSGVSNRFSGSKSGNTASLTISGLQSEDEADYYCTSYGSYDIPVIFGGGTKVEIKGGGGSGGGGSGGGGSQMQLVQSGAEVKKPGSSVKVSCKASGGTFSSYAISWVRQAPGQGLEWMGGIIPIFGTANYAQKFQGRVTITADKSTSTAYMELSSLRSDDTAVYYCARDELWATNYYYMDVWGKGTLVTVSSTREQKLISEEDLKIEVMYPPPYLDNEKSNGTIIHVKGKHLCPSPLFPGPSKPFWVLVVVGGVLACYSLLVTVAFIIFWVRSKRSRLLHSDYMNMTPRRPGPTRKHYQPYAPPRDFAAYRSRVKFSRSADAPAYQQGQNQLYNELNLGRREEYDVLDKRRGRDPEMGGKPRRKNPQEGLYNELQKDKMAEAYSEIGMKGERRRGKGHDGLYQGLSTATKDTYDALHMQALPPRSSGSGEGRGSLLTCGDVEENPGPHMTEYKPTVRLATRDDVPRAVRTLAAAFADYPATRHTVDPDRHIERVTELQELFLTRVGLDIGKVWVADDGAAVAVWTTPESVEAGAVFAEIGPRMAELSGSRLAAQQQMEGLLAPHRPKEPAWFLATVGVSPDHQGKGLGSAVVLPGVEAAERAGVPAFLETSAPRNLPFYERLGFTVTADVEVPEGPRTWCMTRKPGA

SEQ ID NO: 19895 - protein, 501 aa, Artificial Sequence
  Synthetic Polypeptide
MALPVTALLLPLALLLHAARPQSALTQPRSVSGSPGQSVTISCTGTSSDVGSYNYVSWYQQSPGKAPKLMIYDVSNRPSGVSNRFSGSKSGNTASLTISGLQSEDEADYYCTSYGSYDIPVIFGGGTKVEIKGGGGSGGGGSGGGGSQMQLVQSGAEVKKPGSSVKVSCKASGGTFSSYAISWVRQAPGQGLEWMGGIIPIFGTANYAQKFQGRVTITADKSTSTAYMELSSLRSDDTAVYYCARDELWATNYYYMDVWGKGTLVTVSSTREQKLISEEDLKIEVMYPPPYLDNEKSNGTIIHVKGKHLCPSPLFPGPSKPFWVLVVVGGVLACYSLLVTVAFIIFWVRSKRSRLLHSDYMNMTPRRPGPTRKHYQPYAPPRDFAAYRSRVKFSRSADAPAYQQGQNQLYNELNLGRREEYDVLDKRRGRDPEMGGKPRRKNPQEGLYNELQKDKMAEAYSEIGMKGERRRGKGHDGLYQGLSTATKDTYDALHMQALPPR

SEQ ID NO: 19896 - protein, 507 aa, Artificial Sequence
  Synthetic Polypeptide
MALPVTALLLPLALLLHAARPQSALTQPRSVSGSPGQSVTISCTGTSSDVGSYNYVSWYQQSPGKAPKLMIYDVSNRPSGVSNRFSGSKSGNTASLTISGLQSEDEADYYCTSYGSYDIPVIFGGGTKVEIKGGGGSGGGGSGGGGSQMQLVQSGAEVKKPGSSVKVSCKASGGTFSSYAISWVRQAPGQGLEWMGGIIPIFGTANYAQKFQGRVTITADKSTSTAYMELSSLRSDDTAVYYCARDELWATNYYYMDVWGKGTLVTVSSTREQKLISEEDLAKPTTTPAPRPPTPAPTIASQPLSLRPEACRPAAGGAVHTRGLDFACDIYIWAPLAGTCGVLLLSLVITLYCKRGRKKLLYIFKQPFMRPVQTTQEEDGCSCRFPEEEEGGCELRVKFSRSADAPAYQQGQNQLYNELNLGRREEYDVLDKRRGRDPEMGGKPRRKNPQEGLYNELQKDKMAEAYSEIGMKGERRRGKGHDGLYQGLSTATKDTYDALHMQALPPR

SEQ ID NO: 19897 - protein, 507 aa, Artificial Sequence
  Synthetic Polypeptide
MALPVTALLLPLALLLHAARPQMQLVQSGAEVKKPGSSVKVSCKASGGTFSSYAISWVRQAPGQGLEWMGGIIPIFGTANYAQKFQGRVTITADKSTSTAYMELSSLRSDDTAVYYCARDELWATNYYYMDVWGKGTLVTVSSGGGGSGGGGSGGGGSQSALTQPRSVSGSPGQSVTISCTGTSSDVGSYNYVSWYQQSPGKAPKLMIYDVSNRPSGVSNRFSGSKSGNTASLTISGLQSEDEADYYCTSYGSYDIPVIFGGGTKVEIKTREQKLISEEDLAKPTTTPAPRPPTPAPTIASQPLSLRPEACRPAAGGAVHTRGLDFACDIYIWAPLAGTCGVLLLSLVITLYCKRGRKKLLYIFKQPFMRPVQTTQEEDGCSCRFPEEEEGGCELRVKFSRSADAPAYQQGQNQLYNELNLGRREEYDVLDKRRGRDPEMGGKPRRKNPQEGLYNELQKDKMAEAYSEIGMKGERRRGKGHDGLYQGLSTATKDTYDALHMQALPPR

SEQ ID NO: 19898 - protein, 920 aa, Artificial Sequence
  Synthetic Polypeptide
MALPVTALLLPLALLLHAARPQSALTQPRSVSGSPGQSVTISCTGTSSDVGSYNYVSWYQQSPGKAPKLMIYDVSNRPSGVSNRFSGSKSGNTASLTISGLQSEDEADYYCTSYGSYDIPVIFGGGTKVEIKGGGGSGGGGSGGGGSQMQLVQSGAEVKKPGSSVKVSCKASGGTFSSYAISWVRQAPGQGLEWMGGIIPIFGTANYAQKFQGRVTITADKSTSTAYMELSSLRSDDTAVYYCARDELWATNYYYMDVWGKGTLVTVSSTREQKLISEEDLAKPTTTPAPRPPTPAPTIASQPLSLRPEACRPAAGGAVHTRGLDFACDIYIWAPLAGTCGVLLLSLVITLYCGRARVKFSRSADAPAYQQGQNQLYNELNLGRREEYDVLDKRRGRDPEMGGKPRRKNPQEGLYNELQKDKMAEAYSEIGMKGERRRGKGHDGLYQGLSTATKDTYDALHMQALPPRSRGSGATNFSLLKQAGDVEENPGPGIHMATYEVLCEVARKLGTDDREVVLFLLNVFIPQPTLAQLIGALRALKEEGRLTFPLLAECLFRAGRRDLLRDLLHLDPRFLERHLAGTMSYFSPYQLTVLHVDGELCARDIRSLIFLSKDTIGSRSTPQTFLHWVYCMENLDLLGPTDVDALMSMLRSLSRVDLQRQVQTLMGLHLSGPSHSQHYRHTPLETDFYDYKDDDDKTSGSGEGRGSLLTCGDVEENPGPHMTEYKPTVRLATRDDVPRAVRTLAAAFADYPATRHTVDPDRHIERVTELQELFLTRVGLDIGKVWVADDGAAVAVWTTPESVEAGAVFAEIGPRMAELSGSRLAAQQQMEGLLAPHRPKEPAWFLATVGVSPDHQGKGLGSAVVLPGVEAAERAGVPAFLETSAPRNLPFYERLGFTVTADVEVPEGPRTWCMTRKPGA

SEQ ID NO: 19899 - protein, 860 aa, Artificial Sequence
  Synthetic Polypeptide
MALPVTALLLPLALLLHAARPQSALTQPRSVSGSPGQSVTISCTGTSSDVGSYNYVSWYQQSPGKAPKLMIYDVSNRPSGVSNRFSGSKSGNTASLTISGLQSEDEADYYCTSYGSYDIPVIFGGGTKVEIKLEIQNPDPAVYQLRDSKSSDKSVCLFTDFDSQTNVSQSKDSDVYITDKCVLDMRSMDFKSNSAVAWSNKSDFACANAFNNSIIPEDTFFPSSDVPCDVKLVEKSFETDTNLNFQNLSVIGFRILLLKVAGFNLLMTLRLWSSRAKRSGSGVKQTLNFDLLKLAGDVESNPGPTSMDWIWRILFLVGAATGAHSFEQMQLVQSGAEVKKPGSSVKVSCKASGGTFSSYAISWVRQAPGQGLEWMGGIIPIFGTANYAQKFQGRVTITADKSTSTAYMELSSLRSDDTAVYYCARDELWATNYYYMDVWGKGTLVTVSSTREDLKNVFPPEVAVFEPSKAEIAHTQKATLVCLATGFYPDHVELSWWVNGKEVHSGVCTDPQPLKEQPALNDSRYCLSSRLRVSATFWQNPRNHFRCQVQFYGLSENDEWTQDRAKPVTQIVSAEAWGRADCGITSASYHQGVLSATILYEILLGKATLYAVLVSALVLMAMVKRKDSRGRAKRSGSGATNFSLLKQAGDVEENPGPSRGHMTEYKPTVRLATRDDVPRAVRTLAAAFADYPATRHTVDPDRHIERVTELQELFLTRVGLDIGKVWVADDGAAVAVWTTPESVEAGAVFAEIGPRMAELSGSRLAAQQQMEGLLAPHRPKEPAWFLATVGVSPDHQGKGLGSAVVLPGVEAAERAGVPAFLETSAPRNLPFYERLGFTVTADVEVPEGPRTWCMTRKPGA

SEQ ID NO: 19900 - protein, 859 aa, Artificial Sequence
  Synthetic Polypeptide
MALPVTALLLPLALLLHAARPQSALTQPRSVSGSPGQSVTISCTGTSSDVGSYNYVSWYQQSPGKAPKLMIYDVSNRPSGVSNRFSGSKSGNTASLTISGLQSEDEADYYCTSYGSYDIPVIFGGGTKVEIKLEDLKNVFPPEVAVFEPSKAEIAHTQKATLVCLATGFYPDHVELSWWVNGKEVHSGVCTDPQPLKEQPALNDSRYCLSSRLRVSATFWQNPRNHFRCQVQFYGLSENDEWTQDRAKPVTQIVSAEAWGRADCGITSASYHQGVLSATILYEILLGKATLYAVLVSALVLMAMVKRKDSRGRAKRSGSGATNFSLLKQAGDVEENPGPTSMDWIWRILFLVGAATGAHSFEQMQLVQSGAEVKKPGSSVKVSCKASGGTFSSYAISWVRQAPGQGLEWMGGIIPIFGTANYAQKFQGRVTITADKSTSTAYMELSSLRSDDTAVYYCARDELWATNYYYMDVWGKGTLVTVSSTRIQNPDPAVYQLRDSKSSDKSVCLFTDFDSQTNVSQSKDSDVYITDKCVLDMRSMDFKSNSAVAWSNKSDFACANAFNNSIIPEDTFFPSSDVPCDVKLVEKSFETDTNLNFQNLSVIGFRILLLKVAGFNLLMTLRLWSSRAKRSGSGVKQTLNFDLLKLAGDVESNPGPSRGHMTEYKPTVRLATRDDVPRAVRTLAAAFADYPATRHTVDPDRHIERVTELQELFLTRVGLDIGKVWVADDGAAVAVWTTPESVEAGAVFAEIGPRMAELSGSRLAAQQQMEGLLAPHRPKEPAWFLATVGVSPDHQGKGLGSAVVLPGVEAAERAGVPAFLETSAPRNLPFYERLGFTVTADVEVPEGPRTWCMTRKPGA

SEQ ID NO: 19901 - protein, 626 aa, Artificial Sequence
  Synthetic Polypeptide
MALPVTALLLPLALLLHAARPQSALTQPRSVSGSPGQSVTISCTGTSSDVGSYNYVSWYQQSPGKAPKLMIYDVSNRPSGVSNRFSGSKSGNTASLTISGLQSEDEADYYCTSYGSYDIPVIFGGGTKVEIKLEDLKNVFPPEVAVFEPSEAEISHTQKATLVCLATGFYPDHVELSWWVNGKEVHSGVCTDPQPLKEQPALNDSRYCLSSRLRVSATFWQNPRNHFRCQVQFYGLSENDEWTQDRAKPVTQIVSAEAWGRADCGFTSESYQQGVLSATILYEILLGKATLYAVLVSALVLMAMVKRKDSRGRAKRSGSGATNFSLLKQAGDVEENPGPTSMDWIWRILFLVGAATGAHSFEQMQLVQSGAEVKKPGSSVKVSCKASGGTFSSYAISWVRQAPGQGLEWMGGIIPIFGTANYAQKFQGRVTITADKSTSTAYMELSSLRSDDTAVYYCARDELWATNYYYMDVWGKGTLVTVSSTRIQNPDPAVYQLRDSKSSDKSVCLFTDFDSQTNVSQSKDSDVYITDKCVLDMRSMDFKSNSAVAWSNKSDFACANAFNNSIIPEDTFFPSPESSCDVKLVEKSFETDTNLNFQNLSVIGFRILLLKVAGFNLLMTLRLWSS

SEQ ID NO: 19902 - protein, 851 aa, Artificial Sequence
  Synthetic Polypeptide
MALPVTALLLPLALLLHAARPQSALTQPRSVSGSPGQSVTISCTGTSSDVGSYNYVSWYQQSPGKAPKLMIYDVSNRPSGVSNRFSGSKSGNTASLTISGLQSEDEADYYCTSYGSYDIPVIFGGGTKVEIKLEDLKNVFPPEVAVFEPSEAEISHTQKATLVCLATGFYPDHVELSWWVNGKEVHSGVCTDPQPLKEQPALNDSRYCLSSRLRVSATFWQNPRNHFRCQVQFYGLSENDEWTQDRAKPVTQIVSAEAWGRADCGFTSESYQQGVLSATILYEILLGKATLYAVLVSALVLMAMVKRKDSRGRAKRSGSGATNFSLLKQAGDVEENPGPTSMDWIWRILFLVGAATGAHSFEQMQLVQSGAEVKKPGSSVKVSCKASGGTFSSYAISWVRQAPGQGLEWMGGIIPIFGTANYAQKFQGRVTITADKSTSTAYMELSSLRSDDTAVYYCARDELWATNYYYMDVWGKGTLVTVSSTRIQNPDPAVYQLRDSKSSDKSVCLFTDFDSQTNVSQSKDSDVYITDKCVLDMRSMDFKSNSAVAWSNKSDFACANAFNNSIIPEDTFFPSPESSCDVKLVEKSFETDTNLNFQNLSVIGFRILLLKVAGFNLLMTLRLWSSRAKRSGSGVKQTLNFDLLKLAGDVESNPGPSRGGIHTMATYEVLCEVARKLGTDDREVVLFLLNVFIPQPTLAQLIGALRALKEEGRLTFPLLAECLFRAGRRDLLRDLLHLDPRFLERHLAGTMSYFSPYQLTVLHVDGELCARDIRSLIFLSKDTIGSRSTPQTFLHWVYCMENLDLLGPTDVDALMSMLRSLSRVDLQRQVQTLMGLHLSGPSHSQHYRHTP

SEQ ID NO: 19903 - protein, 630 aa, Artificial Sequence
  Synthetic Polypeptide
MALPVTALLLPLALLLHAARPQSALTQPRSVSGSPGQSVTISCTGTSSDVGSYNYVSWYQQSPGKAPKLMIYDVSNRPSGVSNRFSGSKSGNTASLTISGLQSEDEADYYCTSYGSYDIPVIFGGGTKVEIKLEIQNPDPAVYQLRDSKSSDKSVCLFTDFDSQTNVSQSKDSDVYITDKCVLDMRSMDFKSNSAVAWSNKSDFACANAFNNSIIPEDTFFPSPESSCDVKLVEKSFETDTNLNFQNLSVIGFRILLLKVAGFNLLMTLRLWSSRAKRSGSGVKQTLNFDLLKLAGDVESNPGPTSMDWIWRILFLVGAATGAHSFEQMQLVQSGAEVKKPGSSVKVSCKASGGTFSSYAISWVRQAPGQGLEWMGGIIPIFGTANYAQKFQGRVTITADKSTSTAYMELSSLRSDDTAVYYCARDELWATNYYYMDVWGKGTLVTVSSTREDLKNVFPPEVAVFEPSEAEISHTQKATLVCLATGFYPDHVELSWWVNGKEVHSGVCTDPQPLKEQPALNDSRYCLSSRLRVSATFWQNPRNHFRCQVQFYGLSENDEWTQDRAKPVTQIVSAEAWGRADCGFTSESYQQGVLSATILYEILLGKATLYAVLVSALVLMAMVKRKDSRG

SEQ ID NO: 19904 - protein, 852 aa, Artificial Sequence
  Synthetic Polypeptide
MALPVTALLLPLALLLHAARPQSALTQPRSVSGSPGQSVTISCTGTSSDVGSYNYVSWYQQSPGKAPKLMIYDVSNRPSGVSNRFSGSKSGNTASLTISGLQSEDEADYYCTSYGSYDIPVIFGGGTKVEIKLEIQNPDPAVYQLRDSKSSDKSVCLFTDFDSQTNVSQSKDSDVYITDKCVLDMRSMDFKSNSAVAWSNKSDFACANAFNNSIIPEDTFFPSPESSCDVKLVEKSFETDTNLNFQNLSVIGFRILLLKVAGFNLLMTLRLWSSRAKRSGSGVKQTLNFDLLKLAGDVESNPGPTSMDWIWRILFLVGAATGAHSFEQMQLVQSGAEVKKPGSSVKVSCKASGGTFSSYAISWVRQAPGQGLEWMGGIIPIFGTANYAQKFQGRVTITADKSTSTAYMELSSLRSDDTAVYYCARDELWATNYYYMDVWGKGTLVTVSSTREDLKNVFPPEVAVFEPSEAEISHTQKATLVCLATGFYPDHVELSWWVNGKEVHSGVCTDPQPLKEQPALNDSRYCLSSRLRVSATFWQNPRNHFRCQVQFYGLSENDEWTQDRAKPVTQIVSAEAWGRADCGFTSESYQQGVLSATILYEILLGKATLYAVLVSALVLMAMVKRKDSRGRAKRSGSGATNFSLLKQAGDVEENPGPSRGGIHTMATYEVLCEVARKLGTDDREVVLFLLNVFIPQPTLAQLIGALRALKEEGRLTFPLLAECLFRAGRRDLLRDLLHLDPRFLERHLAGTMSYFSPYQLTVLHVDGELCARDIRSLIFLSKDTIGSRSTPQTFLHWVYCMENLDLLGPTDVDALMSMLRSLSRVDLQRQVQTLMGLHLSGPSHSQHYRHTP

SEQ ID NO: 19905 - protein, 904 aa, Artificial Sequence
  Synthetic Polypeptide
MALPVTALLLPLALLLHAARPLEGKPIPNPLLGLDSTGSGEDLKNVFPPEVAVFEPSKAEIAHTQKATLVCLATGFYPDHVELSWWVNGKEVHSGVCTDPQPLKEQPALNDSRYCLSSRLRVSATFWQNPRNHFRCQVQFYGLSENDEWTQDRAKPVTQIVSAEAWGRADCGITSASYHQGVLSATILYEILLGKATLYAVLVSALVLMAMVKRKDSRGRAKRSGSGATNFSLLKQAGDVEENPGPTSMALPVTALLLPLALLLHAARPQSALTQPRSVSGSPGQSVTISCTGTSSDVGSYNYVSWYQQSPGKAPKLMIYDVSNRPSGVSNRFSGSKSGNTASLTISGLQSEDEADYYCTSYGSYDIPVIFGGGTKVEIKGGGGSGGGGSGGGGSQMQLVQSGAEVKKPGSSVKVSCKASGGTFSSYAISWVRQAPGQGLEWMGGIIPIFGTANYAQKFQGRVTITADKSTSTAYMELSSLRSDDTAVYYCARDELWATNYYYMDVWGKGTLVTVSSTREQKLISEEDGSGIQNPDPAVYQLRDSKSSDKSVCLFTDFDSQTNVSQSKDSDVYITDKCVLDMRSMDFKSNSAVAWSNKSDFACANAFNNSIIPEDTFFPSSDVPCDVKLVEKSFETDTNLNFQNLSVIGFRILLLKVAGFNLLMTLRLWSSRAKRSGSGVKQTLNFDLLKLAGDVESNPGPSRGHMTEYKPTVRLATRDDVPRAVRTLAAAFADYPATRHTVDPDRHIERVTELQELFLTRVGLDIGKVWVADDGAAVAVWTTPESVEAGAVFAEIGPRMAELSGSRLAAQQQMEGLLAPHRPKEPAWFLATVGVSPDHQGKGLGSAVVLPGVEAAERAGVPAFLETSAPRNLPFYERLGFTVTADVEVPEGPRTWCMTRKPGA

SEQ ID NO: 19906 - protein, 905 aa, Artificial Sequence
  Synthetic Polypeptide
MALPVTALLLPLALLLHAARPLEQKLISEEDLGSGDRPDPAVYQLRDSKSSDKSVCLFTDFDSQTNVSQSKDSDVYITDKCVLDMRSMDFKSNSAVAWSNKSDFACANAFNNSIIPEDTFFPSPESSCDVKLVEKSFETDTNLNFQNLSVIGFRILLLKVAGFNLLMTLRLWSSSSRAKRSGSGVKQTLNFDLLKLAGDVESNPGPTSMALPVTALLLPLALLLHAARPQSALTQPRSVSGSPGQSVTISCTGTSSDVGSYNYVSWYQQSPGKAPKLMIYDVSNRPSGVSNRFSGSKSGNTASLTISGLQSEDEADYYCTSYGSYDIPVIFGGGTKVEIKGGGGSGGGGSGGGGSQMQLVQSGAEVKKPGSSVKVSCKASGGTFSSYAISWVRQAPGQGLEWMGGIIPIFGTANYAQKFQGRVTITADKSTSTAYMELSSLRSDDTAVYYCARDELWATNYYYMDVWGKGTLVTVSSTRGKPIPNPLLGLDSTGSGEDLKNVFPPEVAVFEPSEAEISHTQKATLVCLATGFYPDHVELSWWVNGKEVHSGVCTDPQPLKEQPALNDSRYCLSSRLRVSATFWQNPRNHFRCQVQFYGLSENDEWTQDRAKPVTQIVSAEAWGRADCGFTSESYQQGVLSATILYEILLGKATLYAVLVSALVLMAMVKRKDSRGRAKRSGSGATNFSLLKQAGDVEENPGPSRGHMTEYKPTVRLATRDDVPRAVRTLAAAFADYPATRHTVDPDRHIERVTELQELFLTRVGLDIGKVWVADDGAAVAVWTTPESVEAGAVFAEIGPRMAELSGSRLAAQQQMEGLLAPHRPKEPAWFLATVGVSPDHQGKGLGSAVVLPGVEAAERAGVPAFLETSAPRNLPFYERLGFTVTADVEVPEGPRTWCMTRKPGA

SEQ ID NO: 19907 - protein, 859 aa, Artificial Sequence
  Synthetic Polypeptide
MALPVTALLLPLALLLHAARPQSALTQPRSVSGSPGQSVTISCTGTSSDVGSYNYVSWYQQSPGKAPKLMIYDVSNRPSGVSNRFSGSKSGNTASLTISGLQSEDEADYYCTSYGSYDIPVIFGGGTKVEIKLEDLKNVFPPEVAVFEPSEAEISHTQKATLVCLATGFYPDHVELSWWVNGKEVHSGVSTDPQPLKEQPALNDSRYCLSSRLRVSATFWQNPRNHFRCQVQFYGLSENDEWTQDRAKPVTQIVSAEAWGRADCGFTSESYQQGVLSATILYEILLGKATLYAVLVSALVLMAMVKRKDSRGRAKRSGSGATNFSLLKQAGDVEENPGPTSMDWIWRILFLVGAATGAHSFEQMQLVQSGAEVKKPGSSVKVSCKASGGTFSSYAISWVRQAPGQGLEWMGGIIPIFGTANYAQKFQGRVTITADKSTSTAYMELSSLRSDDTAVYYCARDELWATNYYYMDVWGKGTLVTVSSTRIQNPDPAVYQLRDSKSSDKSVCLFTDFDSQTNVSQSKDSDVYITDKTVLDMRSMDFKSNSAVAWSNKSDFACANAFNNSIIPEDTFFPSPESSCDVKLVEKSFETDTNLNFQNLSVIGFRILLLKVAGFNLLMTLRLWSSRAKRSGSGVKQTLNFDLLKLAGDVESNPGPSRGHMTEYKPTVRLATRDDVPRAVRTLAAAFADYPATRHTVDPDRHIERVTELQELFLTRVGLDIGKVWVADDGAAVAVWTTPESVEAGAVFAEIGPRMAELSGSRLAAQQQMEGLLAPHRPKEPAWFLATVGVSPDHQGKGLGSAVVLPGVEAAERAGVPAFLETSAPRNLPFYERLGFTVTADVEVPEGPRTWCMTRKPGA

SEQ ID NO: 19908 - protein, 941 aa, Artificial Sequence
  Synthetic Polypeptide
MALPVTALLLPLALLLHAARPQSALTQPRSVSGSPGQSVTISCTGTSSDVGSYNYVSWYQQSPGKAPKLMIYDVSNRPSGVSNRFSGSKSGNTASLTISGLQSEDEADYYCTSYGSYDIPVIFGGGTKVEIKLEDLKNVFPPEVAVFEPSEAEISHTQKATLVCLATGFYPDHVELSWWVNGKEVHSGVSTDPQPLKEQPALNDSRYCLSSRLRVSATFWQNPRNHFRCQVQFYGLSENDEWTQDRAKPVTQIVSAEAWGRADCGFTSESYQQGVLSATILYEILLGKATLYAVLVSALVLMAMVKRKDSRGRAKRSGSGATNFSLLKQAGDVEENPGPTSMDWIWRILFLVGAATGAHSFEQMQLVQSGAEVKKPGSSVKVSCKASGGTFSSYAISWVRQAPGQGLEWMGGIIPIFGTANYAQKFQGRVTITADKSTSTAYMELSSLRSDDTAVYYCARDELWATNYYYMDVWGKGTLVTVSSTREQKLISEEDGSGTPFPSLAPPIMLLVDGKQQMVVVCLVLDVAPPGLDSPIWFSAGNGSALDAFTYGPSPATDGTWTNLAHLSLPSEELASWEPLVCHTGPGAEGHSRSTQPMHLSGEASTARTCPQEPLRGTPGGALWLGVLRLLLFKLLLFDLLLTCSCLCDPAGPLPSPATTTRLRALGSHRLHPATETGGREATSSPRPQPRDRRWGDTPPGRKPGSPVRAKRSGSGVKQTLNFDLLKLAGDVESNPGPSRGHMTEYKPTVRLATRDDVPRAVRTLAAAFADYPATRHTVDPDRHIERVTELQELFLTRVGLDIGKVWVADDGAAVAVWTTPESVEAGAVFAEIGPRMAELSGSRLAAQQQMEGLLAPHRPKEPAWFLATVGVSPDHQGKGLGSAVVLPGVEAAERAGVPAFLETSAPRNLPFYERLGFTVTADVEVPEGPRTWCMTRKPGA

SEQ ID NO: 19909 - protein, 959 aa, Artificial Sequence
  Synthetic Polypeptide
MALPVTALLLPLALLLHAARPLEDLKNVFPPEVAVFEPSEAEISHTQKATLVCLATGFYPDHVELSWWVNGKEVHSGVSTDPQPLKEQPALNDSRYCLSSRLRVSATFWQNPRNHFRCQVQFYGLSENDEWTQDRAKPVTQIVSAEAWGRADCGFTSESYQQGVLSATILYEILLGKATLYAVLVSALVLMAMVKRKDSRGRAKRSGSGATNFSLLKQAGDVEENPGPTSMALPVTALLLPLALLLHAARPQSALTQPRSVSGSPGQSVTISCTGTSSDVGSYNYVSWYQQSPGKAPKLMIYDVSNRPSGVSNRFSGSKSGNTASLTISGLQSEDEADYYCTSYGSYDIPVIFGGGTKVEIKGGGGSGGGGSGGGGSQMQLVQSGAEVKKPGSSVKVSCKASGGTFSSYAISWVRQAPGQGLEWMGGIIPIFGTANYAQKFQGRVTITADKSTSTAYMELSSLRSDDTAVYYCARDELWATNYYYMDVWGKGTLVTVSSTREQKLISEEDLGSGTPFPSLAPPIMLLVDGKQQMVVVCLVLDVAPPGLDSPIWFSAGNGSALDAFTYGPSPATDGTWTNLAHLSLPSEELASWEPLVCHTGPGAEGHSRSTQPMHLSGEASTARTCPQEPLRGTPGGALWLGVLRLLLFKLLLFDLLLTCSCLCDPAGPLPSPATTTRLRALGSHRLHPATETGGREATSSPRPQPRDRRWGDTPPGRKPGSPVRAKRSGSGVKQTLNFDLLKLAGDVESNPGPSRSRGHMTEYKPTVRLATRDDVPRAVRTLAAAFADYPATRHTVDPDRHIERVTELQELFLTRVGLDIGKVWVADDGAAVAVWTTPESVEAGAVFAEIGPRMAELSGSRLAAQQQMEGLLAPHRPKEPAWFLATVGVSPDHQGKGLGSAVVLPGVEAAERAGVPAFLETSAPRNLPFYERLGFTVTADVEVPEGPRTWCMTRKPGA

SEQ ID NO: 19910 - protein, 896 aa, Artificial Sequence
  Synthetic Polypeptide
MALPVTALLLPLALLLHAARPQSALTQPRSVSGSPGQSVTISCTGTSSDVGSYNYVSWYQQSPGKAPKLMIYDVSNRPSGVSNRFSGSKSGNTASLTISGLQSEDEADYYCTSYGSYDIPVIFGGGTKVEIKLEGKPIPNPLLGLDSTGSGDKQLDADVSPKPTIFLPSIAETKLQKAGTYLCLLEKFFPDVIKIHWQEKKSNTILGSQEGNTMKTNDTYMKFSWLTVPEKSLDKEHRCIVRHENNKNGVDQEIIFPPIKTDVITMDPKDNCSKDANDTLLLQLTNTSAYYMYLLLLLKSVVYFAIITCCLLRRTAFCCNGEKSRAKRSGSGATNFSLLKQAGDVEENPGPTSMDWIWRILFLVGAATGAHSFEQMQLVQSGAEVKKPGSSVKVSCKASGGTFSSYAISWVRQAPGQGLEWMGGIIPIFGTANYAQKFQGRVTITADKSTSTAYMELSSLRSDDTAVYYCARDELWATNYYYMDVWGKGTLVTVSSTREQKLISEEDGSGSQPHTKPSVFVMKNGTNVACLVKEFYPKDIRINLVSSKKITEFDPAIVISPSGKYNAVKLGKYEDSNSVTCSVQHDNKTVHSTDFEVKTDSTDHVKPKETENTKQPSKSCHKPKAIVHTEKVNMMSLTVLGLRMLFAKTVAVNFLLTAKLFFLRAKRSGSGVKQTLNFDLLKLAGDVESNPGPSRGHMTEYKPTVRLATRDDVPRAVRTLAAAFADYPATRHTVDPDRHIERVTELQELFLTRVGLDIGKVWVADDGAAVAVWTTPESVEAGAVFAEIGPRMAELSGSRLAAQQQMEGLLAPHRPKEPAWFLATVGVSPDHQGKGLGSAVVLPGVEAAERAGVPAFLETSAPRNLPFYERLGFTVTADVEVPEGPRTWCMTRKPGA

SEQ ID NO: 19911 - protein, 634 aa, Artificial Sequence
  Synthetic Polypeptide
MALPVTALLLPLALLLHAARPQSALTQPRSVSGSPGQSVTISCTGTSSDVGSYNYVSWYQQSPGKAPKLMIYDVSNRPSGVSNRFSGSKSGNTASLTISGLQSEDEADYYCTSYGSYDIPVIFGGGTKVEIKLESQPHTKPSVFVMKNGTNVACLVKEFYPKDIRINLVSSKKITEFDPAIVISPSGKYNAVKLGKYEDSNSVTCSVQHDNKTVHSTDFEVKTDSTDHVKPKETENTKQPSKSCHKPKAIVHTEKVNMMSLTVLGLRMLFAKTVAVNFLLTAKLFFLRAKRSGSGATNFSLLKQAGDVEENPGPTSMDWIWRILFLVGAATGAHSFEQMQLVQSGAEVKKPGSSVKVSCKASGGTFSSYAISWVRQAPGQGLEWMGGIIPIFGTANYAQKFQGRVTITADKSTSTAYMELSSLRSDDTAVYYCARDELWATNYYYMDVWGKGTLVTVSSTRDKQLDADVSPKPTIFLPSIAETKLQKAGTYLCLLEKFFPDVIKIHWQEKKSNTILGSQEGNTMKTNDTYMKFSWLTVPEKSLDKEHRCIVRHENNKNGVDQEIIFPPIKTDVITMDPKDNCSKDANDTLLLQLTNTSAYYMYLLLLLKSVVYFAIITCCLLRRTAFCCNGEKS

SEQ ID NO: 19912 - protein, 911 aa, Artificial Sequence
  Synthetic Polypeptide
MALPVTALLLPLALLLHAARPLEGKPIPNPLLGLDSTGSGDKQLDADVSPKPTIFLPSIAETKLQKAGTYLCLLEKFFPDVIKIHWQEKKSNTILGSQEGNTMKTNDTYMKFSWLTVPEKSLDKEHRCIVRHENNKNGVDQEIIFPPIKTDVITMDPKDNCSKDANDTLLLQLTNTSAYYMYLLLLLKSVVYFAIITCCLLRRTAFCCNGEKSRAKRSGSGATNFSLLKQAGDVEENPGPTSMALPVTALLLPLALLLHAARPQSALTQPRSVSGSPGQSVTISCTGTSSDVGSYNYVSWYQQSPGKAPKLMIYDVSNRPSGVSNRFSGSKSGNTASLTISGLQSEDEADYYCTSYGSYDIPVIFGGGTKVEIKGGGGSGGGGSGGGGSQMQLVQSGAEVKKPGSSVKVSCKASGGTFSSYAISWVRQAPGQGLEWMGGIIPIFGTANYAQKFQGRVTITADKSTSTAYMELSSLRSDDTAVYYCARDELWATNYYYMDVWGKGTLVTVSSTREQKLISEEDGSGSQPHTKPSVFVMKNGTNVACLVKEFYPKDIRINLVSSKKITEFDPAIVISPSGKYNAVKLGKYEDSNSVTCSVQHDNKTVHSTDFEVKTDSTDHVKPKETENTKQPSKSCHKPKAIVHTEKVNMMSLTVLGLRMLFAKTVAVNFLLTAKLFFLRAKRSGSGVKQTLNFDLLKLAGDVESNPGPSRGHMTEYKPTVRLATRDDVPRAVRTLAAAFADYPATRHTVDPDRHIERVTELQELFLTRVGLDIGKVWVADDGAAVAVWTTPESVEAGAVFAEIGPRMAELSGSRLAAQQQMEGLLAPHRPKEPAWFLATVGVSPDHQGKGLGSAVVLPGVEAAERAGVPAFLETSAPRNLPFYERLGFTVTADVEVPEGPRTWCMTRKPGA

SEQ ID NO: 19913 - protein, 1036 aa, Artificial Sequence
  Synthetic Polypeptide
MALPVTALLLPLALLLHAARPQSALTQPRSVSGSPGQSVTISCTGTSSDVGSYNYVSWYQQSPGKAPKLMIYDVSNRPSGVSNRFSGSKSGNTASLTISGLQSEDEADYYCTSYGSYDIPVIFGGGTKVEIKGQPKANPTVTLFPPSSEELQANKATLVCLISDFYPGAVTVAWKADGSPVKAGVETTKPSKQSNNKYAASSYLSLTPEQWKSHRSYSCQVTHEGSTVEKTVAPTECSGSQSFGLLDPKLCYLLDGILFIYGVILTALFLRVKFSRSADAPAYQQGQNQLYNELNLGRREEYDVLDKRRGRDPEMGGKPQRRKNPQEGLYNELQKDKMAEAYSEIGMKGERRRGKGHDGLYQGLSTATKDTYDALHMQALPPRRAKRSGSGATNFSLLKQAGDVEENPGPTSMDWIWRILFLVGAATGAHSFEQMQLVQSGAEVKKPGSSVKVSCKASGGTFSSYAISWVRQAPGQGLEWMGGIIPIFGTANYAQKFQGRVTITADKSTSTAYMELSSLRSDDTAVYYCARDELWATNYYYMDVWGKGTLVTVSSASTKGPSVFPLAPSSKSTSGGTAALGCLVKDYFPEPVTVSWNSGALTSGVHTFPAVLQSSGLYSLSSVVTVPSSSLGTQTYICNVNHKPSNTKVDKRVEPKSCGTQSFGLLDPKLCYLLDGILFIYGVILTALFLRVKFSRSADAPAYQQGQNQLYNELNLGRREEYDVLDKRRGRDPEMGGKPQRRKNPQEGLYNELQKDKMAEAYSEIGMKGERRRGKGHDGLYQGLSTATKDTYDALHMQALPPRRAKRSGSGVKQTLNFDLLKLAGDVESNPGPSRGHMTEYKPTVRLATRDDVPRAVRTLAAAFADYPATRHTVDPDRHIERVTELQELFLTRVGLDIGKVWVADDGAAVAVWTTPESVEAGAVFAEIGPRMAELSGSRLAAQQQMEGLLAPHRPKEPAWFLATVGVSPDHQGKGLGSAVVLPGVEAAERAGVPAFLETSAPRNLPFYERLGFTVTADVEVPEGPRTWCMTRKPGA

SEQ ID NO: 19914 - protein, 822 aa, Artificial Sequence
  Synthetic Polypeptide
MALPVTALLLPLALLLHAARPQSALTQPRSVSGSPGQSVTISCTGTSSDVGSYNYVSWYQQSPGKAPKLMIYDVSNRPSGVSNRFSGSKSGNTASLTISGLQSEDEADYYCTSYGSYDIPVIFGGGTKVEIKLEDLKNVFPPEVAVFEPSEAEISHTQKATLVCLATGFYPDHVELSWWVNGKEVHSGVSTDPQPLKEQPALNDSRYCLSSRLRVSATFWQNPRNHFRCQVQFYGLSENDEWTQDRAKPVTQIVSAEAWGRADCGSQSFGLLDPKLCYLLDGILFIYGVILTALFLRVKFSRSADAPAYQQGQNQLYNELNLGRREEYDVLDKRRGRDPEMGGKPQRRKNPQEGLYNELQKDKMAEAYSEIGMKGERRRGKGHDGLYQGLSTATKDTYDALHMQALPPRRAKRSGSGATNFSLLKQAGDVEENPGPTSMDWIWRILFLVGAATGAHSFEQMQLVQSGAEVKKPGSSVKVSCKASGGTFSSYAISWVRQAPGQGLEWMGGIIPIFGTANYAQKFQGRVTITADKSTSTAYMELSSLRSDDTAVYYCARDELWATNYYYMDVWGKGTLVTVSSTRIQNPDPAVYQLRDSKSSDKSVCLFTDFDSQTNVSQSKDSDVYITDKTVLDMRSMDFKSNSAVAWSNKSDFACANAFNNSIIPEDTFFPSPESSCGTQSFGLLDPKLCYLLDGILFIYGVILTALFLRVKFSRSADAPAYQQGQNQLYNELNLGRREEYDVLDKRRGRDPEMGGKPQRRKNPQEGLYNELQKDKMAEAYSEIGMKGERRRGKGHDGLYQGLSTATKDTYDALHMQALPPR

SEQ ID NO: 19915 - protein, 822 aa, Artificial Sequence
  Synthetic Polypeptide
MALPVTALLLPLALLLHAARPQSALTQPRSVSGSPGQSVTISCTGTSSDVGSYNYVSWYQQSPGKAPKLMIYDVSNRPSGVSNRFSGSKSGNTASLTISGLQSEDEADYYCTSYGSYDIPVIFGGGTKVEIKLEDLKNVFPPEVAVFEPSKAEIAHTQKATLVCLATGFYPDHVELSWWVNGKEVHSGVCTDPQPLKEQPALNDSRYCLSSRLRVSATFWQNPRNHFRCQVQFYGLSENDEWTQDRAKPVTQIVSAEAWGRADCGSQSFGLLDPKLCYLLDGILFIYGVILTALFLRVKFSRSADAPAYQQGQNQLYNELNLGRREEYDVLDKRRGRDPEMGGKPQRRKNPQEGLYNELQKDKMAEAYSEIGMKGERRRGKGHDGLYQGLSTATKDTYDALHMQALPPRRAKRSGSGATNFSLLKQAGDVEENPGPTSMDWIWRILFLVGAATGAHSFEQMQLVQSGAEVKKPGSSVKVSCKASGGTFSSYAISWVRQAPGQGLEWMGGIIPIFGTANYAQKFQGRVTITADKSTSTAYMELSSLRSDDTAVYYCARDELWATNYYYMDVWGKGTLVTVSSTRIQNPDPAVYQLRDSKSSDKSVCLFTDFDSQTNVSQSKDSDVYITDKCVLDMRSMDFKSNSAVAWSNKSDFACANAFNNSIIPEDTFFPSSDVPCGTQSFGLLDPKLCYLLDGILFIYGVILTALFLRVKFSRSADAPAYQQGQNQLYNELNLGRREEYDVLDKRRGRDPEMGGKPQRRKNPQEGLYNELQKDKMAEAYSEIGMKGERRRGKGHDGLYQGLSTATKDTYDALHMQALPPR

SEQ ID NO: 19916 - protein, 893 aa, Artificial Sequence
  Synthetic Polypeptide
MALPVTALLLPLALLLHAARPQSALTQPRSVSGSPGQSVTISCTGTSSDVGSYNYVSWYQQSPGKAPKLMIYDVSNRPSGVSNRFSGSKSGNTASLTISGLQSEDEADYYCTSYGSYDIPVIFGGGTKVEIKLEGKPIPNPLLGLDSTGSGEDLKNVFPPEVAVFEPSEAEISHTQKATLVCLATGFYPDHVELSWWVNGKEVHSGVSTDPQPLKEQPALNDSRYCLSSRLRVSATFWQNPRNHFRCQVQFYGLSENDEWTQDRAKPVTQIVSAEAWGRADCGSQSFGLLDPKLCYLLDGILFIYGVILTALFLRVKFSRSADAPAYQQGQNQLYNELNLGRREEYDVLDKRRGRDPEMGGKPQRRKNPQEGLYNELQKDKMAEAYSEIGMKGERRRGKGHDGLYQGLSTATKDTYDALHMQALPPRRAKRSGSGATNFSLLKQAGDVEENPGPTSMDWIWRILFLVGAATGAHSFEQMQLVQSGAEVKKPGSSVKVSCKASGGTFSSYAISWVRQAPGQGLEWMGGIIPIFGTANYAQKFQGRVTITADKSTSTAYMELSSLRSDDTAVYYCARDELWATNYYYMDVWGKGTLVTVSSTREQKLISEEDGSGIQNPDPAVYQLRDSKSSDKSVCLFTDFDSQTNVSQSKDSDVYITDKTVLDMRSMDFKSNSAVAWSNKSDFACANAFNNSIIPEDTFFPSPESSCGTQSFGLLDPKLCYLLDGILFIYGVILTALFLRSKRSRLLHSDYMNMTPRRPGPTRKHYQPYAPPRDFAAYRSRVKFSRSADAPAYQQGQNQLYNELNLGRREEYDVLDKRRGRDPEMGGKPQRRKNPQEGLYNELQKDKMAEAYSEIGMKGERRRGKGHDGLYQGLSTATKDTYDALHMQALPPR

SEQ ID NO: 19917 - protein, 934 aa, Artificial Sequence
  Synthetic Polypeptide
MALPVTALLLPLALLLHAARPQSALTQPRSVSGSPGQSVTISCTGTSSDVGSYNYVSWYQQSPGKAPKLMIYDVSNRPSGVSNRFSGSKSGNTASLTISGLQSEDEADYYCTSYGSYDIPVIFGGGTKVEIKLEGKPIPNPLLGLDSTGSGEDLKNVFPPEVAVFEPSEAEISHTQKATLVCLATGFYPDHVELSWWVNGKEVHSGVSTDPQPLKEQPALNDSRYCLSSRLRVSATFWQNPRNHFRCQVQFYGLSENDEWTQDRAKPVTQIVSAEAWGRADCGSQSFGLLDPKLCYLLDGILFIYGVILTALFLRSKRSRLLHSDYMNMTPRRPGPTRKHYQPYAPPRDFAAYRSRVKFSRSADAPAYQQGQNQLYNELNLGRREEYDVLDKRRGRDPEMGGKPQRRKNPQEGLYNELQKDKMAEAYSEIGMKGERRRGKGHDGLYQGLSTATKDTYDALHMQALPPRRAKRSGSGATNFSLLKQAGDVEENPGPTSMDWIWRILFLVGAATGAHSFEQMQLVQSGAEVKKPGSSVKVSCKASGGTFSSYAISWVRQAPGQGLEWMGGIIPIFGTANYAQKFQGRVTITADKSTSTAYMELSSLRSDDTAVYYCARDELWATNYYYMDVWGKGTLVTVSSTREQKLISEEDGSGIQNPDPAVYQLRDSKSSDKSVCLFTDFDSQTNVSQSKDSDVYITDKTVLDMRSMDFKSNSAVAWSNKSDFACANAFNNSIIPEDTFFPSPESSCGTQSFGLLDPKLCYLLDGILFIYGVILTALFLRSKRSRLLHSDYMNMTPRRPGPTRKHYQPYAPPRDFAAYRSRVKFSRSADAPAYQQGQNQLYNELNLGRREEYDVLDKRRGRDPEMGGKPQRRKNPQEGLYNELQKDKMAEAYSEIGMKGERRRGKGHDGLYQGLSTATKDTYDALHMQALPPR

SEQ ID NO: 19918 - protein, 895 aa, Artificial Sequence
  Synthetic Polypeptide
MALPVTALLLPLALLLHAARPQSALTQPRSVSGSPGQSVTISCTGTSSDVGSYNYVSWYQQSPGKAPKLMIYDVSNRPSGVSNRFSGSKSGNTASLTISGLQSEDEADYYCTSYGSYDIPVIFGGGTKVEIKLEGKPIPNPLLGLDSTGSGEDLKNVFPPEVAVFEPSEAEISHTQKATLVCLATGFYPDHVELSWWVNGKEVHSGVSTDPQPLKEQPALNDSRYCLSSRLRVSATFWQNPRNHFRCQVQFYGLSENDEWTQDRAKPVTQIVSAEAWGRADCGSQSFGLLDPKLCYLLDGILFIYGVILTALFLRVKFSRSADAPAYQQGQNQLYNELNLGRREEYDVLDKRRGRDPEMGGKPQRRKNPQEGLYNELQKDKMAEAYSEIGMKGERRRGKGHDGLYQGLSTATKDTYDALHMQALPPRRAKRSGSGATNFSLLKQAGDVEENPGPTSMDWIWRILFLVGAATGAHSFEQMQLVQSGAEVKKPGSSVKVSCKASGGTFSSYAISWVRQAPGQGLEWMGGIIPIFGTANYAQKFQGRVTITADKSTSTAYMELSSLRSDDTAVYYCARDELWATNYYYMDVWGKGTLVTVSSTREQKLISEEDLGSGIQNPDPAVYQLRDSKSSDKSVCLFTDFDSQTNVSQSKDSDVYITDKTVLDMRSMDFKSNSAVAWSNKSDFACANAFNNSIIPEDTFFPSPESSCGTQSFGLLDPKLCYLLDGILFIYGVILTALFLKRGRKKLLYIFKQPFMRPVQTTQEEDGCSCRFPEEEEGGCELRVKFSRSADAPAYQQGQNQLYNELNLGRREEYDVLDKRRGRDPEMGGKPQRRKNPQEGLYNELQKDKMAEAYSEIGMKGERRRGKGHDGLYQGLSTATKDTYDALHMQALPPR

SEQ ID NO: 19919 - protein, 937 aa, Artificial Sequence
  Synthetic Polypeptide
MALPVTALLLPLALLLHAARPQSALTQPRSVSGSPGQSVTISCTGTSSDVGSYNYVSWYQQSPGKAPKLMIYDVSNRPSGVSNRFSGSKSGNTASLTISGLQSEDEADYYCTSYGSYDIPVIFGGGTKVEIKLEGKPIPNPLLGLDSTGSGEDLKNVFPPEVAVFEPSEAEISHTQKATLVCLATGFYPDHVELSWWVNGKEVHSGVSTDPQPLKEQPALNDSRYCLSSRLRVSATFWQNPRNHFRCQVQFYGLSENDEWTQDRAKPVTQIVSAEAWGRADCGSQSFGLLDPKLCYLLDGILFIYGVILTALFLKRGRKKLLYIFKQPFMRPVQTTQEEDGCSCRFPEEEEGGCELRVKFSRSADAPAYQQGQNQLYNELNLGRREEYDVLDKRRGRDPEMGGKPQRRKNPQEGLYNELQKDKMAEAYSEIGMKGERRRGKGHDGLYQGLSTATKDTYDALHMQALPPRRAKRSGSGATNFSLLKQAGDVEENPGPTSMDWIWRILFLVGAATGAHSFEQMQLVQSGAEVKKPGSSVKVSCKASGGTFSSYAISWVRQAPGQGLEWMGGIIPIFGTANYAQKFQGRVTITADKSTSTAYMELSSLRSDDTAVYYCARDELWATNYYYMDVWGKGTLVTVSSTREQKLISEEDLGSGIQNPDPAVYQLRDSKSSDKSVCLFTDFDSQTNVSQSKDSDVYITDKTVLDMRSMDFKSNSAVAWSNKSDFACANAFNNSIIPEDTFFPSPESSCGTQSFGLLDPKLCYLLDGILFIYGVILTALFLKRGRKKLLYIFKQPFMRPVQTTQEEDGCSCRFPEEEEGGCELRVKFSRSADAPAYQQGQNQLYNELNLGRREEYDVLDKRRGRDPEMGGKPQRRKNPQEGLYNELQKDKMAEAYSEIGMKGERRRGKGHDGLYQGLSTATKDTYDALHMQALPPR

SEQ ID NO: 19920 - protein, 827 aa, Artificial Sequence
  Synthetic Polypeptide
MALPVTALLLPLALLLHAARPQSALTQPRSVSGSPGQSVTISCTGTSSDVGSYNYVSWYQQSPGKAPKLMIYDVSNRPSGVSNRFSGSKSGNTASLTISGLQSEDEADYYCTSYGSYDIPVIFGGGTKVEIKLEQSFGLLDPKLCYLLDGILFIYGVILTALFLRVKFSRSADAPAYQQGQNQLYNELNLGRREEYDVLDKRRGRDPEMGGKPQRRKNPQEGLYNELQKDKMAEAYSEIGMKGERRRGKGHDGLYQGLSTATKDTYDALHMQALPPRRAKRSGSGATNFSLLKQAGDVEENPGPTSMDWIWRILFLVGAATGAHSFEQMQLVQSGAEVKKPGSSVKVSCKASGGTFSSYAISWVRQAPGQGLEWMGGIIPIFGTANYAQKFQGRVTITADKSTSTAYMELSSLRSDDTAVYYCARDELWATNYYYMDVWGKGTLVTVSSTRQSFGLLDPKLCYLLDGILFIYGVILTALFLRVKFSRSADAPAYQQGQNQLYNELNLGRREEYDVLDKRRGRDPEMGGKPQRRKNPQEGLYNELQKDKMAEAYSEIGMKGERRRGKGHDGLYQGLSTATKDTYDALHMQALPPRRAKRSGSGVKQTLNFDLLKLAGDVESNPGPSRGHMTEYKPTVRLATRDDVPRAVRTLAAAFADYPATRHTVDPDRHIERVTELQELFLTRVGLDIGKVWVADDGAAVAVWTTPESVEAGAVFAEIGPRMAELSGSRLAAQQQMEGLLAPHRPKEPAWFLATVGVSPDHQGKGLGSAVVLPGVEAAERAGVPAFLETSAPRNLPFYERLGFTVTADVEVPEGPRTWCMTRKPGA

SEQ ID NO: 19921 - protein, 652 aa, Artificial Sequence
  Synthetic Polypeptide
MALPVTALLLPLALLLHAARPQSALTQPRSVSGSPGQSVTISCTGTSSDVGSYNYVSWYQQSPGKAPKLMIYDVSNRPSGVSNRFSGSKSGNTASLTISGLQSEDEADYYCTSYGSYDIPVIFGGGTKVEIKLEGQPKANPTVTLFPPSSEELQANKATLVCLISDFYPGAVTVAWKADGSPVKAGVETTKPSKQSNNKYAASSYLSLTPEQWKSHRSYSCQVTHEGSTVEKTVAPTECSPIKTDVITMDPKDNCSKDANDTLLLQLTNTSAYYMYLLLLLKSVVYFAIITCCLLRRTAFCCNGEKSRAKRSGSGATNFSLLKQAGDVEENPGPTSMDWIWRILFLVGAATGAHSFEQMQLVQSGAEVKKPGSSVKVSCKASGGTFSSYAISWVRQAPGQGLEWMGGIIPIFGTANYAQKFQGRVTITADKSTSTAYMELSSLRSDDTAVYYCARDELWATNYYYMDVWGKGTLVTVSSTRASTKGPSVFPLAPSSKSTSGGTAALGCLVKDYFPEPVTVSWNSGALTSGVHTFPAVLQSSGLYSLSSVVTVPSSSLGTQTYICNVNHKPSNTKVDKRVEPKSCEVKTDSTDHVKPKETENTKQPSKSCHKPKAIVHTEKVNMMSLTVLGLRMLFAKTVAVNFLLTAKLFFL

SEQ ID NO: 19922 - protein, 630 aa, Artificial Sequence
  Synthetic Polypeptide
MALPVTALLLPLALLLHAARPQSALTQPRSVSGSPGQSVTISCTGTSSDVGSYNYVSWYQQSPGKAPKLMIYDVSNRPSGVSNRFSGSKSGNTASLTISGLQSEDEADYYCTSYGSYDIPVIFGGGTKVEIKLEGQPKANPTVTLFPPSSEELQANKATLVCLISDFYPGAVTVAWKADGSPVKAGVETTKPSKQSNNKYAASSYLSLTPEQWKSHRSYSCQVTHEGSTVEKTVAPTECSGRADCGITSASYHQGVLSATILYEILLGKATLYAVLVSALVLMAMVKRKDSRGRAKRSGSGATNFSLLKQAGDVEENPGPTSMDWIWRILFLVGAATGAHSFEQMQLVQSGAEVKKPGSSVKVSCKASGGTFSSYAISWVRQAPGQGLEWMGGIIPIFGTANYAQKFQGRVTITADKSTSTAYMELSSLRSDDTAVYYCARDELWATNYYYMDVWGKGTLVTVSSTRASTKGPSVFPLAPSSKSTSGGTAALGCLVKDYFPEPVTVSWNSGALTSGVHTFPAVLQSSGLYSLSSVVTVPSSSLGTQTYICNVNHKPSNTKVDKRVEPKSCIPEDTFFPSSDVPCDVKLVEKSFETDTNLNFQNLSVIGFRILLLKVAGFNLLMTLRLWSS

SEQ ID NO: 19923 - protein, 630 aa, Artificial Sequence
  Synthetic Polypeptide
MALPVTALLLPLALLLHAARPQSALTQPRSVSGSPGQSVTISCTGTSSDVGSYNYVSWYQQSPGKAPKLMIYDVSNRPSGVSNRFSGSKSGNTASLTISGLQSEDEADYYCTSYGSYDIPVIFGGGTKVEIKLEGQPKANPTVTLFPPSSEELQANKATLVCLISDFYPGAVTVAWKADGSPVKAGVETTKPSKQSNNKYAASSYLSLTPEQWKSHRSYSCQVTHEGSTVEKTVAPTECSGRADCGFTSESYQQGVLSATILYEILLGKATLYAVLVSALVLMAMVKRKDSRGRAKRSGSGATNFSLLKQAGDVEENPGPTSMDWIWRILFLVGAATGAHSFEQMQLVQSGAEVKKPGSSVKVSCKASGGTFSSYAISWVRQAPGQGLEWMGGIIPIFGTANYAQKFQGRVTITADKSTSTAYMELSSLRSDDTAVYYCARDELWATNYYYMDVWGKGTLVTVSSTRASTKGPSVFPLAPSSKSTSGGTAALGCLVKDYFPEPVTVSWNSGALTSGVHTFPAVLQSSGLYSLSSVVTVPSSSLGTQTYICNVNHKPSNTKVDKRVEPKSCIPEDTFFPSPESSCDVKLVEKSFETDTNLNFQNLSVIGFRILLLKVAGFNLLMTLRLWSS

SEQ ID NO: 19924 - protein, 456 aa, Artificial Sequence
  Synthetic Polypeptide
MALPVTALLLPLALLLHAARPQSALTQPRSVSGSPGQSVTISCTGTSSDVGSYNYVSWYQQSPGKAPKLMIYDVSNRPSGVSNRFSGSKSGNTASLTISGLQSEDEADYYCTSYGSYDIPVIFGGGTKVEIKGGGGSGGGGSGGGGSQMQLVQSGAEVKKPGSSVKVSCKASGGTFSSYAISWVRQAPGQGLEWMGGIIPIFGTANYAQKFQGRVTITADKSTSTAYMELSSLRSDDTAVYYCARDELWATNYYYMDVWGKGTLVTVSSTRDGNEEMGGITQTPYKVSISGTTVILTCPQYPGSEILWQHNDKNIGGDEDDKNIGSDEDHLSLKEFSELEQSGYYVCYPRGSKPEDANFYLYLRARVCENCMEMDVMSVATIVIVDICITGGLLLLVYYWSKNRKAKAKPVTRGAGAGGRQRGQNKERPPPVPNPDYEPIRKGQRDLYSGLNQRRI

SEQ ID NO: 19925 - protein, 421 aa, Artificial Sequence
  Synthetic Polypeptide
MALPVTALLLPLALLLHAARPQSALTQPRSVSGSPGQSVTISCTGTSSDVGSYNYVSWYQQSPGKAPKLMIYDVSNRPSGVSNRFSGSKSGNTASLTISGLQSEDEADYYCTSYGSYDIPVIFGGGTKVEIKGGGGSGGGGSGGGGSQMQLVQSGAEVKKPGSSVKVSCKASGGTFSSYAISWVRQAPGQGLEWMGGIIPIFGTANYAQKFQGRVTITADKSTSTAYMELSSLRSDDTAVYYCARDELWATNYYYMDVWGKGTLVTVSSTRFKIPIEELEDRVFVNCNTSITWVEGTVGTLLSDITRLDLGKRILDPRGIYRCNGTDIYKDKESTVQVHYRMCQSCVELDPATVAGIIVTDVIATLLLALGVFCFAGHETGRLSGAADTQALLRNDQVYQPLRDRDDAQYSHLGGNWARNK

SEQ ID NO: 19926 - protein, 431 aa, Artificial Sequence
  Synthetic Polypeptide
MALPVTALLLPLALLLHAARPQSALTQPRSVSGSPGQSVTISCTGTSSDVGSYNYVSWYQQSPGKAPKLMIYDVSNRPSGVSNRFSGSKSGNTASLTISGLQSEDEADYYCTSYGSYDIPVIFGGGTKVEIKGGGGSGGGGSGGGGSQMQLVQSGAEVKKPGSSVKVSCKASGGTFSSYAISWVRQAPGQGLEWMGGIIPIFGTANYAQKFQGRVTITADKSTSTAYMELSSLRSDDTAVYYCARDELWATNYYYMDVWGKGTLVTVSSTRQSIKGNHLVKVYDYQEDGSVLLTCDAEAKNITWFKDGKMIGFLTEDKKKWNLGSNAKDPRGMYQCKGSQNKSKPLQVYYRMCQNCIELNAATISGFLFAEIVSIFVLAVGVYFIAGQDGVRQSRASDKQTLLPNDQLYQPLKDREDDQYSHLQGNQLRRN

SEQ ID NO: 19927 - protein, 414 aa, Artificial Sequence
  Synthetic Polypeptide
MALPVTALLLPLALLLHAARPQSALTQPRSVSGSPGQSVTISCTGTSSDVGSYNYVSWYQQSPGKAPKLMIYDVSNRPSGVSNRFSGSKSGNTASLTISGLQSEDEADYYCTSYGSYDIPVIFGGGTKVEIKGGGGSGGGGSGGGGSQMQLVQSGAEVKKPGSSVKVSCKASGGTFSSYAISWVRQAPGQGLEWMGGIIPIFGTANYAQKFQGRVTITADKSTSTAYMELSSLRSDDTAVYYCARDELWATNYYYMDVWGKGTLVTVSSTRQSFGLLDPKLCYLLDGILFIYGVILTALFLRVKFSRSADAPAYQQGQNQLYNELNLGRREEYDVLDKRRGRDPEMGGKPQRRKNPQEGLYNELQKDKMAEAYSEIGMKGERRRGKGHDGLYQGLSTATKDTYDALHMQALPPR

SEQ ID NO: 19928 - protein, 456 aa, Artificial Sequence
  Synthetic Polypeptide
MALPVTALLLPLALLLHAARPQMQLVQSGAEVKKPGSSVKVSCKASGGTFSSYAISWVRQAPGQGLEWMGGIIPIFGTANYAQKFQGRVTITADKSTSTAYMELSSLRSDDTAVYYCARDELWATNYYYMDVWGKGTLVTVSSGGGGSGGGGSGGGGSQSALTQPRSVSGSPGQSVTISCTGTSSDVGSYNYVSWYQQSPGKAPKLMIYDVSNRPSGVSNRFSGSKSGNTASLTISGLQSEDEADYYCTSYGSYDIPVIFGGGTKVEIKTRDGNEEMGGITQTPYKVSISGTTVILTCPQYPGSEILWQHNDKNIGGDEDDKNIGSDEDHLSLKEFSELEQSGYYVCYPRGSKPEDANFYLYLRARVCENCMEMDVMSVATIVIVDICITGGLLLLVYYWSKNRKAKAKPVTRGAGAGGRQRGQNKERPPPVPNPDYEPIRKGQRDLYSGLNQRRI

SEQ ID NO: 19929 - protein, 421 aa, Artificial Sequence
  Synthetic Polypeptide
MALPVTALLLPLALLLHAARPQMQLVQSGAEVKKPGSSVKVSCKASGGTFSSYAISWVRQAPGQGLEWMGGIIPIFGTANYAQKFQGRVTITADKSTSTAYMELSSLRSDDTAVYYCARDELWATNYYYMDVWGKGTLVTVSSGGGGSGGGGSGGGGSQSALTQPRSVSGSPGQSVTISCTGTSSDVGSYNYVSWYQQSPGKAPKLMIYDVSNRPSGVSNRFSGSKSGNTASLTISGLQSEDEADYYCTSYGSYDIPVIFGGGTKVEIKTRFKIPIEELEDRVFVNCNTSITWVEGTVGTLLSDITRLDLGKRILDPRGIYRCNGTDIYKDKESTVQVHYRMCQSCVELDPATVAGIIVTDVIATLLLALGVFCFAGHETGRLSGAADTQALLRNDQVYQPLRDRDDAQYSHLGGNWARNK

SEQ ID NO: 19930 - protein, 431 aa, Artificial Sequence
  Synthetic Polypeptide
MALPVTALLLPLALLLHAARPQMQLVQSGAEVKKPGSSVKVSCKASGGTFSSYAISWVRQAPGQGLEWMGGIIPIFGTANYAQKFQGRVTITADKSTSTAYMELSSLRSDDTAVYYCARDELWATNYYYMDVWGKGTLVTVSSGGGGSGGGGSGGGGSQSALTQPRSVSGSPGQSVTISCTGTSSDVGSYNYVSWYQQSPGKAPKLMIYDVSNRPSGVSNRFSGSKSGNTASLTISGLQSEDEADYYCTSYGSYDIPVIFGGGTKVEIKTRQSIKGNHLVKVYDYQEDGSVLLTCDAEAKNITWFKDGKMIGFLTEDKKKWNLGSNAKDPRGMYQCKGSQNKSKPLQVYYRMCQNCIELNAATISGFLFAEIVSIFVLAVGVYFIAGQDGVRQSRASDKQTLLPNDQLYQPLKDREDDQYSHLQGNQLRRN

SEQ ID NO: 19931 - protein, 414 aa, Artificial Sequence
  Synthetic Polypeptide
MALPVTALLLPLALLLHAARPQMQLVQSGAEVKKPGSSVKVSCKASGGTFSSYAISWVRQAPGQGLEWMGGIIPIFGTANYAQKFQGRVTITADKSTSTAYMELSSLRSDDTAVYYCARDELWATNYYYMDVWGKGTLVTVSSGGGGSGGGGSGGGGSQSALTQPRSVSGSPGQSVTISCTGTSSDVGSYNYVSWYQQSPGKAPKLMIYDVSNRPSGVSNRFSGSKSGNTASLTISGLQSEDEADYYCTSYGSYDIPVIFGGGTKVEIKTRQSFGLLDPKLCYLLDGILFIYGVILTALFLRVKFSRSADAPAYQQGQNQLYNELNLGRREEYDVLDKRRGRDPEMGGKPQRRKNPQEGLYNELQKDKMAEAYSEIGMKGERRRGKGHDGLYQGLSTATKDTYDALHMQALPPR

SEQ ID NO: 19932 - protein, 647 aa, Artificial Sequence
  Synthetic Polypeptide
MALPVTALLLPLALLLHAARPQSALTQPRSVSGSPGQSVTISCTGTSSDVGSYNYVSWYQQSPGKAPKLMIYDVSNRPSGVSNRFSGSKSGNTASLTISGLQSEDEADYYCTSYGSYDIPVIFGGGTKVEIKGGGGSGGGGSGGGGSQMQLVQSGAEVKKPGSSVKVSCKASGGTFSSYAISWVRQAPGQGLEWMGGIIPIFGTANYAQKFQGRVTITADKSTSTAYMELSSLRSDDTAVYYCARDELWATNYYYMDVWGKGTLVTVSSTRGSGIQNPDPAVYQLRDSKSSDKSVCLFTDFDSQTNVSQSKDSDVYITDKTVLDMRSMDFKSNSAVAWSNKSDFACANAFNNSIIPEDTFFPSPESSCDVKLVEKSFETDTNLNFQNLSVIGFRILLLKVAGFNLLMTLRLWSSRAKRSGSGVKQTLNFDLLKLAGDVESNPGPSRGHMTEYKPTVRLATRDDVPRAVRTLAAAFADYPATRHTVDPDRHIERVTELQELFLTRVGLDIGKVWVADDGAAVAVWTTPESVEAGAVFAEIGPRMAELSGSRLAAQQQMEGLLAPHRPKEPAWFLATVGVSPDHQGKGLGSAVVLPGVEAAERAGVPAFLETSAPRNLPFYERLGFTVTADVEVPEGPRTWCMTRKPGA

SEQ ID NO: 19933 - protein, 679 aa, Artificial Sequence
  Synthetic Polypeptide
MALPVTALLLPLALLLHAARPQSALTQPRSVSGSPGQSVTISCTGTSSDVGSYNYVSWYQQSPGKAPKLMIYDVSNRPSGVSNRFSGSKSGNTASLTISGLQSEDEADYYCTSYGSYDIPVIFGGGTKVEIKGGGGSGGGGSGGGGSQMQLVQSGAEVKKPGSSVKVSCKASGGTFSSYAISWVRQAPGQGLEWMGGIIPIFGTANYAQKFQGRVTITADKSTSTAYMELSSLRSDDTAVYYCARDELWATNYYYMDVWGKGTLVTVSSLEDLKNVFPPEVAVFEPSEAEISHTQKATLVCLATGFYPDHVELSWWVNGKEVHSGVSTDPQPLKEQPALNDSRYCLSSRLRVSATFWQNPRNHFRCQVQFYGLSENDEWTQDRAKPVTQIVSAEAWGRADCGFTSESYQQGVLSATILYEILLGKATLYAVLVSALVLMAMVKRKDSRGRAKRSGSGATNFSLLKQAGDVEENPGPTRGHMTEYKPTVRLATRDDVPRAVRTLAAAFADYPATRHTVDPDRHIERVTELQELFLTRVGLDIGKVWVADDGAAVAVWTTPESVEAGAVFAEIGPRMAELSGSRLAAQQQMEGLLAPHRPKEPAWFLATVGVSPDHQGKGLGSAVVLPGVEAAERAGVPAFLETSAPRNLPFYERLGFTVTADVEVPEGPRTWCMTRKPGA

SEQ ID NO: 19934 - protein, 729 aa, Artificial Sequence
  Synthetic Polypeptide
MALPVTALLLPLALLLHAARPQSALTQPRSVSGSPGQSVTISCTGTSSDVGSYNYVSWYQQSPGKAPKLMIYDVSNRPSGVSNRFSGSKSGNTASLTISGLQSEDEADYYCTSYGSYDIPVIFGGGTKVEIKGGGGSGGGGSGGGGSQMQLVQSGAEVKKPGSSVKVSCKASGGTFSSYAISWVRQAPGQGLEWMGGIIPIFGTANYAQKFQGRVTITADKSTSTAYMELSSLRSDDTAVYYCARDELWATNYYYMDVWGKGTLVTVSSTREQKLISEEDLGSGTPFPSLAPPIMLLVDGKQQMVVVCLVLDVAPPGLDSPIWFSAGNGSALDAFTYGPSPATDGTWTNLAHLSLPSEELASWEPLVCHTGPGAEGHSRSTQPMHLSGEASTARTCPQEPLRGTPGGALWLGVLRLLLFKLLLFDLLLTCSCLCDPAGPLPSPATTTRLRALGSHRLHPATETGGREATSSPRPQPRDRRWGDTPPGRKPGSPVRAKRSGSGVKQTLNFDLLKLAGDVESNPGPSRSRGHMTEYKPTVRLATRDDVPRAVRTLAAAFADYPATRHTVDPDRHIERVTELQELFLTRVGLDIGKVWVADDGAAVAVWTTPESVEAGAVFAEIGPRMAELSGSRLAAQQQMEGLLAPHRPKEPAWFLATVGVSPDHQGKGLGSAVVLPGVEAAERAGVPAFLETSAPRNLPFYERLGFTVTADVEVPEGPRTWCMTRKPGA

SEQ ID NO: 19935 - protein, 542 aa, Artificial Sequence
  Synthetic Polypeptide
MALPVTALLLPLALLLHAARPQSALTQPRSVSGSPGQSVTISCTGTSSDVGSYNYVSWYQQSPGKAPKLMIYDVSNRPSGVSNRFSGSKSGNTASLTISGLQSEDEADYYCTSYGSYDIPVIFGGGTKVEIKLEDLKNVFPPEVAVFEPSEAEISHTQKATLVCLATGFYPDHVELSWWVNGKEVHSGVSTDPQPLKEQPALNDSRYCLSSRLRVSATFWQNPRNHFRCQVQFYGLSENDEWTQDRAKPVTQIVSAEAWGRADCGFTSESYQQGVLSATILYEILLGKATLYAVLVSALVLMAMVKRKDSRGRAKRSGSGATNFSLLKQAGDVEENPGPTRGHMTEYKPTVRLATRDDVPRAVRTLAAAFADYPATRHTVDPDRHIERVTELQELFLTRVGLDIGKVWVADDGAAVAVWTTPESVEAGAVFAEIGPRMAELSGSRLAAQQQMEGLLAPHRPKEPAWFLATVGVSPDHQGKGLGSAVVLPGVEAAERAGVPAFLETSAPRNLPFYERLGFTVTADVEVPEGPRTWCMTRKPGA

SEQ ID NO: 19936 - protein, 312 aa, Artificial Sequence
  Synthetic Polypeptide
MALPVTALLLPLALLLHAARPQSALTQPRSVSGSPGQSVTISCTGTSSDVGSYNYVSWYQQSPGKAPKLMIYDVSNRPSGVSNRFSGSKSGNTASLTISGLQSEDEADYYCTSYGSYDIPVIFGGGTKVEIKLEDLKNVFPPEVAVFEPSEAEISHTQKATLVCLATGFYPDHVELSWWVNGKEVHSGVSTDPQPLKEQPALNDSRYCLSSRLRVSATFWQNPRNHFRCQVQFYGLSENDEWTQDRAKPVTQIVSAEAWGRADCGFTSESYQQGVLSATILYEILLGKATLYAVLVSALVLMAMVKRKDSRG

SEQ ID NO: 19937 - protein, 451 aa, Artificial Sequence
  Synthetic Polypeptide
MDWIWRILFLVGAATGAHSFEQMQLVQSGAEVKKPGSSVKVSCKASGGTFSSYAISWVRQAPGQGLEWMGGIIPIFGTANYAQKFQGRVTITADKSTSTAYMELSSLRSDDTAVYYCARDELWATNYYYMDVWGKGTLVTVSSTRIQNPDPAVYQLRDSKSSDKSVCLFTDFDSQTNVSQSKDSDVYITDKTVLDMRSMDFKSNSAVAWSNKSDFACANAFNNSIIPEDTFFPSPESSCDVKLVEKSFETDTNLNFQNLSVIGFRILLLKVAGFNLLMTLRLWSSRAKRSGSGVKQTLNFDLLKLAGDVESNPGPSRGHMAKPLSQEESTLIERATATINSIPISEDYSVASAALSSDGRIFTGVNVYHFTGGPCAELVVLGTAAAAAAGNLTCIVAIGNENRGILSPCGRCRQVLLDLHPGIKAIVKDSDGQPTAVGIRELLPSGYVWEG

SEQ ID NO: 19938 - protein, 285 aa, Artificial Sequence
  Synthetic Polypeptide
MDWIWRILFLVGAATGAHSFEQMQLVQSGAEVKKPGSSVKVSCKASGGTFSSYAISWVRQAPGQGLEWMGGIIPIFGTANYAQKFQGRVTITADKSTSTAYMELSSLRSDDTAVYYCARDELWATNYYYMDVWGKGTLVTVSSTRIQNPDPAVYQLRDSKSSDKSVCLFTDFDSQTNVSQSKDSDVYITDKTVLDMRSMDFKSNSAVAWSNKSDFACANAFNNSIIPEDTFFPSPESSCDVKLVEKSFETDTNLNFQNLSVIGFRILLLKVAGFNLLMTLRLWSS

SEQ ID NO: 19939 - protein, 560 aa, Artificial Sequence
  Synthetic Polypeptide
MALPVTALLLPLALLLHAARPQSALTQPRSVSGSPGQSVTISCTGTSSDVGSYNYVSWYQQSPGKAPKLMIYDVSNRPSGVSNRFSGSKSGNTASLTISGLQSEDEADYYCTSYGSYDIPVIFGGGTKVEIKLEGKPIPNPLLGLDSTGSGEDLKNVFPPEVAVFEPSEAEISHTQKATLVCLATGFYPDHVELSWWVNGKEVHSGVCTDPQPLKEQPALNDSRYCLSSRLRVSATFWQNPRNHFRCQVQFYGLSENDEWTQDRAKPVTQIVSAEAWGRADCGFTSESYQQGVLSATILYEILLGKATLYAVLVSALVLMAMVKRKDSRGRAKRSGSGATNFSLLKQAGDVEENPGPTRGHMTEYKPTVRLATRDDVPRAVRTLAAAFADYPATRHTVDPDRHIERVTELQELFLTRVGLDIGKVWVADDGAAVAVWTTPESVEAGAVFAEIGPRMAELSGSRLAAQQQMEGLLAPHRPKEPAWFLATVGVSPDHQGKGLGSAVVLPGVEAAERAGVPAFLETSAPRNLPFYERLGFTVTADVEVPEGPRTWCMTRKPGA

SEQ ID NO: 19940 - protein, 330 aa, Artificial Sequence
  Synthetic Polypeptide
MALPVTALLLPLALLLHAARPQSALTQPRSVSGSPGQSVTISCTGTSSDVGSYNYVSWYQQSPGKAPKLMIYDVSNRPSGVSNRFSGSKSGNTASLTISGLQSEDEADYYCTSYGSYDIPVIFGGGTKVEIKLEGKPIPNPLLGLDSTGSGEDLKNVFPPEVAVFEPSEAEISHTQKATLVCLATGFYPDHVELSWWVNGKEVHSGVCTDPQPLKEQPALNDSRYCLSSRLRVSATFWQNPRNHFRCQVQFYGLSENDEWTQDRAKPVTQIVSAEAWGRADCGFTSESYQQGVLSATILYEILLGKATLYAVLVSALVLMAMVKRKDSRG

SEQ ID NO: 19941 - protein, 463 aa, Artificial Sequence
  Synthetic Polypeptide
MDWIWRILFLVGAATGAHSFEQMQLVQSGAEVKKPGSSVKVSCKASGGTFSSYAISWVRQAPGQGLEWMGGIIPIFGTANYAQKFQGRVTITADKSTSTAYMELSSLRSDDTAVYYCARDELWATNYYYMDVWGKGTLVTVSSTREQKLISEEDGSGIQNPDPAVYQLRDSKSSDKSVCLFTDFDSQTNVSQSKDSDVYITDKCVLDMRSMDFKSNSAVAWSNKSDFACANAFNNSIIPEDTFFPSPESSCDVKLVEKSFETDTNLNFQNLSVIGFRILLLKVAGFNLLMTLRLWSSRAKRSGSGVKQTLNFDLLKLAGDVESNPGPSRGHMAKPLSQEESTLIERATATINSIPISEDYSVASAALSSDGRIFTGVNVYHFTGGPCAELVVLGTAAAAAAGNLTCIVAIGNENRGILSPCGRCRQVLLDLHPGIKAIVKDSDGQPTAVGIRELLPSGYVWEG

SEQ ID NO: 19942 - protein, 297 aa, Artificial Sequence
  Synthetic Polypeptide
MDWIWRILFLVGAATGAHSFEQMQLVQSGAEVKKPGSSVKVSCKASGGTFSSYAISWVRQAPGQGLEWMGGIIPIFGTANYAQKFQGRVTITADKSTSTAYMELSSLRSDDTAVYYCARDELWATNYYYMDVWGKGTLVTVSSTREQKLISEEDGSGIQNPDPAVYQLRDSKSSDKSVCLFTDFDSQTNVSQSKDSDVYITDKCVLDMRSMDFKSNSAVAWSNKSDFACANAFNNSIIPEDTFFPSPESSCDVKLVEKSFETDTNLNFQNLSVIGFRILLLKVAGFNLLMTLRLWSS

SEQ ID NO: 19943 - protein, 647 aa, Artificial Sequence
  Synthetic Polypeptide
MALPVTALLLPLALLLHAARPQSALTQPRSVSGSPGQSVTISCTGTSSDVGSYNYVSWYQQSPGKAPKLMIYDVSNRPSGVSNRFSGSKSGNTASLTISGLQSEDEADYYCTSYGSYDIPVIFGGGTKVEIKGGGGSGGGGSGGGGSQMQLVQSGAEVKKPGSSVKVSCKASGGTFSSYAISWVRQAPGQGLEWMGGIIPIFGTANYAQKFQGRVTITADKSTSTAYMELSSLRSDDTAVYYCARDELWATNYYYMDVWGKGTLVTVSSTRGSGIQNPDPAVYQLRDSKSSDKSVCLFTDFDSQTNVSQSKDSDVYITDKTVLDMRSMDFKSNSAVAWSNKSDFACANAFNNSIIPEDTFFPSSDVPCDVKLVEKSFETDTNLNFQNLSVIGFRILLLKVAGFNLLMTLRLWSSRAKRSGSGVKQTLNFDLLKLAGDVESNPGPSRGHMTEYKPTVRLATRDDVPRAVRTLAAAFADYPATRHTVDPDRHIERVTELQELFLTRVGLDIGKVWVADDGAAVAVWTTPESVEAGAVFAEIGPRMAELSGSRLAAQQQMEGLLAPHRPKEPAWFLATVGVSPDHQGKGLGSAVVLPGVEAAERAGVPAFLETSAPRNLPFYERLGFTVTADVEVPEGPRTWCMTRKPGA

SEQ ID NO: 19944 - protein, 679 aa, Artificial Sequence
  Synthetic Polypeptide
MALPVTALLLPLALLLHAARPQSALTQPRSVSGSPGQSVTISCTGTSSDVGSYNYVSWYQQSPGKAPKLMIYDVSNRPSGVSNRFSGSKSGNTASLTISGLQSEDEADYYCTSYGSYDIPVIFGGGTKVEIKGGGGSGGGGSGGGGSQMQLVQSGAEVKKPGSSVKVSCKASGGTFSSYAISWVRQAPGQGLEWMGGIIPIFGTANYAQKFQGRVTITADKSTSTAYMELSSLRSDDTAVYYCARDELWATNYYYMDVWGKGTLVTVSSLEDLKNVFPPEVAVFEPSKAEIAHTQKATLVCLATGFYPDHVELSWWVNGKEVHSGVSTDPQPLKEQPALNDSRYCLSSRLRVSATFWQNPRNHFRCQVQFYGLSENDEWTQDRAKPVTQIVSAEAWGRADCGITSASYHQGVLSATILYEILLGKATLYAVLVSALVLMAMVKRKDSRGRAKRSGSGATNFSLLKQAGDVEENPGPTRGHMTEYKPTVRLATRDDVPRAVRTLAAAFADYPATRHTVDPDRHIERVTELQELFLTRVGLDIGKVWVADDGAAVAVWTTPESVEAGAVFAEIGPRMAELSGSRLAAQQQMEGLLAPHRPKEPAWFLATVGVSPDHQGKGLGSAVVLPGVEAAERAGVPAFLETSAPRNLPFYERLGFTVTADVEVPEGPRTWCMTRKPGA

SEQ ID NO: 19945 - protein, 702 aa, Artificial Sequence
  Synthetic Polypeptide
MALPVTALLLPLALLLHAARPQSALTQPRSVSGSPGQSVTISCTGTSSDVGSYNYVSWYQQSPGKAPKLMIYDVSNRPSGVSNRFSGSKSGNTASLTISGLQSEDEADYYCTSYGSYDIPVIFGGGTKVEIKGGGGSGGGGSGGGGSQMQLVQSGAEVKKPGSSVKVSCKASGGTFSSYAISWVRQAPGQGLEWMGGIIPIFGTANYAQKFQGRVTITADKSTSTAYMELSSLRSDDTAVYYCARDELWATNYYYMDVWGKGTLVTVSSTRGSGGGGSGGGGSGDGNEEMGGITQTPYKVSISGTTVILTCPQYPGSEILWQHNDKNIGGDEDDKNIGSDEDHLSLKEFSELEQSGYYVCYPRGSKPEDANFYLYLRARVCENCMEMDVMSVATIVIVDICITGGLLLLVYYWSKNRKAKAKPVTRGAGAGGRQRGQNKERPPPVPNPDYEPIRKGQRDLYSGLNQRRIRAKRSGSGVKQTLNFDLLKLAGDVESNPGPSRGHMTEYKPTVRLATRDDVPRAVRTLAAAFADYPATRHTVDPDRHIERVTELQELFLTRVGLDIGKVWVADDGAAVAVWTTPESVEAGAVFAEIGPRMAELSGSRLAAQQQMEGLLAPHRPKEPAWFLATVGVSPDHQGKGLGSAVVLPGVEAAERAGVPAFLETSAPRNLPFYERLGFTVTADVEVPEGPRTWCMTRKPGA

SEQ ID NO: 19946 - protein, 667 aa, Artificial Sequence
  Synthetic Polypeptide
MALPVTALLLPLALLLHAARPQSALTQPRSVSGSPGQSVTISCTGTSSDVGSYNYVSWYQQSPGKAPKLMIYDVSNRPSGVSNRFSGSKSGNTASLTISGLQSEDEADYYCTSYGSYDIPVIFGGGTKVEIKGGGGSGGGGSGGGGSQMQLVQSGAEVKKPGSSVKVSCKASGGTFSSYAISWVRQAPGQGLEWMGGIIPIFGTANYAQKFQGRVTITADKSTSTAYMELSSLRSDDTAVYYCARDELWATNYYYMDVWGKGTLVTVSSTRGSGGGGSGGGGSGFKIPIEELEDRVFVNCNTSITWVEGTVGTLLSDITRLDLGKRILDPRGIYRCNGTDIYKDKESTVQVHYRMCQSCVELDPATVAGIIVTDVIATLLLALGVFCFAGHETGRLSGAADTQALLRNDQVYQPLRDRDDAQYSHLGGNWARNKRAKRSGSGVKQTLNFDLLKLAGDVESNPGPSRGHMTEYKPTVRLATRDDVPRAVRTLAAAFADYPATRHTVDPDRHIERVTELQELFLTRVGLDIGKVWVADDGAAVAVWTTPESVEAGAVFAEIGPRMAELSGSRLAAQQQMEGLLAPHRPKEPAWFLATVGVSPDHQGKGLGSAVVLPGVEAAERAGVPAFLETSAPRNLPFYERLGFTVTADVEVPEGPRTWCMTRKPGA

SEQ ID NO: 19947 - protein, 677 aa, Artificial Sequence
  Synthetic Polypeptide
MALPVTALLLPLALLLHAARPQSALTQPRSVSGSPGQSVTISCTGTSSDVGSYNYVSWYQQSPGKAPKLMIYDVSNRPSGVSNRFSGSKSGNTASLTISGLQSEDEADYYCTSYGSYDIPVIFGGGTKVEIKGGGGSGGGGSGGGGSQMQLVQSGAEVKKPGSSVKVSCKASGGTFSSYAISWVRQAPGQGLEWMGGIIPIFGTANYAQKFQGRVTITADKSTSTAYMELSSLRSDDTAVYYCARDELWATNYYYMDVWGKGTLVTVSSTRGSGGGGSGGGGSGQSIKGNHLVKVYDYQEDGSVLLTCDAEAKNITWFKDGKMIGFLTEDKKKWNLGSNAKDPRGMYQCKGSQNKSKPLQVYYRMCQNCIELNAATISGFLFAEIVSIFVLAVGVYFIAGQDGVRQSRASDKQTLLPNDQLYQPLKDREDDQYSHLQGNQLRRNRAKRSGSGVKQTLNFDLLKLAGDVESNPGPSRGHMTEYKPTVRLATRDDVPRAVRTLAAAFADYPATRHTVDPDRHIERVTELQELFLTRVGLDIGKVWVADDGAAVAVWTTPESVEAGAVFAEIGPRMAELSGSRLAAQQQMEGLLAPHRPKEPAWFLATVGVSPDHQGKGLGSAVVLPGVEAAERAGVPAFLETSAPRNLPFYERLGFTVTADVEVPEGPRTWCMTRKPGA

SEQ ID NO: 19948 - protein, 660 aa, Artificial Sequence
  Synthetic Polypeptide
MALPVTALLLPLALLLHAARPQSALTQPRSVSGSPGQSVTISCTGTSSDVGSYNYVSWYQQSPGKAPKLMIYDVSNRPSGVSNRFSGSKSGNTASLTISGLQSEDEADYYCTSYGSYDIPVIFGGGTKVEIKGGGGSGGGGSGGGGSQMQLVQSGAEVKKPGSSVKVSCKASGGTFSSYAISWVRQAPGQGLEWMGGIIPIFGTANYAQKFQGRVTITADKSTSTAYMELSSLRSDDTAVYYCARDELWATNYYYMDVWGKGTLVTVSSTRGSGGGGSGGGGSGQSFGLLDPKLCYLLDGILFIYGVILTALFLRVKFSRSADAPAYQQGQNQLYNELNLGRREEYDVLDKRRGRDPEMGGKPQRRKNPQEGLYNELQKDKMAEAYSEIGMKGERRRGKGHDGLYQGLSTATKDTYDALHMQALPPRRAKRSGSGVKQTLNFDLLKLAGDVESNPGPSRGHMTEYKPTVRLATRDDVPRAVRTLAAAFADYPATRHTVDPDRHIERVTELQELFLTRVGLDIGKVWVADDGAAVAVWTTPESVEAGAVFAEIGPRMAELSGSRLAAQQQMEGLLAPHRPKEPAWFLATVGVSPDHQGKGLGSAVVLPGVEAAERAGVPAFLETSAPRNLPFYERLGFTVTADVEVPEGPRTWCMTRKPGA

SEQ ID NO: 19949 - protein, 761 aa, Artificial Sequence
  Synthetic Polypeptide
MALPVTALLLPLALLLHAARPEVQLVESGGGLVQPGGSLRLSCAASGFSFSDFWMSWVRQAPGKGLEWVATISQAGSEKDYVDSVKGRFTISRDNAKKSLYLQMNSLRAEDTAVYYCASGVYSFDYRGQGTLVTVSSGTGGGGSGGGGSGGGGSEFQSALTQPRSVSGSPGQSVTISCTGTSSDVGSYNYVSWYQQSPGKAPKLMIYDVSNRPSGVSNRFSGSKSGNTASLTISGLQSEDEADYYCTSYGSYDIPVIFGGGTKVEIKLEDLKNVFPPEVAVFEPSEAEISHTQKATLVCLATGFYPDHVELSWWVNGKEVHSGVCTDPQPLKEQPALNDSRYCLSSRLRVSATFWQNPRNHFRCQVQFYGLSENDEWTQDRAKPVTQIVSAEAWGRADCGFTSESYQQGVLSATILYEILLGKATLYAVLVSALVLMAMVKRKDSRGRAKRSGSGATNFSLLKQAGDVEENPGPTSMDWIWRILFLVGAATGAHSFEQMQLVQSGAEVKKPGSSVKVSCKASGGTFSSYAISWVRQAPGQGLEWMGGIIPIFGTANYAQKFQGRVTITADKSTSTAYMELSSLRSDDTAVYYCARDELWATNYYYMDVWGKGTLVTVSSTRIQNPDPAVYQLRDSKSSDKSVCLFTDFDSQTNVSQSKDSDVYITDKCVLDMRSMDFKSNSAVAWSNKSDFACANAFNNSIIPEDTFFPSPESSCDVKLVEKSFETDTNLNFQNLSVIGFRILLLKVAGFNLLMTLRLWSS

SEQ ID NO: 19950 - protein, 765 aa, Artificial Sequence
  Synthetic Polypeptide
MALPVTALLLPLALLLHAARPEVQLVESGGGLVQPGGSLRLSCAASGFSFSDFWMSWVRQAPGKGLEWVATISQAGSEKDYVDSVKGRFTISRDNAKKSLYLQMNSLRAEDTAVYYCASGVYSFDYRGQGTLVTVSSGTGGGGSGGGGSGGGGSEFQSALTQPRSVSGSPGQSVTISCTGTSSDVGSYNYVSWYQQSPGKAPKLMIYDVSNRPSGVSNRFSGSKSGNTASLTISGLQSEDEADYYCTSYGSYDIPVIFGGGTKVEIKLEIQNPDPAVYQLRDSKSSDKSVCLFTDFDSQTNVSQSKDSDVYITDKCVLDMRSMDFKSNSAVAWSNKSDFACANAFNNSIIPEDTFFPSPESSCDVKLVEKSFETDTNLNFQNLSVIGFRILLLKVAGFNLLMTLRLWSSRAKRSGSGVKQTLNFDLLKLAGDVESNPGPTSMDWIWRILFLVGAATGAHSFEQMQLVQSGAEVKKPGSSVKVSCKASGGTFSSYAISWVRQAPGQGLEWMGGIIPIFGTANYAQKFQGRVTITADKSTSTAYMELSSLRSDDTAVYYCARDELWATNYYYMDVWGKGTLVTVSSTREDLKNVFPPEVAVFEPSEAEISHTQKATLVCLATGFYPDHVELSWWVNGKEVHSGVCTDPQPLKEQPALNDSRYCLSSRLRVSATFWQNPRNHFRCQVQFYGLSENDEWTQDRAKPVTQIVSAEAWGRADCGFTSESYQQGVLSATILYEILLGKATLYAVLVSALVLMAMVKRKDSRG

SEQ ID NO: 19951 - protein, 957 aa, Artificial Sequence
  Synthetic Polypeptide
MALPVTALLLPLALLLHAARPEVQLVESGGGLVQPGGSLRLSCAASGFSFSDFWMSWVRQAPGKGLEWVATISQAGSEKDYVDSVKGRFTISRDNAKKSLYLQMNSLRAEDTAVYYCASGVYSFDYRGQGTLVTVSSGTGGGGSGGGGSGGGGSEFQSALTQPRSVSGSPGQSVTISCTGTSSDVGSYNYVSWYQQSPGKAPKLMIYDVSNRPSGVSNRFSGSKSGNTASLTISGLQSEDEADYYCTSYGSYDIPVIFGGGTKVEIKLEDLKNVFPPEVAVFEPSEAEISHTQKATLVCLATGFYPDHVELSWWVNGKEVHSGVSTDPQPLKEQPALNDSRYCLSSRLRVSATFWQNPRNHFRCQVQFYGLSENDEWTQDRAKPVTQIVSAEAWGRADCGSQSFGLLDPKLCYLLDGILFIYGVILTALFLRVKFSRSADAPAYQQGQNQLYNELNLGRREEYDVLDKRRGRDPEMGGKPQRRKNPQEGLYNELQKDKMAEAYSEIGMKGERRRGKGHDGLYQGLSTATKDTYDALHMQALPPRRAKRSGSGATNFSLLKQAGDVEENPGPTSMDWIWRILFLVGAATGAHSFEQMQLVQSGAEVKKPGSSVKVSCKASGGTFSSYAISWVRQAPGQGLEWMGGIIPIFGTANYAQKFQGRVTITADKSTSTAYMELSSLRSDDTAVYYCARDELWATNYYYMDVWGKGTLVTVSSTRIQNPDPAVYQLRDSKSSDKSVCLFTDFDSQTNVSQSKDSDVYITDKTVLDMRSMDFKSNSAVAWSNKSDFACANAFNNSIIPEDTFFPSPESSCGTQSFGLLDPKLCYLLDGILFIYGVILTALFLRVKFSRSADAPAYQQGQNQLYNELNLGRREEYDVLDKRRGRDPEMGGKPQRRKNPQEGLYNELQKDKMAEAYSEIGMKGERRRGKGHDGLYQGLSTATKDTYDALHMQALPPR

SEQ ID NO: 19952 - protein, 787 aa, Artificial Sequence
  Synthetic Polypeptide
MALPVTALLLPLALLLHAARPEVQLVESGGGLVQPGGSLRLSCAASGFSFSDFWMSWVRQAPGKGLEWVATISQAGSEKDYVDSVKGRFTISRDNAKKSLYLQMNSLRAEDTAVYYCASGVYSFDYRGQGTLVTVSSGTGGGGSGGGGSGGGGSEFQSALTQPRSVSGSPGQSVTISCTGTSSDVGSYNYVSWYQQSPGKAPKLMIYDVSNRPSGVSNRFSGSKSGNTASLTISGLQSEDEADYYCTSYGSYDIPVIFGGGTKVEIKLEGQPKANPTVTLFPPSSEELQANKATLVCLISDFYPGAVTVAWKADGSPVKAGVETTKPSKQSNNKYAASSYLSLTPEQWKSHRSYSCQVTHEGSTVEKTVAPTECSPIKTDVITMDPKDNCSKDANDTLLLQLTNTSAYYMYLLLLLKSVVYFAIITCCLLRRTAFCCNGEKSRAKRSGSGATNFSLLKQAGDVEENPGPTSMDWIWRILFLVGAATGAHSFEQMQLVQSGAEVKKPGSSVKVSCKASGGTFSSYAISWVRQAPGQGLEWMGGIIPIFGTANYAQKFQGRVTITADKSTSTAYMELSSLRSDDTAVYYCARDELWATNYYYMDVWGKGTLVTVSSTRASTKGPSVFPLAPSSKSTSGGTAALGCLVKDYFPEPVTVSWNSGALTSGVHTFPAVLQSSGLYSLSSVVTVPSSSLGTQTYICNVNHKPSNTKVDKRVEPKSCEVKTDSTDHVKPKETENTKQPSKSCHKPKAIVHTEKVNMMSLTVLGLRMLFAKTVAVNFLLTAKLFFL

SEQ ID NO: 19953 - protein, 768 aa, Artificial Sequence
  Synthetic Polypeptide
MALPVTALLLPLALLLHAARPEVQLVESGGGLVQPGGSLRLSCAASGFSFSDFWMSWVRQAPGKGLEWVATISQAGSEKDYVDSVKGRFTISRDNAKKSLYLQMNSLRAEDTAVYYCASGVYSFDYRGQGTLVTVSSGTGGGGSGGGGSGGGGSEFQSALTQPRSVSGSPGQSVTISCTGTSSDVGSYNYVSWYQQSPGKAPKLMIYDVSNRPSGVSNRFSGSKSGNTASLTISGLQSEDEADYYCTSYGSYDIPVIFGGGTKVEIKLEGQPKANPTVTLFPPSSEELQANKATLVCLISDFYPGAVTVAWKADGSPVKAGVETTKPSKQSNNKYAASSYLSLTPEQWKSHRSYSCQVTHEGSTVEKTVAPTECSGRADCGFTSESYQQGVLSATILYEILLGKATLYAVLVSALVLMAMVKRKDSRGRAKRSGSGVKQTLNFDLLKLAGDVESNPGPTSMDWIWRILFLVGAATGAHSFEQMQLVQSGAEVKKPGSSVKVSCKASGGTFSSYAISWVRQAPGQGLEWMGGIIPIFGTANYAQKFQGRVTITADKSTSTAYMELSSLRSDDTAVYYCARDELWATNYYYMDVWGKGTLVTVSSTRASTKGPSVFPLAPSSKSTSGGTAALGCLVKDYFPEPVTVSWNSGALTSGVHTFPAVLQSSGLYSLSSVVTVPSSSLGTQTYICNVNHKPSNTKVDKRVEPKSCIPEDTFFPSPESSCDVKLVEKSFETDTNLNFQNLSVIGFRILLLKVAGFNLLMTLRLWSS

SEQ ID NO: 19954 - protein, 902 aa, Artificial Sequence
  Synthetic Polypeptide
MALPVTALLLPLALLLHAARPEVQLVESGGGLVQPGGSLRLSCAASGFSFSDFWMSWVRQAPGKGLEWVATISQAGSEKDYVDSVKGRFTISRDNAKKSLYLQMNSLRAEDTAVYYCASGVYSFDYRGQGTLVTVSSGTGGGGSGGGGSGGGGSEFQSALTQPRSVSGSPGQSVTISCTGTSSDVGSYNYVSWYQQSPGKAPKLMIYDVSNRPSGVSNRFSGSKSGNTASLTISGLQSEDEADYYCTSYGSYDIPVIFGGGTKVEIKLEIQNPDPAVYQLRDSKSSDKSVCLFTDFDSQTNVSQSKDSDVYITDKCVLDMRSMDFKSNSAVAWSNKSDFACANAFNNSIIPEDTFFPSPESSCDVKLVEKSFETDTNLNFQNLSVIGFRILLLKVAGFNLLMTLRLWSSRAKRSGSGVKQTLNFDLLKLAGDVESNPGPTSMDWIWRILFLVGAATGAHSGPQLQLQESGPGLVKPSETLSLTCTVSGDSISSGDYYWGWIRQPPGKGLEWIGHIYYSGVTYYNPSLKSRVTISVDTSRNQFSLKLSSVTAADTAVYYCTREDSSNWRSRGQGTLVTVSSGSGGGGSGGGGSGGGGSFEQMQLVQSGAEVKKPGSSVKVSCKASGGTFSSYAISWVRQAPGQGLEWMGGIIPIFGTANYAQKFQGRVTITADKSTSTAYMELSSLRSDDTAVYYCARDELWATNYYYMDVWGKGTLVTVSSTREDLKNVFPPEVAVFEPSEAEISHTQKATLVCLATGFYPDHVELSWWVNGKEVHSGVCTDPQPLKEQPALNDSRYCLSSRLRVSATFWQNPRNHFRCQVQFYGLSENDEWTQDRAKPVTQIVSAEAWGRADCGFTSESYQQGVLSATILYEILLGKATLYAVLVSALVLMAMVKRKDSRG

SEQ ID NO: 19955 - protein, 1094 aa, Artificial Sequence
  Synthetic Polypeptide
MALPVTALLLPLALLLHAARPEVQLVESGGGLVQPGGSLRLSCAASGFSFSDFWMSWVRQAPGKGLEWVATISQAGSEKDYVDSVKGRFTISRDNAKKSLYLQMNSLRAEDTAVYYCASGVYSFDYRGQGTLVTVSSGTGGGGSGGGGSGGGGSEFQSALTQPRSVSGSPGQSVTISCTGTSSDVGSYNYVSWYQQSPGKAPKLMIYDVSNRPSGVSNRFSGSKSGNTASLTISGLQSEDEADYYCTSYGSYDIPVIFGGGTKVEIKLEDLKNVFPPEVAVFEPSEAEISHTQKATLVCLATGFYPDHVELSWWVNGKEVHSGVSTDPQPLKEQPALNDSRYCLSSRLRVSATFWQNPRNHFRCQVQFYGLSENDEWTQDRAKPVTQIVSAEAWGRADCGSQSFGLLDPKLCYLLDGILFIYGVILTALFLRVKFSRSADAPAYQQGQNQLYNELNLGRREEYDVLDKRRGRDPEMGGKPQRRKNPQEGLYNELQKDKMAEAYSEIGMKGERRRGKGHDGLYQGLSTATKDTYDALHMQALPPRRAKRSGSGATNFSLLKQAGDVEENPGPTSMDWIWRILFLVGAATGAHSGPQLQLQESGPGLVKPSETLSLTCTVSGDSISSGDYYWGWIRQPPGKGLEWIGHIYYSGVTYYNPSLKSRVTISVDTSRNQFSLKLSSVTAADTAVYYCTREDSSNWRSRGQGTLVTVSSGSGGGGSGGGGSGGGGSFEQMQLVQSGAEVKKPGSSVKVSCKASGGTFSSYAISWVRQAPGQGLEWMGGIIPIFGTANYAQKFQGRVTITADKSTSTAYMELSSLRSDDTAVYYCARDELWATNYYYMDVWGKGTLVTVSSTRIQNPDPAVYQLRDSKSSDKSVCLFTDFDSQTNVSQSKDSDVYITDKTVLDMRSMDFKSNSAVAWSNKSDFACANAFNNSIIPEDTFFPSPESSCGTQSFGLLDPKLCYLLDGILFIYGVILTALFLRVKFSRSADAPAYQQGQNQLYNELNLGRREEYDVLDKRRGRDPEMGGKPQRRKNPQEGLYNELQKDKMAEAYSEIGMKGERRRGKGHDGLYQGLSTATKDTYDALHMQALPPR

SEQ ID NO: 19956 - protein, 924 aa, Artificial Sequence
  Synthetic Polypeptide
MALPVTALLLPLALLLHAARPEVQLVESGGGLVQPGGSLRLSCAASGFSFSDFWMSWVRQAPGKGLEWVATISQAGSEKDYVDSVKGRFTISRDNAKKSLYLQMNSLRAEDTAVYYCASGVYSFDYRGQGTLVTVSSGTGGGGSGGGGSGGGGSEFQSALTQPRSVSGSPGQSVTISCTGTSSDVGSYNYVSWYQQSPGKAPKLMIYDVSNRPSGVSNRFSGSKSGNTASLTISGLQSEDEADYYCTSYGSYDIPVIFGGGTKVEIKLEGQPKANPTVTLFPPSSEELQANKATLVCLISDFYPGAVTVAWKADGSPVKAGVETTKPSKQSNNKYAASSYLSLTPEQWKSHRSYSCQVTHEGSTVEKTVAPTECSPIKTDVITMDPKDNCSKDANDTLLLQLTNTSAYYMYLLLLLKSVVYFAIITCCLLRRTAFCCNGEKSRAKRSGSGATNFSLLKQAGDVEENPGPTSMDWIWRILFLVGAATGAHSGPQLQLQESGPGLVKPSETLSLTCTVSGDSISSGDYYWGWIRQPPGKGLEWIGHIYYSGVTYYNPSLKSRVTISVDTSRNQFSLKLSSVTAADTAVYYCTREDSSNWRSRGQGTLVTVSSGSGGGGSGGGGSGGGGSFEQMQLVQSGAEVKKPGSSVKVSCKASGGTFSSYAISWVRQAPGQGLEWMGGIIPIFGTANYAQKFQGRVTITADKSTSTAYMELSSLRSDDTAVYYCARDELWATNYYYMDVWGKGTLVTVSSTRASTKGPSVFPLAPSSKSTSGGTAALGCLVKDYFPEPVTVSWNSGALTSGVHTFPAVLQSSGLYSLSSVVTVPSSSLGTQTYICNVNHKPSNTKVDKRVEPKSCEVKTDSTDHVKPKETENTKQPSKSCHKPKAIVHTEKVNMMSLTVLGLRMLFAKTVAVNFLLTAKLFFL

SEQ ID NO: 19957 - protein, 905 aa, Artificial Sequence
  Synthetic Polypeptide
MALPVTALLLPLALLLHAARPEVQLVESGGGLVQPGGSLRLSCAASGFSFSDFWMSWVRQAPGKGLEWVATISQAGSEKDYVDSVKGRFTISRDNAKKSLYLQMNSLRAEDTAVYYCASGVYSFDYRGQGTLVTVSSGTGGGGSGGGGSGGGGSEFQSALTQPRSVSGSPGQSVTISCTGTSSDVGSYNYVSWYQQSPGKAPKLMIYDVSNRPSGVSNRFSGSKSGNTASLTISGLQSEDEADYYCTSYGSYDIPVIFGGGTKVEIKLEGQPKANPTVTLFPPSSEELQANKATLVCLISDFYPGAVTVAWKADGSPVKAGVETTKPSKQSNNKYAASSYLSLTPEQWKSHRSYSCQVTHEGSTVEKTVAPTECSGRADCGFTSESYQQGVLSATILYEILLGKATLYAVLVSALVLMAMVKRKDSRGRAKRSGSGVKQTLNFDLLKLAGDVESNPGPTSMDWIWRILFLVGAATGAHSGPQLQLQESGPGLVKPSETLSLTCTVSGDSISSGDYYWGWIRQPPGKGLEWIGHIYYSGVTYYNPSLKSRVTISVDTSRNQFSLKLSSVTAADTAVYYCTREDSSNWRSRGQGTLVTVSSGSGGGGSGGGGSGGGGSFEQMQLVQSGAEVKKPGSSVKVSCKASGGTFSSYAISWVRQAPGQGLEWMGGIIPIFGTANYAQKFQGRVTITADKSTSTAYMELSSLRSDDTAVYYCARDELWATNYYYMDVWGKGTLVTVSSTRASTKGPSVFPLAPSSKSTSGGTAALGCLVKDYFPEPVTVSWNSGALTSGVHTFPAVLQSSGLYSLSSVVTVPSSSLGTQTYICNVNHKPSNTKVDKRVEPKSCIPEDTFFPSPESSCDVKLVEKSFETDTNLNFQNLSVIGFRILLLKVAGFNLLMTLRLWSS

SEQ ID NO: 19958 - protein, 762 aa, Artificial Sequence
  Synthetic Polypeptide
MALPVTALLLPLALLLHAARPEVQVLESGGGLVQPGGSLRLSCAASGFTFSNFAMSWVRQAPGKGLEWVSTISGSAGTTDYADSVKGRFTISRDNSKKTLYLQMNSLRVEDTAVYYCADGRGPFFDYRGQGTLVTVSSGTGGGGSGGGGSGGGGSEFQSALTQPRSVSGSPGQSVTISCTGTSSDVGSYNYVSWYQQSPGKAPKLMIYDVSNRPSGVSNRFSGSKSGNTASLTISGLQSEDEADYYCTSYGSYDIPVIFGGGTKVEIKLEDLKNVFPPEVAVFEPSEAEISHTQKATLVCLATGFYPDHVELSWWVNGKEVHSGVCTDPQPLKEQPALNDSRYCLSSRLRVSATFWQNPRNHFRCQVQFYGLSENDEWTQDRAKPVTQIVSAEAWGRADCGFTSESYQQGVLSATILYEILLGKATLYAVLVSALVLMAMVKRKDSRGRAKRSGSGATNFSLLKQAGDVEENPGPTSMDWIWRILFLVGAATGAHSFEQMQLVQSGAEVKKPGSSVKVSCKASGGTFSSYAISWVRQAPGQGLEWMGGIIPIFGTANYAQKFQGRVTITADKSTSTAYMELSSLRSDDTAVYYCARDELWATNYYYMDVWGKGTLVTVSSTRIQNPDPAVYQLRDSKSSDKSVCLFTDFDSQTNVSQSKDSDVYITDKCVLDMRSMDFKSNSAVAWSNKSDFACANAFNNSIIPEDTFFPSPESSCDVKLVEKSFETDTNLNFQNLSVIGFRILLLKVAGFNLLMTLRLWSS

SEQ ID NO: 19959 - protein, 763 aa, Artificial Sequence
  Synthetic Polypeptide
MALPVTALLLPLALLLHAARPQSALTQPRSVSGSPGQSVTISCTGTSSDVGSYNYVSWYQQSPGKAPKLMIYDVSNRPSGVSNRFSGSKSGNTASLTISGLQSEDEADYYCTSYGSYDIPVIFGGGTKVEIKLEDLKNVFPPEVAVFEPSEAEISHTQKATLVCLATGFYPDHVELSWWVNGKEVHSGVCTDPQPLKEQPALNDSRYCLSSRLRVSATFWQNPRNHFRCQVQFYGLSENDEWTQDRAKPVTQIVSAEAWGRADCGFTSESYQQGVLSATILYEILLGKATLYAVLVSALVLMAMVKRKDSRGRAKRSGSGATNFSLLKQAGDVEENPGPTSMDWIWRILFLVGAATGAHSGPEVQLVESGGGLVQAGGSLRLSCAASGRTFSMGWFRQAPGKEREFVAAITYSGGSPYYADSVKGRFTISRDNAKNTVYLQMNSLKPEDTAVYYCAANPTYGSDWNAENWGQGTQVTVSSGSGGGGSGGGGSGGGGSFEQMQLVQSGAEVKKPGSSVKVSCKASGGTFSSYAISWVRQAPGQGLEWMGGIIPIFGTANYAQKFQGRVTITADKSTSTAYMELSSLRSDDTAVYYCARDELWATNYYYMDVWGKGTLVTVSSTRIQNPDPAVYQLRDSKSSDKSVCLFTDFDSQTNVSQSKDSDVYITDKCVLDMRSMDFKSNSAVAWSNKSDFACANAFNNSIIPEDTFFPSPESSCDVKLVEKSFETDTNLNFQNLSVIGFRILLLKVAGFNLLMTLRLWSS

SEQ ID NO: 19960 - protein, 890 aa, Artificial Sequence
  Synthetic Polypeptide
MALPVTALLLPLALLLHAARPQSALTQPRSVSGSPGQSVTISCTGTSSDVGSYNYVSWYQQSPGKAPKLMIYDVSNRPSGVSNRFSGSKSGNTASLTISGLQSEDEADYYCTSYGSYDIPVIFGGGTKVEIKLEDLKNVFPPEVAVFEPSEAEISHTQKATLVCLATGFYPDHVELSWWVNGKEVHSGVCTDPQPLKEQPALNDSRYCLSSRLRVSATFWQNPRNHFRCQVQFYGLSENDEWTQDRAKPVTQIVSAEAWGRADCGFTSESYQQGVLSATILYEILLGKATLYAVLVSALVLMAMVKRKDSRGRAKRSGSGATNFSLLKQAGDVEENPGPTSMDWIWRILFLVGAATGAHSQLQLQESGPGLVKPSETLSLTCTVSGGSISSGDYYWGWIRQPPGKGLEWIGSISYSGSTYYNPSLKSRVTISVDTSRNQFSLKLSSVTAADTAVYYCTREDSSNWRSRGQGTLVTVSSSGGGGSGGGGSEVQLVESGGGLVQAGGSLRLSCAASGRTFSMGWFRQAPGKEREFVAAITYSGGSPYYADSVKGRFTISRDNAKNTVYLQMNSLKPEDTAVYYCAANPTYGSDWNAENWGQGTQVTVSSGSGGGGSGGGGSGGGGSFEQMQLVQSGAEVKKPGSSVKVSCKASGGTFSSYAISWVRQAPGQGLEWMGGIIPIFGTANYAQKFQGRVTITADKSTSTAYMELSSLRSDDTAVYYCARDELWATNYYYMDVWGKGTLVTVSSTRIQNPDPAVYQLRDSKSSDKSVCLFTDFDSQTNVSQSKDSDVYITDKCVLDMRSMDFKSNSAVAWSNKSDFACANAFNNSIIPEDTFFPSPESSCDVKLVEKSFETDTNLNFQNLSVIGFRILLLKVAGFNLLMTLRLWSS

SEQ ID NO: 19961 - protein, 899 aa, Artificial Sequence
  Synthetic Polypeptide
MALPVTALLLPLALLLHAARPEVQVLESGGGLVQPGGSLRLSCAASGFTFSNFAMSWVRQAPGKGLEWVSTISGSAGTTDYADSVKGRFTISRDNSKKTLYLQMNSLRVEDTAVYYCADGRGPFFDYRGQGTLVTVSSGTGGGGSGGGGSGGGGSEFQSALTQPRSVSGSPGQSVTISCTGTSSDVGSYNYVSWYQQSPGKAPKLMIYDVSNRPSGVSNRFSGSKSGNTASLTISGLQSEDEADYYCTSYGSYDIPVIFGGGTKVEIKLEDLKNVFPPEVAVFEPSEAEISHTQKATLVCLATGFYPDHVELSWWVNGKEVHSGVCTDPQPLKEQPALNDSRYCLSSRLRVSATFWQNPRNHFRCQVQFYGLSENDEWTQDRAKPVTQIVSAEAWGRADCGFTSESYQQGVLSATILYEILLGKATLYAVLVSALVLMAMVKRKDSRGRAKRSGSGATNFSLLKQAGDVEENPGPTSMDWIWRILFLVGAATGAHSGPEVQLVESGGGLVQAGGSLRLSCAASGRTFSMGWFRQAPGKEREFVAAITYSGGSPYYASSVRGRFTISRDNAKNTVYLQMNSLKPEDTAVYYCAANPTYGSDWNAENWGQGTQVTVSSGSGGGGSGGGGSGGGGSFEQMQLVQSGAEVKKPGSSVKVSCKASGGTFSSYAISWVRQAPGQGLEWMGGIIPIFGTANYAQKFQGRVTITADKSTSTAYMELSSLRSDDTAVYYCARDELWATNYYYMDVWGKGTLVTVSSTRIQNPDPAVYQLRDSKSSDKSVCLFTDFDSQTNVSQSKDSDVYITDKCVLDMRSMDFKSNSAVAWSNKSDFACANAFNNSIIPEDTFFPSPESSCDVKLVEKSFETDTNLNFQNLSVIGFRILLLKVAGFNLLMTLRLWSS

SEQ ID NO: 19962 - protein, 723 aa, Artificial Sequence
  Synthetic Polypeptide
MALPVTALLLPLALLLHAARPDVVMTQSPSSLSASVGDRVTITCKASQSVSSYLNWYQQKPGKAPKLLIYAASSLETGVPSRFSGSGSGTDFTLTISSLQPEDFATYYCQQSYSTPWTFGQGTKVEIKRGGGGSGGGGSGGGGSEVQLVESGGGLVRPGGSLRLSCAASGFTFDDYGMSWVRQAPGKGLEWVSGISWNSGSIGYADSVKGRFTISRDNAKNSLYLQMNSLRAEDTALYYCAKRGNSNSFDYWGQGTTVTVSSTREQKLISEEDLAKPTTTPAPRPPTPAPTIASQPLSLRPEACRPAAGGAVHTRGLDFACDIYIWAPLAGTCGVLLLSLVITLYCKRGRKKLLYIFKQPFMRPVQTTQEEDGCSCRFPEEEEGGCELRVKFSRSADAPAYQQGQNQLYNELNLGRREEYDVLDKRRGRDPEMGGKPRRKNPQEGLYNELQKDKMAEAYSEIGMKGERRRGKGHDGLYQGLSTATKDTYDALHMQALPPRSSGSGEGRGSLLTCGDVEENPGPHMTEYKPTVRLATRDDVPRAVRTLAAAFADYPATRHTVDPDRHIERVTELQELFLTRVGLDIGKVWVADDGAAVAVWTTPESVEAGAVFAEIGPRMAELSGSRLAAQQQMEGLLAPHRPKEPAWFLATVGVSPDHQGKGLGSAVVLPGVEAAERAGVPAFLETSAPRNLPFYERLGFTVTADVEVPEGPRTWCMTRKPGA

SEQ ID NO: 19963 - protein, 717 aa, Artificial Sequence
  Synthetic Polypeptide
MALPVTALLLPLALLLHAARPDVVMTQSPSSLSASVGDRVTITCKASQSVSSYLNWYQQKPGKAPKLLIYAASSLETGVPSRFSGSGSGTDFTLTISSLQPEDFATYYCQQSYSTPWTFGQGTKVEIKRGGGGSGGGGSGGGGSEVQLVESGGGLVRPGGSLRLSCAASGFTFDDYGMSWVRQAPGKGLEWVSGISWNSGSIGYADSVKGRFTISRDNAKNSLYLQMNSLRAEDTALYYCAKRGNSNSFDYWGQGTTVTVSSTREQKLISEEDLKIEVMYPPPYLDNEKSNGTIIHVKGKHLCPSPLFPGPSKPFWVLVVVGGVLACYSLLVTVAFIIFWVRSKRSRLLHSDYMNMTPRRPGPTRKHYQPYAPPRDFAAYRSRVKFSRSADAPAYQQGQNQLYNELNLGRREEYDVLDKRRGRDPEMGGKPRRKNPQEGLYNELQKDKMAEAYSEIGMKGERRRGKGHDGLYQGLSTATKDTYDALHMQALPPRSSGSGEGRGSLLTCGDVEENPGPHMTEYKPTVRLATRDDVPRAVRTLAAAFADYPATRHTVDPDRHIERVTELQELFLTRVGLDIGKVWVADDGAAVAVWTTPESVEAGAVFAEIGPRMAELSGSRLAAQQQMEGLLAPHRPKEPAWFLATVGVSPDHQGKGLGSAVVLPGVEAAERAGVPAFLETSAPRNLPFYERLGFTVTADVEVPEGPRTWCMTRKPGA

SEQ ID NO: 19964 - protein, 494 aa, Artificial Sequence
  Synthetic Polypeptide
MALPVTALLLPLALLLHAARPDVVMTQSPSSLSASVGDRVTITCKASQSVSSYLNWYQQKPGKAPKLLIYAASSLETGVPSRFSGSGSGTDFTLTISSLQPEDFATYYCQQSYSTPWTFGQGTKVEIKRGGGGSGGGGSGGGGSEVQLVESGGGLVRPGGSLRLSCAASGFTFDDYGMSWVRQAPGKGLEWVSGISWNSGSIGYADSVKGRFTISRDNAKNSLYLQMNSLRAEDTALYYCAKRGNSNSFDYWGQGTTVTVSSTREQKLISEEDLKIEVMYPPPYLDNEKSNGTIIHVKGKHLCPSPLFPGPSKPFWVLVVVGGVLACYSLLVTVAFIIFWVRSKRSRLLHSDYMNMTPRRPGPTRKHYQPYAPPRDFAAYRSRVKFSRSADAPAYQQGQNQLYNELNLGRREEYDVLDKRRGRDPEMGGKPRRKNPQEGLYNELQKDKMAEAYSEIGMKGERRRGKGHDGLYQGLSTATKDTYDALHMQALPPR

SEQ ID NO: 19965 - protein, 500 aa, Artificial Sequence
  Synthetic Polypeptide
MALPVTALLLPLALLLHAARPDVVMTQSPSSLSASVGDRVTITCKASQSVSSYLNWYQQKPGKAPKLLIYAASSLETGVPSRFSGSGSGTDFTLTISSLQPEDFATYYCQQSYSTPWTFGQGTKVEIKRGGGGSGGGGSGGGGSEVQLVESGGGLVRPGGSLRLSCAASGFTFDDYGMSWVRQAPGKGLEWVSGISWNSGSIGYADSVKGRFTISRDNAKNSLYLQMNSLRAEDTALYYCAKRGNSNSFDYWGQGTTVTVSSTREQKLISEEDLAKPTTTPAPRPPTPAPTIASQPLSLRPEACRPAAGGAVHTRGLDFACDIYIWAPLAGTCGVLLLSLVITLYCKRGRKKLLYIFKQPFMRPVQTTQEEDGCSCRFPEEEEGGCELRVKFSRSADAPAYQQGQNQLYNELNLGRREEYDVLDKRRGRDPEMGGKPRRKNPQEGLYNELQKDKMAEAYSEIGMKGERRRGKGHDGLYQGLSTATKDTYDALHMQALPPR

SEQ ID NO: 19966 - protein, 500 aa, Artificial Sequence
  Synthetic Polypeptide
MALPVTALLLPLALLLHAARPEVQLVESGGGLVRPGGSLRLSCAASGFTFDDYGMSWVRQAPGKGLEWVSGISWNSGSIGYADSVKGRFTISRDNAKNSLYLQMNSLRAEDTALYYCAKRGNSNSFDYWGQGTTVTVSSGGGGSGGGGSGGGGSDVVMTQSPSSLSASVGDRVTITCKASQSVSSYLNWYQQKPGKAPKLLIYAASSLETGVPSRFSGSGSGTDFTLTISSLQPEDFATYYCQQSYSTPWTFGQGTKVEIKRTREQKLISEEDLAKPTTTPAPRPPTPAPTIASQPLSLRPEACRPAAGGAVHTRGLDFACDIYIWAPLAGTCGVLLLSLVITLYCKRGRKKLLYIFKQPFMRPVQTTQEEDGCSCRFPEEEEGGCELRVKFSRSADAPAYQQGQNQLYNELNLGRREEYDVLDKRRGRDPEMGGKPRRKNPQEGLYNELQKDKMAEAYSEIGMKGERRRGKGHDGLYQGLSTATKDTYDALHMQALPPR

SEQ ID NO: 19967 - protein, 913 aa, Artificial Sequence
  Synthetic Polypeptide
MALPVTALLLPLALLLHAARPDVVMTQSPSSLSASVGDRVTITCKASQSVSSYLNWYQQKPGKAPKLLIYAASSLETGVPSRFSGSGSGTDFTLTISSLQPEDFATYYCQQSYSTPWTFGQGTKVEIKRGGGGSGGGGSGGGGSEVQLVESGGGLVRPGGSLRLSCAASGFTFDDYGMSWVRQAPGKGLEWVSGISWNSGSIGYADSVKGRFTISRDNAKNSLYLQMNSLRAEDTALYYCAKRGNSNSFDYWGQGTTVTVSSTREQKLISEEDLAKPTTTPAPRPPTPAPTIASQPLSLRPEACRPAAGGAVHTRGLDFACDIYIWAPLAGTCGVLLLSLVITLYCGRARVKFSRSADAPAYQQGQNQLYNELNLGRREEYDVLDKRRGRDPEMGGKPRRKNPQEGLYNELQKDKMAEAYSEIGMKGERRRGKGHDGLYQGLSTATKDTYDALHMQALPPRSRGSGATNFSLLKQAGDVEENPGPGIHMATYEVLCEVARKLGTDDREVVLFLLNVFIPQPTLAQLIGALRALKEEGRLTFPLLAECLFRAGRRDLLRDLLHLDPRFLERHLAGTMSYFSPYQLTVLHVDGELCARDIRSLIFLSKDTIGSRSTPQTFLHWVYCMENLDLLGPTDVDALMSMLRSLSRVDLQRQVQTLMGLHLSGPSHSQHYRHTPLETDFYDYKDDDDKTSGSGEGRGSLLTCGDVEENPGPHMTEYKPTVRLATRDDVPRAVRTLAAAFADYPATRHTVDPDRHIERVTELQELFLTRVGLDIGKVWVADDGAAVAVWTTPESVEAGAVFAEIGPRMAELSGSRLAAQQQMEGLLAPHRPKEPAWFLATVGVSPDHQGKGLGSAVVLPGVEAAERAGVPAFLETSAPRNLPFYERLGFTVTADVEVPEGPRTWCMTRKPGA

SEQ ID NO: 19968 - protein, 853 aa, Artificial Sequence
  Synthetic Polypeptide
MALPVTALLLPLALLLHAARPDVVMTQSPSSLSASVGDRVTITCKASQSVSSYLNWYQQKPGKAPKLLIYAASSLETGVPSRFSGSGSGTDFTLTISSLQPEDFATYYCQQSYSTPWTFGQGTKVEIKRLEIQNPDPAVYQLRDSKSSDKSVCLFTDFDSQTNVSQSKDSDVYITDKCVLDMRSMDFKSNSAVAWSNKSDFACANAFNNSIIPEDTFFPSSDVPCDVKLVEKSFETDTNLNFQNLSVIGFRILLLKVAGFNLLMTLRLWSSRAKRSGSGVKQTLNFDLLKLAGDVESNPGPTSMDWIWRILFLVGAATGAHSFEEVQLVESGGGLVRPGGSLRLSCAASGFTFDDYGMSWVRQAPGKGLEWVSGISWNSGSIGYADSVKGRFTISRDNAKNSLYLQMNSLRAEDTALYYCAKRGNSNSFDYWGQGTTVTVSSTREDLKNVFPPEVAVFEPSKAEIAHTQKATLVCLATGFYPDHVELSWWVNGKEVHSGVCTDPQPLKEQPALNDSRYCLSSRLRVSATFWQNPRNHFRCQVQFYGLSENDEWTQDRAKPVTQIVSAEAWGRADCGITSASYHQGVLSATILYEILLGKATLYAVLVSALVLMAMVKRKDSRGRAKRSGSGATNFSLLKQAGDVEENPGPSRGHMTEYKPTVRLATRDDVPRAVRTLAAAFADYPATRHTVDPDRHIERVTELQELFLTRVGLDIGKVWVADDGAAVAVWTTPESVEAGAVFAEIGPRMAELSGSRLAAQQQMEGLLAPHRPKEPAWFLATVGVSPDHQGKGLGSAVVLPGVEAAERAGVPAFLETSAPRNLPFYERLGFTVTADVEVPEGPRTWCMTRKPGA

SEQ ID NO: 19969 - protein, 852 aa, Artificial Sequence
  Synthetic Polypeptide
MALPVTALLLPLALLLHAARPDVVMTQSPSSLSASVGDRVTITCKASQSVSSYLNWYQQKPGKAPKLLIYAASSLETGVPSRFSGSGSGTDFTLTISSLQPEDFATYYCQQSYSTPWTFGQGTKVEIKRLEDLKNVFPPEVAVFEPSKAEIAHTQKATLVCLATGFYPDHVELSWWVNGKEVHSGVCTDPQPLKEQPALNDSRYCLSSRLRVSATFWQNPRNHFRCQVQFYGLSENDEWTQDRAKPVTQIVSAEAWGRADCGITSASYHQGVLSATILYEILLGKATLYAVLVSALVLMAMVKRKDSRGRAKRSGSGATNFSLLKQAGDVEENPGPTSMDWIWRILFLVGAATGAHSFEEVQLVESGGGLVRPGGSLRLSCAASGFTFDDYGMSWVRQAPGKGLEWVSGISWNSGSIGYADSVKGRFTISRDNAKNSLYLQMNSLRAEDTALYYCAKRGNSNSFDYWGQGTTVTVSSTRIQNPDPAVYQLRDSKSSDKSVCLFTDFDSQTNVSQSKDSDVYITDKCVLDMRSMDFKSNSAVAWSNKSDFACANAFNNSIIPEDTFFPSSDVPCDVKLVEKSFETDTNLNFQNLSVIGFRILLLKVAGFNLLMTLRLWSSRAKRSGSGVKQTLNFDLLKLAGDVESNPGPSRGHMTEYKPTVRLATRDDVPRAVRTLAAAFADYPATRHTVDPDRHIERVTELQELFLTRVGLDIGKVWVADDGAAVAVWTTPESVEAGAVFAEIGPRMAELSGSRLAAQQQMEGLLAPHRPKEPAWFLATVGVSPDHQGKGLGSAVVLPGVEAAERAGVPAFLETSAPRNLPFYERLGFTVTADVEVPEGPRTWCMTRKPGA

SEQ ID NO: 19970 - protein, 619 aa, Artificial Sequence
  Synthetic Polypeptide
MALPVTALLLPLALLLHAARPDVVMTQSPSSLSASVGDRVTITCKASQSVSSYLNWYQQKPGKAPKLLIYAASSLETGVPSRFSGSGSGTDFTLTISSLQPEDFATYYCQQSYSTPWTFGQGTKVEIKRLEDLKNVFPPEVAVFEPSEAEISHTQKATLVCLATGFYPDHVELSWWVNGKEVHSGVCTDPQPLKEQPALNDSRYCLSSRLRVSATFWQNPRNHFRCQVQFYGLSENDEWTQDRAKPVTQIVSAEAWGRADCGFTSESYQQGVLSATILYEILLGKATLYAVLVSALVLMAMVKRKDSRGRAKRSGSGATNFSLLKQAGDVEENPGPTSMDWIWRILFLVGAATGAHSFEEVQLVESGGGLVRPGGSLRLSCAASGFTFDDYGMSWVRQAPGKGLEWVSGISWNSGSIGYADSVKGRFTISRDNAKNSLYLQMNSLRAEDTALYYCAKRGNSNSFDYWGQGTTVTVSSTRIQNPDPAVYQLRDSKSSDKSVCLFTDFDSQTNVSQSKDSDVYITDKCVLDMRSMDFKSNSAVAWSNKSDFACANAFNNSIIPEDTFFPSPESSCDVKLVEKSFETDTNLNFQNLSVIGFRILLLKVAGFNLLMTLRLWSS

SEQ ID NO: 19971 - protein, 844 aa, Artificial Sequence
  Synthetic Polypeptide
MALPVTALLLPLALLLHAARPDVVMTQSPSSLSASVGDRVTITCKASQSVSSYLNWYQQKPGKAPKLLIYAASSLETGVPSRFSGSGSGTDFTLTISSLQPEDFATYYCQQSYSTPWTFGQGTKVEIKRLEDLKNVFPPEVAVFEPSEAEISHTQKATLVCLATGFYPDHVELSWWVNGKEVHSGVCTDPQPLKEQPALNDSRYCLSSRLRVSATFWQNPRNHFRCQVQFYGLSENDEWTQDRAKPVTQIVSAEAWGRADCGFTSESYQQGVLSATILYEILLGKATLYAVLVSALVLMAMVKRKDSRGRAKRSGSGATNFSLLKQAGDVEENPGPTSMDWIWRILFLVGAATGAHSFEEVQLVESGGGLVRPGGSLRLSCAASGFTFDDYGMSWVRQAPGKGLEWVSGISWNSGSIGYADSVKGRFTISRDNAKNSLYLQMNSLRAEDTALYYCAKRGNSNSFDYWGQGTTVTVSSTRIQNPDPAVYQLRDSKSSDKSVCLFTDFDSQTNVSQSKDSDVYITDKCVLDMRSMDFKSNSAVAWSNKSDFACANAFNNSIIPEDTFFPSPESSCDVKLVEKSFETDTNLNFQNLSVIGFRILLLKVAGFNLLMTLRLWSSRAKRSGSGVKQTLNFDLLKLAGDVESNPGPSRGGIHTMATYEVLCEVARKLGTDDREVVLFLLNVFIPQPTLAQLIGALRALKEEGRLTFPLLAECLFRAGRRDLLRDLLHLDPRFLERHLAGTMSYFSPYQLTVLHVDGELCARDIRSLIFLSKDTIGSRSTPQTFLHWVYCMENLDLLGPTDVDALMSMLRSLSRVDLQRQVQTLMGLHLSGPSHSQHYRHTP

SEQ ID NO: 19972 - protein, 623 aa, Artificial Sequence
  Synthetic Polypeptide
MALPVTALLLPLALLLHAARPDVVMTQSPSSLSASVGDRVTITCKASQSVSSYLNWYQQKPGKAPKLLIYAASSLETGVPSRFSGSGSGTDFTLTISSLQPEDFATYYCQQSYSTPWTFGQGTKVEIKRLEIQNPDPAVYQLRDSKSSDKSVCLFTDFDSQTNVSQSKDSDVYITDKCVLDMRSMDFKSNSAVAWSNKSDFACANAFNNSIIPEDTFFPSPESSCDVKLVEKSFETDTNLNFQNLSVIGFRILLLKVAGFNLLMTLRLWSSRAKRSGSGVKQTLNFDLLKLAGDVESNPGPTSMDWIWRILFLVGAATGAHSFEEVQLVESGGGLVRPGGSLRLSCAASGFTFDDYGMSWVRQAPGKGLEWVSGISWNSGSIGYADSVKGRFTISRDNAKNSLYLQMNSLRAEDTALYYCAKRGNSNSFDYWGQGTTVTVSSTREDLKNVFPPEVAVFEPSEAEISHTQKATLVCLATGFYPDHVELSWWVNGKEVHSGVCTDPQPLKEQPALNDSRYCLSSRLRVSATFWQNPRNHFRCQVQFYGLSENDEWTQDRAKPVTQIVSAEAWGRADCGFTSESYQQGVLSATILYEILLGKATLYAVLVSALVLMAMVKRKDSRG

SEQ ID NO: 19973 - protein, 845 aa, Artificial Sequence
  Synthetic Polypeptide
MALPVTALLLPLALLLHAARPDVVMTQSPSSLSASVGDRVTITCKASQSVSSYLNWYQQKPGKAPKLLIYAASSLETGVPSRFSGSGSGTDFTLTISSLQPEDFATYYCQQSYSTPWTFGQGTKVEIKRLEIQNPDPAVYQLRDSKSSDKSVCLFTDFDSQTNVSQSKDSDVYITDKCVLDMRSMDFKSNSAVAWSNKSDFACANAFNNSIIPEDTFFPSPESSCDVKLVEKSFETDTNLNFQNLSVIGFRILLLKVAGFNLLMTLRLWSSRAKRSGSGVKQTLNFDLLKLAGDVESNPGPTSMDWIWRILFLVGAATGAHSFEEVQLVESGGGLVRPGGSLRLSCAASGFTFDDYGMSWVRQAPGKGLEWVSGISWNSGSIGYADSVKGRFTISRDNAKNSLYLQMNSLRAEDTALYYCAKRGNSNSFDYWGQGTTVTVSSTREDLKNVFPPEVAVFEPSEAEISHTQKATLVCLATGFYPDHVELSWWVNGKEVHSGVCTDPQPLKEQPALNDSRYCLSSRLRVSATFWQNPRNHFRCQVQFYGLSENDEWTQDRAKPVTQIVSAEAWGRADCGFTSESYQQGVLSATILYEILLGKATLYAVLVSALVLMAMVKRKDSRGRAKRSGSGATNFSLLKQAGDVEENPGPSRGGIHTMATYEVLCEVARKLGTDDREVVLFLLNVFIPQPTLAQLIGALRALKEEGRLTFPLLAECLFRAGRRDLLRDLLHLDPRFLERHLAGTMSYFSPYQLTVLHVDGELCARDIRSLIFLSKDTIGSRSTPQTFLHWVYCMENLDLLGPTDVDALMSMLRSLSRVDLQRQVQTLMGLHLSGPSHSQHYRHTP

SEQ ID NO: 19974 - protein, 897 aa, Artificial Sequence
  Synthetic Polypeptide
MALPVTALLLPLALLLHAARPLEGKPIPNPLLGLDSTGSGEDLKNVFPPEVAVFEPSKAEIAHTQKATLVCLATGFYPDHVELSWWVNGKEVHSGVCTDPQPLKEQPALNDSRYCLSSRLRVSATFWQNPRNHFRCQVQFYGLSENDEWTQDRAKPVTQIVSAEAWGRADCGITSASYHQGVLSATILYEILLGKATLYAVLVSALVLMAMVKRKDSRGRAKRSGSGATNFSLLKQAGDVEENPGPTSMALPVTALLLPLALLLHAARPDVVMTQSPSSLSASVGDRVTITCKASQSVSSYLNWYQQKPGKAPKLLIYAASSLETGVPSRFSGSGSGTDFTLTISSLQPEDFATYYCQQSYSTPWTFGQGTKVEIKRGGGGSGGGGSGGGGSEVQLVESGGGLVRPGGSLRLSCAASGFTFDDYGMSWVRQAPGKGLEWVSGISWNSGSIGYADSVKGRFTISRDNAKNSLYLQMNSLRAEDTALYYCAKRGNSNSFDYWGQGTTVTVSSTREQKLISEEDGSGIQNPDPAVYQLRDSKSSDKSVCLFTDFDSQTNVSQSKDSDVYITDKCVLDMRSMDFKSNSAVAWSNKSDFACANAFNNSIIPEDTFFPSSDVPCDVKLVEKSFETDTNLNFQNLSVIGFRILLLKVAGFNLLMTLRLWSSRAKRSGSGVKQTLNFDLLKLAGDVESNPGPSRGHMTEYKPTVRLATRDDVPRAVRTLAAAFADYPATRHTVDPDRHIERVTELQELFLTRVGLDIGKVWVADDGAAVAVWTTPESVEAGAVFAEIGPRMAELSGSRLAAQQQMEGLLAPHRPKEPAWFLATVGVSPDHQGKGLGSAVVLPGVEAAERAGVPAFLETSAPRNLPFYERLGFTVTADVEVPEGPRTWCMTRKPGA

SEQ ID NO: 19975 - protein, 898 aa, Artificial Sequence
  Synthetic Polypeptide
MALPVTALLLPLALLLHAARPLEQKLISEEDLGSGDRPDPAVYQLRDSKSSDKSVCLFTDFDSQTNVSQSKDSDVYITDKCVLDMRSMDFKSNSAVAWSNKSDFACANAFNNSIIPEDTFFPSPESSCDVKLVEKSFETDTNLNFQNLSVIGFRILLLKVAGFNLLMTLRLWSSSSRAKRSGSGVKQTLNFDLLKLAGDVESNPGPTSMALPVTALLLPLALLLHAARPDVVMTQSPSSLSASVGDRVTITCKASQSVSSYLNWYQQKPGKAPKLLIYAASSLETGVPSRFSGSGSGTDFTLTISSLQPEDFATYYCQQSYSTPWTFGQGTKVEIKRGGGGSGGGGSGGGGSEVQLVESGGGLVRPGGSLRLSCAASGFTFDDYGMSWVRQAPGKGLEWVSGISWNSGSIGYADSVKGRFTISRDNAKNSLYLQMNSLRAEDTALYYCAKRGNSNSFDYWGQGTTVTVSSTRGKPIPNPLLGLDSTGSGEDLKNVFPPEVAVFEPSEAEISHTQKATLVCLATGFYPDHVELSWWVNGKEVHSGVCTDPQPLKEQPALNDSRYCLSSRLRVSATFWQNPRNHFRCQVQFYGLSENDEWTQDRAKPVTQIVSAEAWGRADCGFTSESYQQGVLSATILYEILLGKATLYAVLVSALVLMAMVKRKDSRGRAKRSGSGATNFSLLKQAGDVEENPGPSRGHMTEYKPTVRLATRDDVPRAVRTLAAAFADYPATRHTVDPDRHIERVTELQELFLTRVGLDIGKVWVADDGAAVAVWTTPESVEAGAVFAEIGPRMAELSGSRLAAQQQMEGLLAPHRPKEPAWFLATVGVSPDHQGKGLGSAVVLPGVEAAERAGVPAFLETSAPRNLPFYERLGFTVTADVEVPEGPRTWCMTRKPGA

SEQ ID NO: 19976 - protein, 852 aa, Artificial Sequence
  Synthetic Polypeptide
MALPVTALLLPLALLLHAARPDVVMTQSPSSLSASVGDRVTITCKASQSVSSYLNWYQQKPGKAPKLLIYAASSLETGVPSRFSGSGSGTDFTLTISSLQPEDFATYYCQQSYSTPWTFGQGTKVEIKRLEDLKNVFPPEVAVFEPSEAEISHTQKATLVCLATGFYPDHVELSWWVNGKEVHSGVSTDPQPLKEQPALNDSRYCLSSRLRVSATFWQNPRNHFRCQVQFYGLSENDEWTQDRAKPVTQIVSAEAWGRADCGFTSESYQQGVLSATILYEILLGKATLYAVLVSALVLMAMVKRKDSRGRAKRSGSGATNFSLLKQAGDVEENPGPTSMDWIWRILFLVGAATGAHSFEEVQLVESGGGLVRPGGSLRLSCAASGFTFDDYGMSWVRQAPGKGLEWVSGISWNSGSIGYADSVKGRFTISRDNAKNSLYLQMNSLRAEDTALYYCAKRGNSNSFDYWGQGTTVTVSSTRIQNPDPAVYQLRDSKSSDKSVCLFTDFDSQTNVSQSKDSDVYITDKTVLDMRSMDFKSNSAVAWSNKSDFACANAFNNSIIPEDTFFPSPESSCDVKLVEKSFETDTNLNFQNLSVIGFRILLLKVAGFNLLMTLRLWSSRAKRSGSGVKQTLNFDLLKLAGDVESNPGPSRGHMTEYKPTVRLATRDDVPRAVRTLAAAFADYPATRHTVDPDRHIERVTELQELFLTRVGLDIGKVWVADDGAAVAVWTTPESVEAGAVFAEIGPRMAELSGSRLAAQQQMEGLLAPHRPKEPAWFLATVGVSPDHQGKGLGSAVVLPGVEAAERAGVPAFLETSAPRNLPFYERLGFTVTADVEVPEGPRTWCMTRKPGA

SEQ ID NO: 19977 - protein, 934 aa, Artificial Sequence
  Synthetic Polypeptide
MALPVTALLLPLALLLHAARPDVVMTQSPSSLSASVGDRVTITCKASQSVSSYLNWYQQKPGKAPKLLIYAASSLETGVPSRFSGSGSGTDFTLTISSLQPEDFATYYCQQSYSTPWTFGQGTKVEIKRLEDLKNVFPPEVAVFEPSEAEISHTQKATLVCLATGFYPDHVELSWWVNGKEVHSGVSTDPQPLKEQPALNDSRYCLSSRLRVSATFWQNPRNHFRCQVQFYGLSENDEWTQDRAKPVTQIVSAEAWGRADCGFTSESYQQGVLSATILYEILLGKATLYAVLVSALVLMAMVKRKDSRGRAKRSGSGATNFSLLKQAGDVEENPGPTSMDWIWRILFLVGAATGAHSFEEVQLVESGGGLVRPGGSLRLSCAASGFTFDDYGMSWVRQAPGKGLEWVSGISWNSGSIGYADSVKGRFTISRDNAKNSLYLQMNSLRAEDTALYYCAKRGNSNSFDYWGQGTTVTVSSTREQKLISEEDGSGTPFPSLAPPIMLLVDGKQQMVVVCLVLDVAPPGLDSPIWFSAGNGSALDAFTYGPSPATDGTWTNLAHLSLPSEELASWEPLVCHTGPGAEGHSRSTQPMHLSGEASTARTCPQEPLRGTPGGALWLGVLRLLLFKLLLFDLLLTCSCLCDPAGPLPSPATTTRLRALGSHRLHPATETGGREATSSPRPQPRDRRWGDTPPGRKPGSPVRAKRSGSGVKQTLNFDLLKLAGDVESNPGPSRGHMTEYKPTVRLATRDDVPRAVRTLAAAFADYPATRHTVDPDRHIERVTELQELFLTRVGLDIGKVWVADDGAAVAVWTTPESVEAGAVFAEIGPRMAELSGSRLAAQQQMEGLLAPHRPKEPAWFLATVGVSPDHQGKGLGSAVVLPGVEAAERAGVPAFLETSAPRNLPFYERLGFTVTADVEVPEGPRTWCMTRKPGA

SEQ ID NO: 19978 - protein, 952 aa, Artificial Sequence
  Synthetic Polypeptide
MALPVTALLLPLALLLHAARPLEDLKNVFPPEVAVFEPSEAEISHTQKATLVCLATGFYPDHVELSWWVNGKEVHSGVSTDPQPLKEQPALNDSRYCLSSRLRVSATFWQNPRNHFRCQVQFYGLSENDEWTQDRAKPVTQIVSAEAWGRADCGFTSESYQQGVLSATILYEILLGKATLYAVLVSALVLMAMVKRKDSRGRAKRSGSGATNFSLLKQAGDVEENPGPTSMALPVTALLLPLALLLHAARPDVVMTQSPSSLSASVGDRVTITCKASQSVSSYLNWYQQKPGKAPKLLIYAASSLETGVPSRFSGSGSGTDFTLTISSLQPEDFATYYCQQSYSTPWTFGQGTKVEIKRGGGGSGGGGSGGGGSEVQLVESGGGLVRPGGSLRLSCAASGFTFDDYGMSWVRQAPGKGLEWVSGISWNSGSIGYADSVKGRFTISRDNAKNSLYLQMNSLRAEDTALYYCAKRGNSNSFDYWGQGTTVTVSSTREQKLISEEDLGSGTPFPSLAPPIMLLVDGKQQMVVVCLVLDVAPPGLDSPIWFSAGNGSALDAFTYGPSPATDGTWTNLAHLSLPSEELASWEPLVCHTGPGAEGHSRSTQPMHLSGEASTARTCPQEPLRGTPGGALWLGVLRLLLFKLLLFDLLLTCSCLCDPAGPLPSPATTTRLRALGSHRLHPATETGGREATSSPRPQPRDRRWGDTPPGRKPGSPVRAKRSGSGVKQTLNFDLLKLAGDVESNPGPSRSRGHMTEYKPTVRLATRDDVPRAVRTLAAAFADYPATRHTVDPDRHIERVTELQELFLTRVGLDIGKVWVADDGAAVAVWTTPESVEAGAVFAEIGPRMAELSGSRLAAQQQMEGLLAPHRPKEPAWFLATVGVSPDHQGKGLGSAVVLPGVEAAERAGVPAFLETSAPRNLPFYERLGFTVTADVEVPEGPRTWCMTRKPGA

SEQ ID NO: 19979 - protein, 889 aa, Artificial Sequence
  Synthetic Polypeptide
MALPVTALLLPLALLLHAARPDVVMTQSPSSLSASVGDRVTITCKASQSVSSYLNWYQQKPGKAPKLLIYAASSLETGVPSRFSGSGSGTDFTLTISSLQPEDFATYYCQQSYSTPWTFGQGTKVEIKRLEGKPIPNPLLGLDSTGSGDKQLDADVSPKPTIFLPSIAETKLQKAGTYLCLLEKFFPDVIKIHWQEKKSNTILGSQEGNTMKTNDTYMKFSWLTVPEKSLDKEHRCIVRHENNKNGVDQEIIFPPIKTDVITMDPKDNCSKDANDTLLLQLTNTSAYYMYLLLLLKSVVYFAIITCCLLRRTAFCCNGEKSRAKRSGSGATNFSLLKQAGDVEENPGPTSMDWIWRILFLVGAATGAHSFEEVQLVESGGGLVRPGGSLRLSCAASGFTFDDYGMSWVRQAPGKGLEWVSGISWNSGSIGYADSVKGRFTISRDNAKNSLYLQMNSLRAEDTALYYCAKRGNSNSFDYWGQGTTVTVSSTREQKLISEEDGSGSQPHTKPSVFVMKNGTNVACLVKEFYPKDIRINLVSSKKITEFDPAIVISPSGKYNAVKLGKYEDSNSVTCSVQHDNKTVHSTDFEVKTDSTDHVKPKETENTKQPSKSCHKPKAIVHTEKVNMMSLTVLGLRMLFAKTVAVNFLLTAKLFFLRAKRSGSGVKQTLNFDLLKLAGDVESNPGPSRGHMTEYKPTVRLATRDDVPRAVRTLAAAFADYPATRHTVDPDRHIERVTELQELFLTRVGLDIGKVWVADDGAAVAVWTTPESVEAGAVFAEIGPRMAELSGSRLAAQQQMEGLLAPHRPKEPAWFLATVGVSPDHQGKGLGSAVVLPGVEAAERAGVPAFLETSAPRNLPFYERLGFTVTADVEVPEGPRTWCMTRKPGA

SEQ ID NO: 19980 - protein, 627 aa, Artificial Sequence
  Synthetic Polypeptide
MALPVTALLLPLALLLHAARPDVVMTQSPSSLSASVGDRVTITCKASQSVSSYLNWYQQKPGKAPKLLIYAASSLETGVPSRFSGSGSGTDFTLTISSLQPEDFATYYCQQSYSTPWTFGQGTKVEIKRLESQPHTKPSVFVMKNGTNVACLVKEFYPKDIRINLVSSKKITEFDPAIVISPSGKYNAVKLGKYEDSNSVTCSVQHDNKTVHSTDFEVKTDSTDHVKPKETENTKQPSKSCHKPKAIVHTEKVNMMSLTVLGLRMLFAKTVAVNFLLTAKLFFLRAKRSGSGATNFSLLKQAGDVEENPGPTSMDWIWRILFLVGAATGAHSFEEVQLVESGGGLVRPGGSLRLSCAASGFTFDDYGMSWVRQAPGKGLEWVSGISWNSGSIGYADSVKGRFTISRDNAKNSLYLQMNSLRAEDTALYYCAKRGNSNSFDYWGQGTTVTVSSTRDKQLDADVSPKPTIFLPSIAETKLQKAGTYLCLLEKFFPDVIKIHWQEKKSNTILGSQEGNTMKTNDTYMKFSWLTVPEKSLDKEHRCIVRHENNKNGVDQEIIFPPIKTDVITMDPKDNCSKDANDTLLLQLTNTSAYYMYLLLLLKSVVYFAIITCCLLRRTAFCCNGEKS

SEQ ID NO: 19981 - protein, 904 aa, Artificial Sequence
  Synthetic Polypeptide
MALPVTALLLPLALLLHAARPLEGKPIPNPLLGLDSTGSGDKQLDADVSPKPTIFLPSIAETKLQKAGTYLCLLEKFFPDVIKIHWQEKKSNTILGSQEGNTMKTNDTYMKFSWLTVPEKSLDKEHRCIVRHENNKNGVDQEIIFPPIKTDVITMDPKDNCSKDANDTLLLQLTNTSAYYMYLLLLLKSVVYFAIITCCLLRRTAFCCNGEKSRAKRSGSGATNFSLLKQAGDVEENPGPTSMALPVTALLLPLALLLHAARPDVVMTQSPSSLSASVGDRVTITCKASQSVSSYLNWYQQKPGKAPKLLIYAASSLETGVPSRFSGSGSGTDFTLTISSLQPEDFATYYCQQSYSTPWTFGQGTKVEIKRGGGGSGGGGSGGGGSEVQLVESGGGLVRPGGSLRLSCAASGFTFDDYGMSWVRQAPGKGLEWVSGISWNSGSIGYADSVKGRFTISRDNAKNSLYLQMNSLRAEDTALYYCAKRGNSNSFDYWGQGTTVTVSSTREQKLISEEDGSGSQPHTKPSVFVMKNGTNVACLVKEFYPKDIRINLVSSKKITEFDPAIVISPSGKYNAVKLGKYEDSNSVTCSVQHDNKTVHSTDFEVKTDSTDHVKPKETENTKQPSKSCHKPKAIVHTEKVNMMSLTVLGLRMLFAKTVAVNFLLTAKLFFLRAKRSGSGVKQTLNFDLLKLAGDVESNPGPSRGHMTEYKPTVRLATRDDVPRAVRTLAAAFADYPATRHTVDPDRHIERVTELQELFLTRVGLDIGKVWVADDGAAVAVWTTPESVEAGAVFAEIGPRMAELSGSRLAAQQQMEGLLAPHRPKEPAWFLATVGVSPDHQGKGLGSAVVLPGVEAAERAGVPAFLETSAPRNLPFYERLGFTVTADVEVPEGPRTWCMTRKPGA

SEQ ID NO: 19982 - protein, 1029 aa, Artificial Sequence
  Synthetic Polypeptide
MALPVTALLLPLALLLHAARPDVVMTQSPSSLSASVGDRVTITCKASQSVSSYLNWYQQKPGKAPKLLIYAASSLETGVPSRFSGSGSGTDFTLTISSLQPEDFATYYCQQSYSTPWTFGQGTKVEIKRGQPKANPTVTLFPPSSEELQANKATLVCLISDFYPGAVTVAWKADGSPVKAGVETTKPSKQSNNKYAASSYLSLTPEQWKSHRSYSCQVTHEGSTVEKTVAPTECSGSQSFGLLDPKLCYLLDGILFIYGVILTALFLRVKFSRSADAPAYQQGQNQLYNELNLGRREEYDVLDKRRGRDPEMGGKPQRRKNPQEGLYNELQKDKMAEAYSEIGMKGERRRGKGHDGLYQGLSTATKDTYDALHMQALPPRRAKRSGSGATNFSLLKQAGDVEENPGPTSMDWIWRILFLVGAATGAHSFEEVQLVESGGGLVRPGGSLRLSCAASGFTFDDYGMSWVRQAPGKGLEWVSGISWNSGSIGYADSVKGRFTISRDNAKNSLYLQMNSLRAEDTALYYCAKRGNSNSFDYWGQGTTVTVSSASTKGPSVFPLAPSSKSTSGGTAALGCLVKDYFPEPVTVSWNSGALTSGVHTFPAVLQSSGLYSLSSVVTVPSSSLGTQTYICNVNHKPSNTKVDKRVEPKSCGTQSFGLLDPKLCYLLDGILFIYGVILTALFLRVKFSRSADAPAYQQGQNQLYNELNLGRREEYDVLDKRRGRDPEMGGKPQRRKNPQEGLYNELQKDKMAEAYSEIGMKGERRRGKGHDGLYQGLSTATKDTYDALHMQALPPRRAKRSGSGVKQTLNFDLLKLAGDVESNPGPSRGHMTEYKPTVRLATRDDVPRAVRTLAAAFADYPATRHTVDPDRHIERVTELQELFLTRVGLDIGKVWVADDGAAVAVWTTPESVEAGAVFAEIGPRMAELSGSRLAAQQQMEGLLAPHRPKEPAWFLATVGVSPDHQGKGLGSAVVLPGVEAAERAGVPAFLETSAPRNLPFYERLGFTVTADVEVPEGPRTWCMTRKPGA

SEQ ID NO: 19983 - protein, 815 aa, Artificial Sequence
  Synthetic Polypeptide
MALPVTALLLPLALLLHAARPDVVMTQSPSSLSASVGDRVTITCKASQSVSSYLNWYQQKPGKAPKLLIYAASSLETGVPSRFSGSGSGTDFTLTISSLQPEDFATYYCQQSYSTPWTFGQGTKVEIKRLEDLKNVFPPEVAVFEPSEAEISHTQKATLVCLATGFYPDHVELSWWVNGKEVHSGVSTDPQPLKEQPALNDSRYCLSSRLRVSATFWQNPRNHFRCQVQFYGLSENDEWTQDRAKPVTQIVSAEAWGRADCGSQSFGLLDPKLCYLLDGILFIYGVILTALFLRVKFSRSADAPAYQQGQNQLYNELNLGRREEYDVLDKRRGRDPEMGGKPQRRKNPQEGLYNELQKDKMAEAYSEIGMKGERRRGKGHDGLYQGLSTATKDTYDALHMQALPPRRAKRSGSGATNFSLLKQAGDVEENPGPTSMDWIWRILFLVGAATGAHSFEEVQLVESGGGLVRPGGSLRLSCAASGFTFDDYGMSWVRQAPGKGLEWVSGISWNSGSIGYADSVKGRFTISRDNAKNSLYLQMNSLRAEDTALYYCAKRGNSNSFDYWGQGTTVTVSSTRIQNPDPAVYQLRDSKSSDKSVCLFTDFDSQTNVSQSKDSDVYITDKTVLDMRSMDFKSNSAVAWSNKSDFACANAFNNSIIPEDTFFPSPESSCGTQSFGLLDPKLCYLLDGILFIYGVILTALFLRVKFSRSADAPAYQQGQNQLYNELNLGRREEYDVLDKRRGRDPEMGGKPQRRKNPQEGLYNELQKDKMAEAYSEIGMKGERRRGKGHDGLYQGLSTATKDTYDALHMQALPPR

SEQ ID NO: 19984 - protein, 815 aa, Artificial Sequence
  Synthetic Polypeptide
MALPVTALLLPLALLLHAARPDVVMTQSPSSLSASVGDRVTITCKASQSVSSYLNWYQQKPGKAPKLLIYAASSLETGVPSRFSGSGSGTDFTLTISSLQPEDFATYYCQQSYSTPWTFGQGTKVEIKRLEDLKNVFPPEVAVFEPSKAEIAHTQKATLVCLATGFYPDHVELSWWVNGKEVHSGVCTDPQPLKEQPALNDSRYCLSSRLRVSATFWQNPRNHFRCQVQFYGLSENDEWTQDRAKPVTQIVSAEAWGRADCGSQSFGLLDPKLCYLLDGILFIYGVILTALFLRVKFSRSADAPAYQQGQNQLYNELNLGRREEYDVLDKRRGRDPEMGGKPQRRKNPQEGLYNELQKDKMAEAYSEIGMKGERRRGKGHDGLYQGLSTATKDTYDALHMQALPPRRAKRSGSGATNFSLLKQAGDVEENPGPTSMDWIWRILFLVGAATGAHSFEEVQLVESGGGLVRPGGSLRLSCAASGFTFDDYGMSWVRQAPGKGLEWVSGISWNSGSIGYADSVKGRFTISRDNAKNSLYLQMNSLRAEDTALYYCAKRGNSNSFDYWGQGTTVTVSSTRIQNPDPAVYQLRDSKSSDKSVCLFTDFDSQTNVSQSKDSDVYITDKCVLDMRSMDFKSNSAVAWSNKSDFACANAFNNSIIPEDTFFPSSDVPCGTQSFGLLDPKLCYLLDGILFIYGVILTALFLRVKFSRSADAPAYQQGQNQLYNELNLGRREEYDVLDKRRGRDPEMGGKPQRRKNPQEGLYNELQKDKMAEAYSEIGMKGERRRGKGHDGLYQGLSTATKDTYDALHMQALPPR

SEQ ID NO: 19985 - protein, 886 aa, Artificial Sequence
  Synthetic Polypeptide
MALPVTALLLPLALLLHAARPDVVMTQSPSSLSASVGDRVTITCKASQSVSSYLNWYQQKPGKAPKLLIYAASSLETGVPSRFSGSGSGTDFTLTISSLQPEDFATYYCQQSYSTPWTFGQGTKVEIKRLEGKPIPNPLLGLDSTGSGEDLKNVFPPEVAVFEPSEAEISHTQKATLVCLATGFYPDHVELSWWVNGKEVHSGVSTDPQPLKEQPALNDSRYCLSSRLRVSATFWQNPRNHFRCQVQFYGLSENDEWTQDRAKPVTQIVSAEAWGRADCGSQSFGLLDPKLCYLLDGILFIYGVILTALFLRVKFSRSADAPAYQQGQNQLYNELNLGRREEYDVLDKRRGRDPEMGGKPQRRKNPQEGLYNELQKDKMAEAYSEIGMKGERRRGKGHDGLYQGLSTATKDTYDALHMQALPPRRAKRSGSGATNFSLLKQAGDVEENPGPTSMDWIWRILFLVGAATGAHSFEEVQLVESGGGLVRPGGSLRLSCAASGFTFDDYGMSWVRQAPGKGLEWVSGISWNSGSIGYADSVKGRFTISRDNAKNSLYLQMNSLRAEDTALYYCAKRGNSNSFDYWGQGTTVTVSSTREQKLISEEDGSGIQNPDPAVYQLRDSKSSDKSVCLFTDFDSQTNVSQSKDSDVYITDKTVLDMRSMDFKSNSAVAWSNKSDFACANAFNNSIIPEDTFFPSPESSCGTQSFGLLDPKLCYLLDGILFIYGVILTALFLRSKRSRLLHSDYMNMTPRRPGPTRKHYQPYAPPRDFAAYRSRVKFSRSADAPAYQQGQNQLYNELNLGRREEYDVLDKRRGRDPEMGGKPQRRKNPQEGLYNELQKDKMAEAYSEIGMKGERRRGKGHDGLYQGLSTATKDTYDALHMQALPPR

SEQ ID NO: 19986 - protein, 927 aa, Artificial Sequence
  Synthetic Polypeptide
MALPVTALLLPLALLLHAARPDVVMTQSPSSLSASVGDRVTITCKASQSVSSYLNWYQQKPGKAPKLLIYAASSLETGVPSRFSGSGSGTDFTLTISSLQPEDFATYYCQQSYSTPWTFGQGTKVEIKRLEGKPIPNPLLGLDSTGSGEDLKNVFPPEVAVFEPSEAEISHTQKATLVCLATGFYPDHVELSWWVNGKEVHSGVSTDPQPLKEQPALNDSRYCLSSRLRVSATFWQNPRNHFRCQVQFYGLSENDEWTQDRAKPVTQIVSAEAWGRADCGSQSFGLLDPKLCYLLDGILFIYGVILTALFLRSKRSRLLHSDYMNMTPRRPGPTRKHYQPYAPPRDFAAYRSRVKFSRSADAPAYQQGQNQLYNELNLGRREEYDVLDKRRGRDPEMGGKPQRRKNPQEGLYNELQKDKMAEAYSEIGMKGERRRGKGHDGLYQGLSTATKDTYDALHMQALPPRRAKRSGSGATNFSLLKQAGDVEENPGPTSMDWIWRILFLVGAATGAHSFEEVQLVESGGGLVRPGGSLRLSCAASGFTFDDYGMSWVRQAPGKGLEWVSGISWNSGSIGYADSVKGRFTISRDNAKNSLYLQMNSLRAEDTALYYCAKRGNSNSFDYWGQGTTVTVSSTREQKLISEEDGSGIQNPDPAVYQLRDSKSSDKSVCLFTDFDSQTNVSQSKDSDVYITDKTVLDMRSMDFKSNSAVAWSNKSDFACANAFNNSIIPEDTFFPSPESSCGTQSFGLLDPKLCYLLDGILFIYGVILTALFLRSKRSRLLHSDYMNMTPRRPGPTRKHYQPYAPPRDFAAYRSRVKFSRSADAPAYQQGQNQLYNELNLGRREEYDVLDKRRGRDPEMGGKPQRRKNPQEGLYNELQKDKMAEAYSEIGMKGERRRGKGHDGLYQGLSTATKDTYDALHMQALPPR

SEQ ID NO: 19987 - protein, 888 aa, Artificial Sequence
  Synthetic Polypeptide
MALPVTALLLPLALLLHAARPDVVMTQSPSSLSASVGDRVTITCKASQSVSSYLNWYQQKPGKAPKLLIYAASSLETGVPSRFSGSGSGTDFTLTISSLQPEDFATYYCQQSYSTPWTFGQGTKVEIKRLEGKPIPNPLLGLDSTGSGEDLKNVFPPEVAVFEPSEAEISHTQKATLVCLATGFYPDHVELSWWVNGKEVHSGVSTDPQPLKEQPALNDSRYCLSSRLRVSATFWQNPRNHFRCQVQFYGLSENDEWTQDRAKPVTQIVSAEAWGRADCGSQSFGLLDPKLCYLLDGILFIYGVILTALFLRVKFSRSADAPAYQQGQNQLYNELNLGRREEYDVLDKRRGRDPEMGGKPQRRKNPQEGLYNELQKDKMAEAYSEIGMKGERRRGKGHDGLYQGLSTATKDTYDALHMQALPPRRAKRSGSGATNFSLLKQAGDVEENPGPTSMDWIWRILFLVGAATGAHSFEEVQLVESGGGLVRPGGSLRLSCAASGFTFDDYGMSWVRQAPGKGLEWVSGISWNSGSIGYADSVKGRFTISRDNAKNSLYLQMNSLRAEDTALYYCAKRGNSNSFDYWGQGTTVTVSSTREQKLISEEDLGSGIQNPDPAVYQLRDSKSSDKSVCLFTDFDSQTNVSQSKDSDVYITDKTVLDMRSMDFKSNSAVAWSNKSDFACANAFNNSIIPEDTFFPSPESSCGTQSFGLLDPKLCYLLDGILFIYGVILTALFLKRGRKKLLYIFKQPFMRPVQTTQEEDGCSCRFPEEEEGGCELRVKFSRSADAPAYQQGQNQLYNELNLGRREEYDVLDKRRGRDPEMGGKPQRRKNPQEGLYNELQKDKMAEAYSEIGMKGERRRGKGHDGLYQGLSTATKDTYDALHMQALPPR

SEQ ID NO: 19988 - protein, 930 aa, Artificial Sequence
  Synthetic Polypeptide
MALPVTALLLPLALLLHAARPDVVMTQSPSSLSASVGDRVTITCKASQSVSSYLNWYQQKPGKAPKLLIYAASSLETGVPSRFSGSGSGTDFTLTISSLQPEDFATYYCQQSYSTPWTFGQGTKVEIKRLEGKPIPNPLLGLDSTGSGEDLKNVFPPEVAVFEPSEAEISHTQKATLVCLATGFYPDHVELSWWVNGKEVHSGVSTDPQPLKEQPALNDSRYCLSSRLRVSATFWQNPRNHFRCQVQFYGLSENDEWTQDRAKPVTQIVSAEAWGRADCGSQSFGLLDPKLCYLLDGILFIYGVILTALFLKRGRKKLLYIFKQPFMRPVQTTQEEDGCSCRFPEEEEGGCELRVKFSRSADAPAYQQGQNQLYNELNLGRREEYDVLDKRRGRDPEMGGKPQRRKNPQEGLYNELQKDKMAEAYSEIGMKGERRRGKGHDGLYQGLSTATKDTYDALHMQALPPRRAKRSGSGATNFSLLKQAGDVEENPGPTSMDWIWRILFLVGAATGAHSFEEVQLVESGGGLVRPGGSLRLSCAASGFTFDDYGMSWVRQAPGKGLEWVSGISWNSGSIGYADSVKGRFTISRDNAKNSLYLQMNSLRAEDTALYYCAKRGNSNSFDYWGQGTTVTVSSTREQKLISEEDLGSGIQNPDPAVYQLRDSKSSDKSVCLFTDFDSQTNVSQSKDSDVYITDKTVLDMRSMDFKSNSAVAWSNKSDFACANAFNNSIIPEDTFFPSPESSCGTQSFGLLDPKLCYLLDGILFIYGVILTALFLKRGRKKLLYIFKQPFMRPVQTTQEEDGCSCRFPEEEEGGCELRVKFSRSADAPAYQQGQNQLYNELNLGRREEYDVLDKRRGRDPEMGGKPQRRKNPQEGLYNELQKDKMAEAYSEIGMKGERRRGKGHDGLYQGLSTATKDTYDALHMQALPPR

SEQ ID NO: 19989 - protein, 820 aa, Artificial Sequence
  Synthetic Polypeptide
MALPVTALLLPLALLLHAARPDVVMTQSPSSLSASVGDRVTITCKASQSVSSYLNWYQQKPGKAPKLLIYAASSLETGVPSRFSGSGSGTDFTLTISSLQPEDFATYYCQQSYSTPWTFGQGTKVEIKRLEQSFGLLDPKLCYLLDGILFIYGVILTALFLRVKFSRSADAPAYQQGQNQLYNELNLGRREEYDVLDKRRGRDPEMGGKPQRRKNPQEGLYNELQKDKMAEAYSEIGMKGERRRGKGHDGLYQGLSTATKDTYDALHMQALPPRRAKRSGSGATNFSLLKQAGDVEENPGPTSMDWIWRILFLVGAATGAHSFEEVQLVESGGGLVRPGGSLRLSCAASGFTFDDYGMSWVRQAPGKGLEWVSGISWNSGSIGYADSVKGRFTISRDNAKNSLYLQMNSLRAEDTALYYCAKRGNSNSFDYWGQGTTVTVSSTRQSFGLLDPKLCYLLDGILFIYGVILTALFLRVKFSRSADAPAYQQGQNQLYNELNLGRREEYDVLDKRRGRDPEMGGKPQRRKNPQEGLYNELQKDKMAEAYSEIGMKGERRRGKGHDGLYQGLSTATKDTYDALHMQALPPRRAKRSGSGVKQTLNFDLLKLAGDVESNPGPSRGHMTEYKPTVRLATRDDVPRAVRTLAAAFADYPATRHTVDPDRHIERVTELQELFLTRVGLDIGKVWVADDGAAVAVWTTPESVEAGAVFAEIGPRMAELSGSRLAAQQQMEGLLAPHRPKEPAWFLATVGVSPDHQGKGLGSAVVLPGVEAAERAGVPAFLETSAPRNLPFYERLGFTVTADVEVPEGPRTWCMTRKPGA

SEQ ID NO: 19990 - protein, 645 aa, Artificial Sequence
  Synthetic Polypeptide
MALPVTALLLPLALLLHAARPDVVMTQSPSSLSASVGDRVTITCKASQSVSSYLNWYQQKPGKAPKLLIYAASSLETGVPSRFSGSGSGTDFTLTISSLQPEDFATYYCQQSYSTPWTFGQGTKVEIKRLEGQPKANPTVTLFPPSSEELQANKATLVCLISDFYPGAVTVAWKADGSPVKAGVETTKPSKQSNNKYAASSYLSLTPEQWKSHRSYSCQVTHEGSTVEKTVAPTECSPIKTDVITMDPKDNCSKDANDTLLLQLTNTSAYYMYLLLLLKSVVYFAIITCCLLRRTAFCCNGEKSRAKRSGSGATNFSLLKQAGDVEENPGPTSMDWIWRILFLVGAATGAHSFEEVQLVESGGGLVRPGGSLRLSCAASGFTFDDYGMSWVRQAPGKGLEWVSGISWNSGSIGYADSVKGRFTISRDNAKNSLYLQMNSLRAEDTALYYCAKRGNSNSFDYWGQGTTVTVSSTRASTKGPSVFPLAPSSKSTSGGTAALGCLVKDYFPEPVTVSWNSGALTSGVHTFPAVLQSSGLYSLSSVVTVPSSSLGTQTYICNVNHKPSNTKVDKRVEPKSCEVKTDSTDHVKPKETENTKQPSKSCHKPKAIVHTEKVNMMSLTVLGLRMLFAKTVAVNFLLTAKLFFL

SEQ ID NO: 19991 - protein, 623 aa, Artificial Sequence
  Synthetic Polypeptide
MALPVTALLLPLALLLHAARPDVVMTQSPSSLSASVGDRVTITCKASQSVSSYLNWYQQKPGKAPKLLIYAASSLETGVPSRFSGSGSGTDFTLTISSLQPEDFATYYCQQSYSTPWTFGQGTKVEIKRLEGQPKANPTVTLFPPSSEELQANKATLVCLISDFYPGAVTVAWKADGSPVKAGVETTKPSKQSNNKYAASSYLSLTPEQWKSHRSYSCQVTHEGSTVEKTVAPTECSGRADCGITSASYHQGVLSATILYEILLGKATLYAVLVSALVLMAMVKRKDSRGRAKRSGSGATNFSLLKQAGDVEENPGPTSMDWIWRILFLVGAATGAHSFEEVQLVESGGGLVRPGGSLRLSCAASGFTFDDYGMSWVRQAPGKGLEWVSGISWNSGSIGYADSVKGRFTISRDNAKNSLYLQMNSLRAEDTALYYCAKRGNSNSFDYWGQGTTVTVSSTRASTKGPSVFPLAPSSKSTSGGTAALGCLVKDYFPEPVTVSWNSGALTSGVHTFPAVLQSSGLYSLSSVVTVPSSSLGTQTYICNVNHKPSNTKVDKRVEPKSCIPEDTFFPSSDVPCDVKLVEKSFETDTNLNFQNLSVIGFRILLLKVAGFNLLMTLRLWSS

SEQ ID NO: 19992 - protein, 623 aa, Artificial Sequence
  Synthetic Polypeptide
MALPVTALLLPLALLLHAARPDVVMTQSPSSLSASVGDRVTITCKASQSVSSYLNWYQQKPGKAPKLLIYAASSLETGVPSRFSGSGSGTDFTLTISSLQPEDFATYYCQQSYSTPWTFGQGTKVEIKRLEGQPKANPTVTLFPPSSEELQANKATLVCLISDFYPGAVTVAWKADGSPVKAGVETTKPSKQSNNKYAASSYLSLTPEQWKSHRSYSCQVTHEGSTVEKTVAPTECSGRADCGFTSESYQQGVLSATILYEILLGKATLYAVLVSALVLMAMVKRKDSRGRAKRSGSGATNFSLLKQAGDVEENPGPTSMDWIWRILFLVGAATGAHSFEEVQLVESGGGLVRPGGSLRLSCAASGFTFDDYGMSWVRQAPGKGLEWVSGISWNSGSIGYADSVKGRFTISRDNAKNSLYLQMNSLRAEDTALYYCAKRGNSNSFDYWGQGTTVTVSSTRASTKGPSVFPLAPSSKSTSGGTAALGCLVKDYFPEPVTVSWNSGALTSGVHTFPAVLQSSGLYSLSSVVTVPSSSLGTQTYICNVNHKPSNTKVDKRVEPKSCIPEDTFFPSPESSCDVKLVEKSFETDTNLNFQNLSVIGFRILLLKVAGFNLLMTLRLWSS

SEQ ID NO: 19993 - protein, 449 aa, Artificial Sequence
  Synthetic Polypeptide
MALPVTALLLPLALLLHAARPDVVMTQSPSSLSASVGDRVTITCKASQSVSSYLNWYQQKPGKAPKLLIYAASSLETGVPSRFSGSGSGTDFTLTISSLQPEDFATYYCQQSYSTPWTFGQGTKVEIKRGGGGSGGGGSGGGGSEVQLVESGGGLVRPGGSLRLSCAASGFTFDDYGMSWVRQAPGKGLEWVSGISWNSGSIGYADSVKGRFTISRDNAKNSLYLQMNSLRAEDTALYYCAKRGNSNSFDYWGQGTTVTVSSTRDGNEEMGGITQTPYKVSISGTTVILTCPQYPGSEILWQHNDKNIGGDEDDKNIGSDEDHLSLKEFSELEQSGYYVCYPRGSKPEDANFYLYLRARVCENCMEMDVMSVATIVIVDICITGGLLLLVYYWSKNRKAKAKPVTRGAGAGGRQRGQNKERPPPVPNPDYEPIRKGQRDLYSGLNQRRI

SEQ ID NO: 19994 - protein, 414 aa, Artificial Sequence
  Synthetic Polypeptide
MALPVTALLLPLALLLHAARPDVVMTQSPSSLSASVGDRVTITCKASQSVSSYLNWYQQKPGKAPKLLIYAASSLETGVPSRFSGSGSGTDFTLTISSLQPEDFATYYCQQSYSTPWTFGQGTKVEIKRGGGGSGGGGSGGGGSEVQLVESGGGLVRPGGSLRLSCAASGFTFDDYGMSWVRQAPGKGLEWVSGISWNSGSIGYADSVKGRFTISRDNAKNSLYLQMNSLRAEDTALYYCAKRGNSNSFDYWGQGTTVTVSSTRFKIPIEELEDRVFVNCNTSITWVEGTVGTLLSDITRLDLGKRILDPRGIYRCNGTDIYKDKESTVQVHYRMCQSCVELDPATVAGIIVTDVIATLLLALGVFCFAGHETGRLSGAADTQALLRNDQVYQPLRDRDDAQYSHLGGNWARNK

SEQ ID NO: 19995 - protein, 424 aa, Artificial Sequence
  Synthetic Polypeptide
MALPVTALLLPLALLLHAARPDVVMTQSPSSLSASVGDRVTITCKASQSVSSYLNWYQQKPGKAPKLLIYAASSLETGVPSRFSGSGSGTDFTLTISSLQPEDFATYYCQQSYSTPWTFGQGTKVEIKRGGGGSGGGGSGGGGSEVQLVESGGGLVRPGGSLRLSCAASGFTFDDYGMSWVRQAPGKGLEWVSGISWNSGSIGYADSVKGRFTISRDNAKNSLYLQMNSLRAEDTALYYCAKRGNSNSFDYWGQGTTVTVSSTRQSIKGNHLVKVYDYQEDGSVLLTCDAEAKNITWFKDGKMIGFLTEDKKKWNLGSNAKDPRGMYQCKGSQNKSKPLQVYYRMCQNCIELNAATISGFLFAEIVSIFVLAVGVYFIAGQDGVRQSRASDKQTLLPNDQLYQPLKDREDDQYSHLQGNQLRRN

SEQ ID NO: 19996 - protein, 407 aa, Artificial Sequence
  Synthetic Polypeptide
MALPVTALLLPLALLLHAARPDVVMTQSPSSLSASVGDRVTITCKASQSVSSYLNWYQQKPGKAPKLLIYAASSLETGVPSRFSGSGSGTDFTLTISSLQPEDFATYYCQQSYSTPWTFGQGTKVEIKRGGGGSGGGGSGGGGSEVQLVESGGGLVRPGGSLRLSCAASGFTFDDYGMSWVRQAPGKGLEWVSGISWNSGSIGYADSVKGRFTISRDNAKNSLYLQMNSLRAEDTALYYCAKRGNSNSFDYWGQGTTVTVSSTRQSFGLLDPKLCYLLDGILFIYGVILTALFLRVKFSRSADAPAYQQGQNQLYNELNLGRREEYDVLDKRRGRDPEMGGKPQRRKNPQEGLYNELQKDKMAEAYSEIGMKGERRRGKGHDGLYQGLSTATKDTYDALHMQALPPR

SEQ ID NO: 19997 - protein, 449 aa, Artificial Sequence
  Synthetic Polypeptide
MALPVTALLLPLALLLHAARPEVQLVESGGGLVRPGGSLRLSCAASGFTFDDYGMSWVRQAPGKGLEWVSGISWNSGSIGYADSVKGRFTISRDNAKNSLYLQMNSLRAEDTALYYCAKRGNSNSFDYWGQGTTVTVSSGGGGSGGGGSGGGGSDVVMTQSPSSLSASVGDRVTITCKASQSVSSYLNWYQQKPGKAPKLLIYAASSLETGVPSRFSGSGSGTDFTLTISSLQPEDFATYYCQQSYSTPWTFGQGTKVEIKRTRDGNEEMGGITQTPYKVSISGTTVILTCPQYPGSEILWQHNDKNIGGDEDDKNIGSDEDHLSLKEFSELEQSGYYVCYPRGSKPEDANFYLYLRARVCENCMEMDVMSVATIVIVDICITGGLLLLVYYWSKNRKAKAKPVTRGAGAGGRQRGQNKERPPPVPNPDYEPIRKGQRDLYSGLNQRRI

SEQ ID NO: 19998 - protein, 414 aa, Artificial Sequence
  Synthetic Polypeptide
MALPVTALLLPLALLLHAARPEVQLVESGGGLVRPGGSLRLSCAASGFTFDDYGMSWVRQAPGKGLEWVSGISWNSGSIGYADSVKGRFTISRDNAKNSLYLQMNSLRAEDTALYYCAKRGNSNSFDYWGQGTTVTVSSGGGGSGGGGSGGGGSDVVMTQSPSSLSASVGDRVTITCKASQSVSSYLNWYQQKPGKAPKLLIYAASSLETGVPSRFSGSGSGTDFTLTISSLQPEDFATYYCQQSYSTPWTFGQGTKVEIKRTRFKIPIEELEDRVFVNCNTSITWVEGTVGTLLSDITRLDLGKRILDPRGIYRCNGTDIYKDKESTVQVHYRMCQSCVELDPATVAGIIVTDVIATLLLALGVFCFAGHETGRLSGAADTQALLRNDQVYQPLRDRDDAQYSHLGGNWARNK

SEQ ID NO: 19999 - protein, 424 aa, Artificial Sequence
  Synthetic Polypeptide
MALPVTALLLPLALLLHAARPEVQLVESGGGLVRPGGSLRLSCAASGFTFDDYGMSWVRQAPGKGLEWVSGISWNSGSIGYADSVKGRFTISRDNAKNSLYLQMNSLRAEDTALYYCAKRGNSNSFDYWGQGTTVTVSSGGGGSGGGGSGGGGSDVVMTQSPSSLSASVGDRVTITCKASQSVSSYLNWYQQKPGKAPKLLIYAASSLETGVPSRFSGSGSGTDFTLTISSLQPEDFATYYCQQSYSTPWTFGQGTKVEIKRTRQSIKGNHLVKVYDYQEDGSVLLTCDAEAKNITWFKDGKMIGFLTEDKKKWNLGSNAKDPRGMYQCKGSQNKSKPLQVYYRMCQNCIELNAATISGFLFAEIVSIFVLAVGVYFIAGQDGVRQSRASDKQTLLPNDQLYQPLKDREDDQYSHLQGNQLRRN

SEQ ID NO: 20000 - protein, 407 aa, Artificial Sequence
  Synthetic Polypeptide
MALPVTALLLPLALLLHAARPEVQLVESGGGLVRPGGSLRLSCAASGFTFDDYGMSWVRQAPGKGLEWVSGISWNSGSIGYADSVKGRFTISRDNAKNSLYLQMNSLRAEDTALYYCAKRGNSNSFDYWGQGTTVTVSSGGGGSGGGGSGGGGSDVVMTQSPSSLSASVGDRVTITCKASQSVSSYLNWYQQKPGKAPKLLIYAASSLETGVPSRFSGSGSGTDFTLTISSLQPEDFATYYCQQSYSTPWTFGQGTKVEIKRTRQSFGLLDPKLCYLLDGILFIYGVILTALFLRVKFSRSADAPAYQQGQNQLYNELNLGRREEYDVLDKRRGRDPEMGGKPQRRKNPQEGLYNELQKDKMAEAYSEIGMKGERRRGKGHDGLYQGLSTATKDTYDALHMQALPPR

SEQ ID NO: 20001 - protein, 640 aa, Artificial Sequence
  Synthetic Polypeptide
MALPVTALLLPLALLLHAARPDVVMTQSPSSLSASVGDRVTITCKASQSVSSYLNWYQQKPGKAPKLLIYAASSLETGVPSRFSGSGSGTDFTLTISSLQPEDFATYYCQQSYSTPWTFGQGTKVEIKRGGGGSGGGGSGGGGSEVQLVESGGGLVRPGGSLRLSCAASGFTFDDYGMSWVRQAPGKGLEWVSGISWNSGSIGYADSVKGRFTISRDNAKNSLYLQMNSLRAEDTALYYCAKRGNSNSFDYWGQGTTVTVSSTRGSGIQNPDPAVYQLRDSKSSDKSVCLFTDFDSQTNVSQSKDSDVYITDKTVLDMRSMDFKSNSAVAWSNKSDFACANAFNNSIIPEDTFFPSPESSCDVKLVEKSFETDTNLNFQNLSVIGFRILLLKVAGFNLLMTLRLWSSRAKRSGSGVKQTLNFDLLKLAGDVESNPGPSRGHMTEYKPTVRLATRDDVPRAVRTLAAAFADYPATRHTVDPDRHIERVTELQELFLTRVGLDIGKVWVADDGAAVAVWTTPESVEAGAVFAEIGPRMAELSGSRLAAQQQMEGLLAPHRPKEPAWFLATVGVSPDHQGKGLGSAVVLPGVEAAERAGVPAFLETSAPRNLPFYERLGFTVTADVEVPEGPRTWCMTRKPGA

SEQ ID NO: 20002 - protein, 672 aa, Artificial Sequence
  Synthetic Polypeptide
MALPVTALLLPLALLLHAARPDVVMTQSPSSLSASVGDRVTITCKASQSVSSYLNWYQQKPGKAPKLLIYAASSLETGVPSRFSGSGSGTDFTLTISSLQPEDFATYYCQQSYSTPWTFGQGTKVEIKRGGGGSGGGGSGGGGSEVQLVESGGGLVRPGGSLRLSCAASGFTFDDYGMSWVRQAPGKGLEWVSGISWNSGSIGYADSVKGRFTISRDNAKNSLYLQMNSLRAEDTALYYCAKRGNSNSFDYWGQGTTVTVSSLEDLKNVFPPEVAVFEPSEAEISHTQKATLVCLATGFYPDHVELSWWVNGKEVHSGVSTDPQPLKEQPALNDSRYCLSSRLRVSATFWQNPRNHFRCQVQFYGLSENDEWTQDRAKPVTQIVSAEAWGRADCGFTSESYQQGVLSATILYEILLGKATLYAVLVSALVLMAMVKRKDSRGRAKRSGSGATNFSLLKQAGDVEENPGPTRGHMTEYKPTVRLATRDDVPRAVRTLAAAFADYPATRHTVDPDRHIERVTELQELFLTRVGLDIGKVWVADDGAAVAVWTTPESVEAGAVFAEIGPRMAELSGSRLAAQQQMEGLLAPHRPKEPAWFLATVGVSPDHQGKGLGSAVVLPGVEAAERAGVPAFLETSAPRNLPFYERLGFTVTADVEVPEGPRTWCMTRKPGA

SEQ ID NO: 20003 - protein, 722 aa, Artificial Sequence
  Synthetic Polypeptide
MALPVTALLLPLALLLHAARPDVVMTQSPSSLSASVGDRVTITCKASQSVSSYLNWYQQKPGKAPKLLIYAASSLETGVPSRFSGSGSGTDFTLTISSLQPEDFATYYCQQSYSTPWTFGQGTKVEIKRGGGGSGGGGSGGGGSEVQLVESGGGLVRPGGSLRLSCAASGFTFDDYGMSWVRQAPGKGLEWVSGISWNSGSIGYADSVKGRFTISRDNAKNSLYLQMNSLRAEDTALYYCAKRGNSNSFDYWGQGTTVTVSSTREQKLISEEDLGSGTPFPSLAPPIMLLVDGKQQMVVVCLVLDVAPPGLDSPIWFSAGNGSALDAFTYGPSPATDGTWTNLAHLSLPSEELASWEPLVCHTGPGAEGHSRSTQPMHLSGEASTARTCPQEPLRGTPGGALWLGVLRLLLFKLLLFDLLLTCSCLCDPAGPLPSPATTTRLRALGSHRLHPATETGGREATSSPRPQPRDRRWGDTPPGRKPGSPVRAKRSGSGVKQTLNFDLLKLAGDVESNPGPSRSRGHMTEYKPTVRLATRDDVPRAVRTLAAAFADYPATRHTVDPDRHIERVTELQELFLTRVGLDIGKVWVADDGAAVAVWTTPESVEAGAVFAEIGPRMAELSGSRLAAQQQMEGLLAPHRPKEPAWFLATVGVSPDHQGKGLGSAVVLPGVEAAERAGVPAFLETSAPRNLPFYERLGFTVTADVEVPEGPRTWCMTRKPGA

SEQ ID NO: 20004 - protein, 539 aa, Artificial Sequence
  Synthetic Polypeptide
MALPVTALLLPLALLLHAARPDVVMTQSPSSLSASVGDRVTITCKASQSVSSYLNWYQQKPGKAPKLLIYAASSLETGVPSRFSGSGSGTDFTLTISSLQPEDFATYYCQQSYSTPWTFGQGTKVEIKRLEDLKNVFPPEVAVFEPSEAEISHTQKATLVCLATGFYPDHVELSWWVNGKEVHSGVSTDPQPLKEQPALNDSRYCLSSRLRVSATFWQNPRNHFRCQVQFYGLSENDEWTQDRAKPVTQIVSAEAWGRADCGFTSESYQQGVLSATILYEILLGKATLYAVLVSALVLMAMVKRKDSRGRAKRSGSGATNFSLLKQAGDVEENPGPTRGHMTEYKPTVRLATRDDVPRAVRTLAAAFADYPATRHTVDPDRHIERVTELQELFLTRVGLDIGKVWVADDGAAVAVWTTPESVEAGAVFAEIGPRMAELSGSRLAAQQQMEGLLAPHRPKEPAWFLATVGVSPDHQGKGLGSAVVLPGVEAAERAGVPAFLETSAPRNLPFYERLGFTVTADVEVPEGPRTWCMTRKPGA

SEQ ID NO: 20005 - protein, 309 aa, Artificial Sequence
  Synthetic Polypeptide
MALPVTALLLPLALLLHAARPDVVMTQSPSSLSASVGDRVTITCKASQSVSSYLNWYQQKPGKAPKLLIYAASSLETGVPSRFSGSGSGTDFTLTISSLQPEDFATYYCQQSYSTPWTFGQGTKVEIKRLEDLKNVFPPEVAVFEPSEAEISHTQKATLVCLATGFYPDHVELSWWVNGKEVHSGVSTDPQPLKEQPALNDSRYCLSSRLRVSATFWQNPRNHFRCQVQFYGLSENDEWTQDRAKPVTQIVSAEAWGRADCGFTSESYQQGVLSATILYEILLGKATLYAVLVSALVLMAMVKRKDSRG

SEQ ID NO: 20006 - protein, 447 aa, Artificial Sequence
  Synthetic Polypeptide
MDWIWRILFLVGAATGAHSFEEVQLVESGGGLVRPGGSLRLSCAASGFTFDDYGMSWVRQAPGKGLEWVSGISWNSGSIGYADSVKGRFTISRDNAKNSLYLQMNSLRAEDTALYYCAKRGNSNSFDYWGQGTTVTVSSTRIQNPDPAVYQLRDSKSSDKSVCLFTDFDSQTNVSQSKDSDVYITDKTVLDMRSMDFKSNSAVAWSNKSDFACANAFNNSIIPEDTFFPSPESSCDVKLVEKSFETDTNLNFQNLSVIGFRILLLKVAGFNLLMTLRLWSSRAKRSGSGVKQTLNFDLLKLAGDVESNPGPSRGHMAKPLSQEESTLIERATATINSIPISEDYSVASAALSSDGRIFTGVNVYHFTGGPCAELVVLGTAAAAAAGNLTCIVAIGNENRGILSPCGRCRQVLLDLHPGIKAIVKDSDGQPTAVGIRELLPSGYVWEG

SEQ ID NO: 20007 - protein, 281 aa, Artificial Sequence
  Synthetic Polypeptide
MDWIWRILFLVGAATGAHSFEEVQLVESGGGLVRPGGSLRLSCAASGFTFDDYGMSWVRQAPGKGLEWVSGISWNSGSIGYADSVKGRFTISRDNAKNSLYLQMNSLRAEDTALYYCAKRGNSNSFDYWGQGTTVTVSSTRIQNPDPAVYQLRDSKSSDKSVCLFTDFDSQTNVSQSKDSDVYITDKTVLDMRSMDFKSNSAVAWSNKSDFACANAFNNSIIPEDTFFPSPESSCDVKLVEKSFETDTNLNFQNLSVIGFRILLLKVAGFNLLMTLRLWSS

SEQ ID NO: 20008 - protein, 557 aa, Artificial Sequence
  Synthetic Polypeptide
MALPVTALLLPLALLLHAARPDVVMTQSPSSLSASVGDRVTITCKASQSVSSYLNWYQQKPGKAPKLLIYAASSLETGVPSRFSGSGSGTDFTLTISSLQPEDFATYYCQQSYSTPWTFGQGTKVEIKRLEGKPIPNPLLGLDSTGSGEDLKNVFPPEVAVFEPSEAEISHTQKATLVCLATGFYPDHVELSWWVNGKEVHSGVCTDPQPLKEQPALNDSRYCLSSRLRVSATFWQNPRNHFRCQVQFYGLSENDEWTQDRAKPVTQIVSAEAWGRADCGFTSESYQQGVLSATILYEILLGKATLYAVLVSALVLMAMVKRKDSRGRAKRSGSGATNFSLLKQAGDVEENPGPTRGHMTEYKPTVRLATRDDVPRAVRTLAAAFADYPATRHTVDPDRHIERVTELQELFLTRVGLDIGKVWVADDGAAVAVWTTPESVEAGAVFAEIGPRMAELSGSRLAAQQQMEGLLAPHRPKEPAWFLATVGVSPDHQGKGLGSAVVLPGVEAAERAGVPAFLETSAPRNLPFYERLGFTVTADVEVPEGPRTWCMTRKPGA

SEQ ID NO: 20009 - protein, 327 aa, Artificial Sequence
  Synthetic Polypeptide
MALPVTALLLPLALLLHAARPDVVMTQSPSSLSASVGDRVTITCKASQSVSSYLNWYQQKPGKAPKLLIYAASSLETGVPSRFSGSGSGTDFTLTISSLQPEDFATYYCQQSYSTPWTFGQGTKVEIKRLEGKPIPNPLLGLDSTGSGEDLKNVFPPEVAVFEPSEAEISHTQKATLVCLATGFYPDHVELSWWVNGKEVHSGVCTDPQPLKEQPALNDSRYCLSSRLRVSATFWQNPRNHFRCQVQFYGLSENDEWTQDRAKPVTQIVSAEAWGRADCGFTSESYQQGVLSATILYEILLGKATLYAVLVSALVLMAMVKRKDSRG

SEQ ID NO: 20010 - protein, 459 aa, Artificial Sequence
  Synthetic Polypeptide
MDWIWRILFLVGAATGAHSFEEVQLVESGGGLVRPGGSLRLSCAASGFTFDDYGMSWVRQAPGKGLEWVSGISWNSGSIGYADSVKGRFTISRDNAKNSLYLQMNSLRAEDTALYYCAKRGNSNSFDYWGQGTTVTVSSTREQKLISEEDGSGIQNPDPAVYQLRDSKSSDKSVCLFTDFDSQTNVSQSKDSDVYITDKCVLDMRSMDFKSNSAVAWSNKSDFACANAFNNSIIPEDTFFPSPESSCDVKLVEKSFETDTNLNFQNLSVIGFRILLLKVAGFNLLMTLRLWSSRAKRSGSGVKQTLNFDLLKLAGDVESNPGPSRGHMAKPLSQEESTLIERATATINSIPISEDYSVASAALSSDGRIFTGVNVYHFTGGPCAELVVLGTAAAAAAGNLTCIVAIGNENRGILSPCGRCRQVLLDLHPGIKAIVKDSDGQPTAVGIRELLPSGYVWEG

SEQ ID NO: 20011 - protein, 293 aa, Artificial Sequence
  Synthetic Polypeptide
MDWIWRILFLVGAATGAHSFEEVQLVESGGGLVRPGGSLRLSCAASGFTFDDYGMSWVRQAPGKGLEWVSGISWNSGSIGYADSVKGRFTISRDNAKNSLYLQMNSLRAEDTALYYCAKRGNSNSFDYWGQGTTVTVSSTREQKLISEEDGSGIQNPDPAVYQLRDSKSSDKSVCLFTDFDSQTNVSQSKDSDVYITDKCVLDMRSMDFKSNSAVAWSNKSDFACANAFNNSIIPEDTFFPSPESSCDVKLVEKSFETDTNLNFQNLSVIGFRILLLKVAGFNLLMTLRLWSS

SEQ ID NO: 20012 - protein, 640 aa, Artificial Sequence
  Synthetic Polypeptide
MALPVTALLLPLALLLHAARPDVVMTQSPSSLSASVGDRVTITCKASQSVSSYLNWYQQKPGKAPKLLIYAASSLETGVPSRFSGSGSGTDFTLTISSLQPEDFATYYCQQSYSTPWTFGQGTKVEIKRGGGGSGGGGSGGGGSEVQLVESGGGLVRPGGSLRLSCAASGFTFDDYGMSWVRQAPGKGLEWVSGISWNSGSIGYADSVKGRFTISRDNAKNSLYLQMNSLRAEDTALYYCAKRGNSNSFDYWGQGTTVTVSSTRGSGIQNPDPAVYQLRDSKSSDKSVCLFTDFDSQTNVSQSKDSDVYITDKTVLDMRSMDFKSNSAVAWSNKSDFACANAFNNSIIPEDTFFPSSDVPCDVKLVEKSFETDTNLNFQNLSVIGFRILLLKVAGFNLLMTLRLWSSRAKRSGSGVKQTLNFDLLKLAGDVESNPGPSRGHMTEYKPTVRLATRDDVPRAVRTLAAAFADYPATRHTVDPDRHIERVTELQELFLTRVGLDIGKVWVADDGAAVAVWTTPESVEAGAVFAEIGPRMAELSGSRLAAQQQMEGLLAPHRPKEPAWFLATVGVSPDHQGKGLGSAVVLPGVEAAERAGVPAFLETSAPRNLPFYERLGFTVTADVEVPEGPRTWCMTRKPGA

SEQ ID NO: 20013 - protein, 672 aa, Artificial Sequence
  Synthetic Polypeptide
MALPVTALLLPLALLLHAARPDVVMTQSPSSLSASVGDRVTITCKASQSVSSYLNWYQQKPGKAPKLLIYAASSLETGVPSRFSGSGSGTDFTLTISSLQPEDFATYYCQQSYSTPWTFGQGTKVEIKRGGGGSGGGGSGGGGSEVQLVESGGGLVRPGGSLRLSCAASGFTFDDYGMSWVRQAPGKGLEWVSGISWNSGSIGYADSVKGRFTISRDNAKNSLYLQMNSLRAEDTALYYCAKRGNSNSFDYWGQGTTVTVSSLEDLKNVFPPEVAVFEPSKAEIAHTQKATLVCLATGFYPDHVELSWWVNGKEVHSGVSTDPQPLKEQPALNDSRYCLSSRLRVSATFWQNPRNHFRCQVQFYGLSENDEWTQDRAKPVTQIVSAEAWGRADCGITSASYHQGVLSATILYEILLGKATLYAVLVSALVLMAMVKRKDSRGRAKRSGSGATNFSLLKQAGDVEENPGPTRGHMTEYKPTVRLATRDDVPRAVRTLAAAFADYPATRHTVDPDRHIERVTELQELFLTRVGLDIGKVWVADDGAAVAVWTTPESVEAGAVFAEIGPRMAELSGSRLAAQQQMEGLLAPHRPKEPAWFLATVGVSPDHQGKGLGSAVVLPGVEAAERAGVPAFLETSAPRNLPFYERLGFTVTADVEVPEGPRTWCMTRKPGA

SEQ ID NO: 20014 - protein, 695 aa, Artificial Sequence
  Synthetic Polypeptide
MALPVTALLLPLALLLHAARPDVVMTQSPSSLSASVGDRVTITCKASQSVSSYLNWYQQKPGKAPKLLIYAASSLETGVPSRFSGSGSGTDFTLTISSLQPEDFATYYCQQSYSTPWTFGQGTKVEIKRGGGGSGGGGSGGGGSEVQLVESGGGLVRPGGSLRLSCAASGFTFDDYGMSWVRQAPGKGLEWVSGISWNSGSIGYADSVKGRFTISRDNAKNSLYLQMNSLRAEDTALYYCAKRGNSNSFDYWGQGTTVTVSSTRGSGGGGSGGGGSGDGNEEMGGITQTPYKVSISGTTVILTCPQYPGSEILWQHNDKNIGGDEDDKNIGSDEDHLSLKEFSELEQSGYYVCYPRGSKPEDANFYLYLRARVCENCMEMDVMSVATIVIVDICITGGLLLLVYYWSKNRKAKAKPVTRGAGAGGRQRGQNKERPPPVPNPDYEPIRKGQRDLYSGLNQRRIRAKRSGSGVKQTLNFDLLKLAGDVESNPGPSRGHMTEYKPTVRLATRDDVPRAVRTLAAAFADYPATRHTVDPDRHIERVTELQELFLTRVGLDIGKVWVADDGAAVAVWTTPESVEAGAVFAEIGPRMAELSGSRLAAQQQMEGLLAPHRPKEPAWFLATVGVSPDHQGKGLGSAVVLPGVEAAERAGVPAFLETSAPRNLPFYERLGFTVTADVEVPEGPRTWCMTRKPGA

SEQ ID NO: 20015 - protein, 660 aa, Artificial Sequence
  Synthetic Polypeptide
MALPVTALLLPLALLLHAARPDVVMTQSPSSLSASVGDRVTITCKASQSVSSYLNWYQQKPGKAPKLLIYAASSLETGVPSRFSGSGSGTDFTLTISSLQPEDFATYYCQQSYSTPWTFGQGTKVEIKRGGGGSGGGGSGGGGSEVQLVESGGGLVRPGGSLRLSCAASGFTFDDYGMSWVRQAPGKGLEWVSGISWNSGSIGYADSVKGRFTISRDNAKNSLYLQMNSLRAEDTALYYCAKRGNSNSFDYWGQGTTVTVSSTRGSGGGGSGGGGSGFKIPIEELEDRVFVNCNTSITWVEGTVGTLLSDITRLDLGKRILDPRGIYRCNGTDIYKDKESTVQVHYRMCQSCVELDPATVAGIIVTDVIATLLLALGVFCFAGHETGRLSGAADTQALLRNDQVYQPLRDRDDAQYSHLGGNWARNKRAKRSGSGVKQTLNFDLLKLAGDVESNPGPSRGHMTEYKPTVRLATRDDVPRAVRTLAAAFADYPATRHTVDPDRHIERVTELQELFLTRVGLDIGKVWVADDGAAVAVWTTPESVEAGAVFAEIGPRMAELSGSRLAAQQQMEGLLAPHRPKEPAWFLATVGVSPDHQGKGLGSAVVLPGVEAAERAGVPAFLETSAPRNLPFYERLGFTVTADVEVPEGPRTWCMTRKPGA

SEQ ID NO: 20016 - protein, 670 aa, Artificial Sequence
  Synthetic Polypeptide
MALPVTALLLPLALLLHAARPDVVMTQSPSSLSASVGDRVTITCKASQSVSSYLNWYQQKPGKAPKLLIYAASSLETGVPSRFSGSGSGTDFTLTISSLQPEDFATYYCQQSYSTPWTFGQGTKVEIKRGGGGSGGGGSGGGGSEVQLVESGGGLVRPGGSLRLSCAASGFTFDDYGMSWVRQAPGKGLEWVSGISWNSGSIGYADSVKGRFTISRDNAKNSLYLQMNSLRAEDTALYYCAKRGNSNSFDYWGQGTTVTVSSTRGSGGGGSGGGGSGQSIKGNHLVKVYDYQEDGSVLLTCDAEAKNITWFKDGKMIGFLTEDKKKWNLGSNAKDPRGMYQCKGSQNKSKPLQVYYRMCQNCIELNAATISGFLFAEIVSIFVLAVGVYFIAGQDGVRQSRASDKQTLLPNDQLYQPLKDREDDQYSHLQGNQLRRNRAKRSGSGVKQTLNFDLLKLAGDVESNPGPSRGHMTEYKPTVRLATRDDVPRAVRTLAAAFADYPATRHTVDPDRHIERVTELQELFLTRVGLDIGKVWVADDGAAVAVWTTPESVEAGAVFAEIGPRMAELSGSRLAAQQQMEGLLAPHRPKEPAWFLATVGVSPDHQGKGLGSAVVLPGVEAAERAGVPAFLETSAPRNLPFYERLGFTVTADVEVPEGPRTWCMTRKPGA

SEQ ID NO: 20017 - protein, 653 aa, Artificial Sequence
  Synthetic Polypeptide
MALPVTALLLPLALLLHAARPDVVMTQSPSSLSASVGDRVTITCKASQSVSSYLNWYQQKPGKAPKLLIYAASSLETGVPSRFSGSGSGTDFTLTISSLQPEDFATYYCQQSYSTPWTFGQGTKVEIKRGGGGSGGGGSGGGGSEVQLVESGGGLVRPGGSLRLSCAASGFTFDDYGMSWVRQAPGKGLEWVSGISWNSGSIGYADSVKGRFTISRDNAKNSLYLQMNSLRAEDTALYYCAKRGNSNSFDYWGQGTTVTVSSTRGSGGGGSGGGGSGQSFGLLDPKLCYLLDGILFIYGVILTALFLRVKFSRSADAPAYQQGQNQLYNELNLGRREEYDVLDKRRGRDPEMGGKPQRRKNPQEGLYNELQKDKMAEAYSEIGMKGERRRGKGHDGLYQGLSTATKDTYDALHMQALPPRRAKRSGSGVKQTLNFDLLKLAGDVESNPGPSRGHMTEYKPTVRLATRDDVPRAVRTLAAAFADYPATRHTVDPDRHIERVTELQELFLTRVGLDIGKVWVADDGAAVAVWTTPESVEAGAVFAEIGPRMAELSGSRLAAQQQMEGLLAPHRPKEPAWFLATVGVSPDHQGKGLGSAVVLPGVEAAERAGVPAFLETSAPRNLPFYERLGFTVTADVEVPEGPRTWCMTRKPGA

SEQ ID NO: 20018 - protein, 754 aa, Artificial Sequence
  Synthetic Polypeptide
MALPVTALLLPLALLLHAARPEVQLVESGGGLVQPGGSLRLSCAASGFSFSDFWMSWVRQAPGKGLEWVATISQAGSEKDYVDSVKGRFTISRDNAKKSLYLQMNSLRAEDTAVYYCASGVYSFDYRGQGTLVTVSSGTGGGGSGGGGSGGGGSEFDVVMTQSPSSLSASVGDRVTITCKASQSVSSYLNWYQQKPGKAPKLLIYAASSLETGVPSRFSGSGSGTDFTLTISSLQPEDFATYYCQQSYSTPWTFGQGTKVEIKRLEDLKNVFPPEVAVFEPSEAEISHTQKATLVCLATGFYPDHVELSWWVNGKEVHSGVCTDPQPLKEQPALNDSRYCLSSRLRVSATFWQNPRNHFRCQVQFYGLSENDEWTQDRAKPVTQIVSAEAWGRADCGFTSESYQQGVLSATILYEILLGKATLYAVLVSALVLMAMVKRKDSRGRAKRSGSGATNFSLLKQAGDVEENPGPTSMDWIWRILFLVGAATGAHSFEEVQLVESGGGLVRPGGSLRLSCAASGFTFDDYGMSWVRQAPGKGLEWVSGISWNSGSIGYADSVKGRFTISRDNAKNSLYLQMNSLRAEDTALYYCAKRGNSNSFDYWGQGTTVTVSSTRIQNPDPAVYQLRDSKSSDKSVCLFTDFDSQTNVSQSKDSDVYITDKCVLDMRSMDFKSNSAVAWSNKSDFACANAFNNSIIPEDTFFPSPESSCDVKLVEKSFETDTNLNFQNLSVIGFRILLLKVAGFNLLMTLRLWSS

SEQ ID NO: 20019 - protein, 758 aa, Artificial Sequence
  Synthetic Polypeptide
MALPVTALLLPLALLLHAARPEVQLVESGGGLVQPGGSLRLSCAASGFSFSDFWMSWVRQAPGKGLEWVATISQAGSEKDYVDSVKGRFTISRDNAKKSLYLQMNSLRAEDTAVYYCASGVYSFDYRGQGTLVTVSSGTGGGGSGGGGSGGGGSEFDVVMTQSPSSLSASVGDRVTITCKASQSVSSYLNWYQQKPGKAPKLLIYAASSLETGVPSRFSGSGSGTDFTLTISSLQPEDFATYYCQQSYSTPWTFGQGTKVEIKRLEIQNPDPAVYQLRDSKSSDKSVCLFTDFDSQTNVSQSKDSDVYITDKCVLDMRSMDFKSNSAVAWSNKSDFACANAFNNSIIPEDTFFPSPESSCDVKLVEKSFETDTNLNFQNLSVIGFRILLLKVAGFNLLMTLRLWSSRAKRSGSGVKQTLNFDLLKLAGDVESNPGPTSMDWIWRILFLVGAATGAHSFEEVQLVESGGGLVRPGGSLRLSCAASGFTFDDYGMSWVRQAPGKGLEWVSGISWNSGSIGYADSVKGRFTISRDNAKNSLYLQMNSLRAEDTALYYCAKRGNSNSFDYWGQGTTVTVSSTREDLKNVFPPEVAVFEPSEAEISHTQKATLVCLATGFYPDHVELSWWVNGKEVHSGVCTDPQPLKEQPALNDSRYCLSSRLRVSATFWQNPRNHFRCQVQFYGLSENDEWTQDRAKPVTQIVSAEAWGRADCGFTSESYQQGVLSATILYEILLGKATLYAVLVSALVLMAMVKRKDSRG

SEQ ID NO: 20020 - protein, 950 aa, Artificial Sequence
  Synthetic Polypeptide
MALPVTALLLPLALLLHAARPEVQLVESGGGLVQPGGSLRLSCAASGFSFSDFWMSWVRQAPGKGLEWVATISQAGSEKDYVDSVKGRFTISRDNAKKSLYLQMNSLRAEDTAVYYCASGVYSFDYRGQGTLVTVSSGTGGGGSGGGGSGGGGSEFDVVMTQSPSSLSASVGDRVTITCKASQSVSSYLNWYQQKPGKAPKLLIYAASSLETGVPSRFSGSGSGTDFTLTISSLQPEDFATYYCQQSYSTPWTFGQGTKVEIKRLEDLKNVFPPEVAVFEPSEAEISHTQKATLVCLATGFYPDHVELSWWVNGKEVHSGVSTDPQPLKEQPALNDSRYCLSSRLRVSATFWQNPRNHFRCQVQFYGLSENDEWTQDRAKPVTQIVSAEAWGRADCGSQSFGLLDPKLCYLLDGILFIYGVILTALFLRVKFSRSADAPAYQQGQNQLYNELNLGRREEYDVLDKRRGRDPEMGGKPQRRKNPQEGLYNELQKDKMAEAYSEIGMKGERRRGKGHDGLYQGLSTATKDTYDALHMQALPPRRAKRSGSGATNFSLLKQAGDVEENPGPTSMDWIWRILFLVGAATGAHSFEEVQLVESGGGLVRPGGSLRLSCAASGFTFDDYGMSWVRQAPGKGLEWVSGISWNSGSIGYADSVKGRFTISRDNAKNSLYLQMNSLRAEDTALYYCAKRGNSNSFDYWGQGTTVTVSSTRIQNPDPAVYQLRDSKSSDKSVCLFTDFDSQTNVSQSKDSDVYITDKTVLDMRSMDFKSNSAVAWSNKSDFACANAFNNSIIPEDTFFPSPESSCGTQSFGLLDPKLCYLLDGILFIYGVILTALFLRVKFSRSADAPAYQQGQNQLYNELNLGRREEYDVLDKRRGRDPEMGGKPQRRKNPQEGLYNELQKDKMAEAYSEIGMKGERRRGKGHDGLYQGLSTATKDTYDALHMQALPPR

SEQ ID NO: 20021 - protein, 780 aa, Artificial Sequence
  Synthetic Polypeptide
MALPVTALLLPLALLLHAARPEVQLVESGGGLVQPGGSLRLSCAASGFSFSDFWMSWVRQAPGKGLEWVATISQAGSEKDYVDSVKGRFTISRDNAKKSLYLQMNSLRAEDTAVYYCASGVYSFDYRGQGTLVTVSSGTGGGGSGGGGSGGGGSEFDVVMTQSPSSLSASVGDRVTITCKASQSVSSYLNWYQQKPGKAPKLLIYAASSLETGVPSRFSGSGSGTDFTLTISSLQPEDFATYYCQQSYSTPWTFGQGTKVEIKRLEGQPKANPTVTLFPPSSEELQANKATLVCLISDFYPGAVTVAWKADGSPVKAGVETTKPSKQSNNKYAASSYLSLTPEQWKSHRSYSCQVTHEGSTVEKTVAPTECSPIKTDVITMDPKDNCSKDANDTLLLQLTNTSAYYMYLLLLLKSVVYFAIITCCLLRRTAFCCNGEKSRAKRSGSGATNFSLLKQAGDVEENPGPTSMDWIWRILFLVGAATGAHSFEEVQLVESGGGLVRPGGSLRLSCAASGFTFDDYGMSWVRQAPGKGLEWVSGISWNSGSIGYADSVKGRFTISRDNAKNSLYLQMNSLRAEDTALYYCAKRGNSNSFDYWGQGTTVTVSSTRASTKGPSVFPLAPSSKSTSGGTAALGCLVKDYFPEPVTVSWNSGALTSGVHTFPAVLQSSGLYSLSSVVTVPSSSLGTQTYICNVNHKPSNTKVDKRVEPKSCEVKTDSTDHVKPKETENTKQPSKSCHKPKAIVHTEKVNMMSLTVLGLRMLFAKTVAVNFLLTAKLFFL

SEQ ID NO: 20022 - protein, 761 aa, Artificial Sequence
  Synthetic Polypeptide
MALPVTALLLPLALLLHAARPEVQLVESGGGLVQPGGSLRLSCAASGFSFSDFWMSWVRQAPGKGLEWVATISQAGSEKDYVDSVKGRFTISRDNAKKSLYLQMNSLRAEDTAVYYCASGVYSFDYRGQGTLVTVSSGTGGGGSGGGGSGGGGSEFDVVMTQSPSSLSASVGDRVTITCKASQSVSSYLNWYQQKPGKAPKLLIYAASSLETGVPSRFSGSGSGTDFTLTISSLQPEDFATYYCQQSYSTPWTFGQGTKVEIKRLEGQPKANPTVTLFPPSSEELQANKATLVCLISDFYPGAVTVAWKADGSPVKAGVETTKPSKQSNNKYAASSYLSLTPEQWKSHRSYSCQVTHEGSTVEKTVAPTECSGRADCGFTSESYQQGVLSATILYEILLGKATLYAVLVSALVLMAMVKRKDSRGRAKRSGSGVKQTLNFDLLKLAGDVESNPGPTSMDWIWRILFLVGAATGAHSFEEVQLVESGGGLVRPGGSLRLSCAASGFTFDDYGMSWVRQAPGKGLEWVSGISWNSGSIGYADSVKGRFTISRDNAKNSLYLQMNSLRAEDTALYYCAKRGNSNSFDYWGQGTTVTVSSTRASTKGPSVFPLAPSSKSTSGGTAALGCLVKDYFPEPVTVSWNSGALTSGVHTFPAVLQSSGLYSLSSVVTVPSSSLGTQTYICNVNHKPSNTKVDKRVEPKSCIPEDTFFPSPESSCDVKLVEKSFETDTNLNFQNLSVIGFRILLLKVAGFNLLMTLRLWSS

SEQ ID NO: 20023 - protein, 895 aa, Artificial Sequence
  Synthetic Polypeptide
MALPVTALLLPLALLLHAARPEVQLVESGGGLVQPGGSLRLSCAASGFSFSDFWMSWVRQAPGKGLEWVATISQAGSEKDYVDSVKGRFTISRDNAKKSLYLQMNSLRAEDTAVYYCASGVYSFDYRGQGTLVTVSSGTGGGGSGGGGSGGGGSEFDVVMTQSPSSLSASVGDRVTITCKASQSVSSYLNWYQQKPGKAPKLLIYAASSLETGVPSRFSGSGSGTDFTLTISSLQPEDFATYYCQQSYSTPWTFGQGTKVEIKRLEIQNPDPAVYQLRDSKSSDKSVCLFTDFDSQTNVSQSKDSDVYITDKCVLDMRSMDFKSNSAVAWSNKSDFACANAFNNSIIPEDTFFPSPESSCDVKLVEKSFETDTNLNFQNLSVIGFRILLLKVAGFNLLMTLRLWSSRAKRSGSGVKQTLNFDLLKLAGDVESNPGPTSMDWIWRILFLVGAATGAHSGPQLQLQESGPGLVKPSETLSLTCTVSGDSISSGDYYWGWIRQPPGKGLEWIGHIYYSGVTYYNPSLKSRVTISVDTSRNQFSLKLSSVTAADTAVYYCTREDSSNWRSRGQGTLVTVSSGSGGGGSGGGGSGGGGSFEEVQLVESGGGLVRPGGSLRLSCAASGFTFDDYGMSWVRQAPGKGLEWVSGISWNSGSIGYADSVKGRFTISRDNAKNSLYLQMNSLRAEDTALYYCAKRGNSNSFDYWGQGTTVTVSSTREDLKNVFPPEVAVFEPSEAEISHTQKATLVCLATGFYPDHVELSWWVNGKEVHSGVCTDPQPLKEQPALNDSRYCLSSRLRVSATFWQNPRNHFRCQVQFYGLSENDEWTQDRAKPVTQIVSAEAWGRADCGFTSESYQQGVLSATILYEILLGKATLYAVLVSALVLMAMVKRKDSRG

SEQ ID NO: 20024 - protein, 1087 aa, Artificial Sequence
  Synthetic Polypeptide
MALPVTALLLPLALLLHAARPEVQLVESGGGLVQPGGSLRLSCAASGFSFSDFWMSWVRQAPGKGLEWVATISQAGSEKDYVDSVKGRFTISRDNAKKSLYLQMNSLRAEDTAVYYCASGVYSFDYRGQGTLVTVSSGTGGGGSGGGGSGGGGSEFDVVMTQSPSSLSASVGDRVTITCKASQSVSSYLNWYQQKPGKAPKLLIYAASSLETGVPSRFSGSGSGTDFTLTISSLQPEDFATYYCQQSYSTPWTFGQGTKVEIKRLEDLKNVFPPEVAVFEPSEAEISHTQKATLVCLATGFYPDHVELSWWVNGKEVHSGVSTDPQPLKEQPALNDSRYCLSSRLRVSATFWQNPRNHFRCQVQFYGLSENDEWTQDRAKPVTQIVSAEAWGRADCGSQSFGLLDPKLCYLLDGILFIYGVILTALFLRVKFSRSADAPAYQQGQNQLYNELNLGRREEYDVLDKRRGRDPEMGGKPQRRKNPQEGLYNELQKDKMAEAYSEIGMKGERRRGKGHDGLYQGLSTATKDTYDALHMQALPPRRAKRSGSGATNFSLLKQAGDVEENPGPTSMDWIWRILFLVGAATGAHSGPQLQLQESGPGLVKPSETLSLTCTVSGDSISSGDYYWGWIRQPPGKGLEWIGHIYYSGVTYYNPSLKSRVTISVDTSRNQFSLKLSSVTAADTAVYYCTREDSSNWRSRGQGTLVTVSSGSGGGGSGGGGSGGGGSFEEVQLVESGGGLVRPGGSLRLSCAASGFTFDDYGMSWVRQAPGKGLEWVSGISWNSGSIGYADSVKGRFTISRDNAKNSLYLQMNSLRAEDTALYYCAKRGNSNSFDYWGQGTTVTVSSTRIQNPDPAVYQLRDSKSSDKSVCLFTDFDSQTNVSQSKDSDVYITDKTVLDMRSMDFKSNSAVAWSNKSDFACANAFNNSIIPEDTFFPSPESSCGTQSFGLLDPKLCYLLDGILFIYGVILTALFLRVKFSRSADAPAYQQGQNQLYNELNLGRREEYDVLDKRRGRDPEMGGKPQRRKNPQEGLYNELQKDKMAEAYSEIGMKGERRRGKGHDGLYQGLSTATKDTYDALHMQALPPR

SEQ ID NO: 20025 - protein, 917 aa, Artificial Sequence
  Synthetic Polypeptide
MALPVTALLLPLALLLHAARPEVQLVESGGGLVQPGGSLRLSCAASGFSFSDFWMSWVRQAPGKGLEWVATISQAGSEKDYVDSVKGRFTISRDNAKKSLYLQMNSLRAEDTAVYYCASGVYSFDYRGQGTLVTVSSGTGGGGSGGGGSGGGGSEFDVVMTQSPSSLSASVGDRVTITCKASQSVSSYLNWYQQKPGKAPKLLIYAASSLETGVPSRFSGSGSGTDFTLTISSLQPEDFATYYCQQSYSTPWTFGQGTKVEIKRLEGQPKANPTVTLFPPSSEELQANKATLVCLISDFYPGAVTVAWKADGSPVKAGVETTKPSKQSNNKYAASSYLSLTPEQWKSHRSYSCQVTHEGSTVEKTVAPTECSPIKTDVITMDPKDNCSKDANDTLLLQLTNTSAYYMYLLLLLKSVVYFAIITCCLLRRTAFCCNGEKSRAKRSGSGATNFSLLKQAGDVEENPGPTSMDWIWRILFLVGAATGAHSGPQLQLQESGPGLVKPSETLSLTCTVSGDSISSGDYYWGWIRQPPGKGLEWIGHIYYSGVTYYNPSLKSRVTISVDTSRNQFSLKLSSVTAADTAVYYCTREDSSNWRSRGQGTLVTVSSGSGGGGSGGGGSGGGGSFEEVQLVESGGGLVRPGGSLRLSCAASGFTFDDYGMSWVRQAPGKGLEWVSGISWNSGSIGYADSVKGRFTISRDNAKNSLYLQMNSLRAEDTALYYCAKRGNSNSFDYWGQGTTVTVSSTRASTKGPSVFPLAPSSKSTSGGTAALGCLVKDYFPEPVTVSWNSGALTSGVHTFPAVLQSSGLYSLSSVVTVPSSSLGTQTYICNVNHKPSNTKVDKRVEPKSCEVKTDSTDHVKPKETENTKQPSKSCHKPKAIVHTEKVNMMSLTVLGLRMLFAKTVAVNFLLTAKLFFL

SEQ ID NO: 20026 - protein, 898 aa, Artificial Sequence
  Synthetic Polypeptide
MALPVTALLLPLALLLHAARPEVQLVESGGGLVQPGGSLRLSCAASGFSFSDFWMSWVRQAPGKGLEWVATISQAGSEKDYVDSVKGRFTISRDNAKKSLYLQMNSLRAEDTAVYYCASGVYSFDYRGQGTLVTVSSGTGGGGSGGGGSGGGGSEFDVVMTQSPSSLSASVGDRVTITCKASQSVSSYLNWYQQKPGKAPKLLIYAASSLETGVPSRFSGSGSGTDFTLTISSLQPEDFATYYCQQSYSTPWTFGQGTKVEIKRLEGQPKANPTVTLFPPSSEELQANKATLVCLISDFYPGAVTVAWKADGSPVKAGVETTKPSKQSNNKYAASSYLSLTPEQWKSHRSYSCQVTHEGSTVEKTVAPTECSGRADCGFTSESYQQGVLSATILYEILLGKATLYAVLVSALVLMAMVKRKDSRGRAKRSGSGVKQTLNFDLLKLAGDVESNPGPTSMDWIWRILFLVGAATGAHSGPQLQLQESGPGLVKPSETLSLTCTVSGDSISSGDYYWGWIRQPPGKGLEWIGHIYYSGVTYYNPSLKSRVTISVDTSRNQFSLKLSSVTAADTAVYYCTREDSSNWRSRGQGTLVTVSSGSGGGGSGGGGSGGGGSFEEVQLVESGGGLVRPGGSLRLSCAASGFTFDDYGMSWVRQAPGKGLEWVSGISWNSGSIGYADSVKGRFTISRDNAKNSLYLQMNSLRAEDTALYYCAKRGNSNSFDYWGQGTTVTVSSTRASTKGPSVFPLAPSSKSTSGGTAALGCLVKDYFPEPVTVSWNSGALTSGVHTFPAVLQSSGLYSLSSVVTVPSSSLGTQTYICNVNHKPSNTKVDKRVEPKSCIPEDTFFPSPESSCDVKLVEKSFETDTNLNFQNLSVIGFRILLLKVAGFNLLMTLRLWSS

SEQ ID NO: 20027 - protein, 755 aa, Artificial Sequence
  Synthetic Polypeptide
MALPVTALLLPLALLLHAARPEVQVLESGGGLVQPGGSLRLSCAASGFTFSNFAMSWVRQAPGKGLEWVSTISGSAGTTDYADSVKGRFTISRDNSKKTLYLQMNSLRVEDTAVYYCADGRGPFFDYRGQGTLVTVSSGTGGGGSGGGGSGGGGSEFDVVMTQSPSSLSASVGDRVTITCKASQSVSSYLNWYQQKPGKAPKLLIYAASSLETGVPSRFSGSGSGTDFTLTISSLQPEDFATYYCQQSYSTPWTFGQGTKVEIKRLEDLKNVFPPEVAVFEPSEAEISHTQKATLVCLATGFYPDHVELSWWVNGKEVHSGVCTDPQPLKEQPALNDSRYCLSSRLRVSATFWQNPRNHFRCQVQFYGLSENDEWTQDRAKPVTQIVSAEAWGRADCGFTSESYQQGVLSATILYEILLGKATLYAVLVSALVLMAMVKRKDSRGRAKRSGSGATNFSLLKQAGDVEENPGPTSMDWIWRILFLVGAATGAHSFEEVQLVESGGGLVRPGGSLRLSCAASGFTFDDYGMSWVRQAPGKGLEWVSGISWNSGSIGYADSVKGRFTISRDNAKNSLYLQMNSLRAEDTALYYCAKRGNSNSFDYWGQGTTVTVSSTRIQNPDPAVYQLRDSKSSDKSVCLFTDFDSQTNVSQSKDSDVYITDKCVLDMRSMDFKSNSAVAWSNKSDFACANAFNNSIIPEDTFFPSPESSCDVKLVEKSFETDTNLNFQNLSVIGFRILLLKVAGFNLLMTLRLWSS

SEQ ID NO: 20028 - protein, 756 aa, Artificial Sequence
  Synthetic Polypeptide
MALPVTALLLPLALLLHAARPDVVMTQSPSSLSASVGDRVTITCKASQSVSSYLNWYQQKPGKAPKLLIYAASSLETGVPSRFSGSGSGTDFTLTISSLQPEDFATYYCQQSYSTPWTFGQGTKVEIKRLEDLKNVFPPEVAVFEPSEAEISHTQKATLVCLATGFYPDHVELSWWVNGKEVHSGVCTDPQPLKEQPALNDSRYCLSSRLRVSATFWQNPRNHFRCQVQFYGLSENDEWTQDRAKPVTQIVSAEAWGRADCGFTSESYQQGVLSATILYEILLGKATLYAVLVSALVLMAMVKRKDSRGRAKRSGSGATNFSLLKQAGDVEENPGPTSMDWIWRILFLVGAATGAHSGPEVQLVESGGGLVQAGGSLRLSCAASGRTFSMGWFRQAPGKEREFVAAITYSGGSPYYADSVKGRFTISRDNAKNTVYLQMNSLKPEDTAVYYCAANPTYGSDWNAENWGQGTQVTVSSGSGGGGSGGGGSGGGGSFEEVQLVESGGGLVRPGGSLRLSCAASGFTFDDYGMSWVRQAPGKGLEWVSGISWNSGSIGYADSVKGRFTISRDNAKNSLYLQMNSLRAEDTALYYCAKRGNSNSFDYWGQGTTVTVSSTRIQNPDPAVYQLRDSKSSDKSVCLFTDFDSQTNVSQSKDSDVYITDKCVLDMRSMDFKSNSAVAWSNKSDFACANAFNNSIIPEDTFFPSPESSCDVKLVEKSFETDTNLNFQNLSVIGFRILLLKVAGFNLLMTLRLWSS

SEQ ID NO: 20029 - protein, 883 aa, Artificial Sequence
  Synthetic Polypeptide
MALPVTALLLPLALLLHAARPDVVMTQSPSSLSASVGDRVTITCKASQSVSSYLNWYQQKPGKAPKLLIYAASSLETGVPSRFSGSGSGTDFTLTISSLQPEDFATYYCQQSYSTPWTFGQGTKVEIKRLEDLKNVFPPEVAVFEPSEAEISHTQKATLVCLATGFYPDHVELSWWVNGKEVHSGVCTDPQPLKEQPALNDSRYCLSSRLRVSATFWQNPRNHFRCQVQFYGLSENDEWTQDRAKPVTQIVSAEAWGRADCGFTSESYQQGVLSATILYEILLGKATLYAVLVSALVLMAMVKRKDSRGRAKRSGSGATNFSLLKQAGDVEENPGPTSMDWIWRILFLVGAATGAHSQLQLQESGPGLVKPSETLSLTCTVSGGSISSGDYYWGWIRQPPGKGLEWIGSISYSGSTYYNPSLKSRVTISVDTSRNQFSLKLSSVTAADTAVYYCTREDSSNWRSRGQGTLVTVSSSGGGGSGGGGSEVQLVESGGGLVQAGGSLRLSCAASGRTFSMGWFRQAPGKEREFVAAITYSGGSPYYADSVKGRFTISRDNAKNTVYLQMNSLKPEDTAVYYCAANPTYGSDWNAENWGQGTQVTVSSGSGGGGSGGGGSGGGGSFEEVQLVESGGGLVRPGGSLRLSCAASGFTFDDYGMSWVRQAPGKGLEWVSGISWNSGSIGYADSVKGRFTISRDNAKNSLYLQMNSLRAEDTALYYCAKRGNSNSFDYWGQGTTVTVSSTRIQNPDPAVYQLRDSKSSDKSVCLFTDFDSQTNVSQSKDSDVYITDKCVLDMRSMDFKSNSAVAWSNKSDFACANAFNNSIIPEDTFFPSPESSCDVKLVEKSFETDTNLNFQNLSVIGFRILLLKVAGFNLLMTLRLWSS

SEQ ID NO: 20030 - protein, 892 aa, Artificial Sequence
  Synthetic Polypeptide
MALPVTALLLPLALLLHAARPEVQVLESGGGLVQPGGSLRLSCAASGFTFSNFAMSWVRQAPGKGLEWVSTISGSAGTTDYADSVKGRFTISRDNSKKTLYLQMNSLRVEDTAVYYCADGRGPFFDYRGQGTLVTVSSGTGGGGSGGGGSGGGGSEFDVVMTQSPSSLSASVGDRVTITCKASQSVSSYLNWYQQKPGKAPKLLIYAASSLETGVPSRFSGSGSGTDFTLTISSLQPEDFATYYCQQSYSTPWTFGQGTKVEIKRLEDLKNVFPPEVAVFEPSEAEISHTQKATLVCLATGFYPDHVELSWWVNGKEVHSGVCTDPQPLKEQPALNDSRYCLSSRLRVSATFWQNPRNHFRCQVQFYGLSENDEWTQDRAKPVTQIVSAEAWGRADCGFTSESYQQGVLSATILYEILLGKATLYAVLVSALVLMAMVKRKDSRGRAKRSGSGATNFSLLKQAGDVEENPGPTSMDWIWRILFLVGAATGAHSGPEVQLVESGGGLVQAGGSLRLSCAASGRTFSMGWFRQAPGKEREFVAAITYSGGSPYYASSVRGRFTISRDNAKNTVYLQMNSLKPEDTAVYYCAANPTYGSDWNAENWGQGTQVTVSSGSGGGGSGGGGSGGGGSFEEVQLVESGGGLVRPGGSLRLSCAASGFTFDDYGMSWVRQAPGKGLEWVSGISWNSGSIGYADSVKGRFTISRDNAKNSLYLQMNSLRAEDTALYYCAKRGNSNSFDYWGQGTTVTVSSTRIQNPDPAVYQLRDSKSSDKSVCLFTDFDSQTNVSQSKDSDVYITDKCVLDMRSMDFKSNSAVAWSNKSDFACANAFNNSIIPEDTFFPSPESSCDVKLVEKSFETDTNLNFQNLSVIGFRILLLKVAGFNLLMTLRLWSS

SEQ ID NO: 20031 - protein, 723 aa, Artificial Sequence
  Synthetic Polypeptide
MALPVTALLLPLALLLHAARPDIQMTQSPSSVSASVGDRVTITCRASQSISSYLNWYQQKPGKAPKLLIYAASSLQSGVPSRFSGSGSGTDFTLTISSLQPEDFATYYCQQSYSTPWTFGQGTKVEIKRGGGGSGGGGSGGGGSEVQLVESGGGLVQPGRSLRLSCAASGFTFDDYAMHWVRQAPGKGLEWVSGISWNSGSIGYADSAKGRFTISRDNSKNTLYLQMNSLRAEDTAVYYCAKRGNSNSFDYWGQGTLVTVSSTREQKLISEEDLAKPTTTPAPRPPTPAPTIASQPLSLRPEACRPAAGGAVHTRGLDFACDIYIWAPLAGTCGVLLLSLVITLYCKRGRKKLLYIFKQPFMRPVQTTQEEDGCSCRFPEEEEGGCELRVKFSRSADAPAYQQGQNQLYNELNLGRREEYDVLDKRRGRDPEMGGKPRRKNPQEGLYNELQKDKMAEAYSEIGMKGERRRGKGHDGLYQGLSTATKDTYDALHMQALPPRSSGSGEGRGSLLTCGDVEENPGPHMTEYKPTVRLATRDDVPRAVRTLAAAFADYPATRHTVDPDRHIERVTELQELFLTRVGLDIGKVWVADDGAAVAVWTTPESVEAGAVFAEIGPRMAELSGSRLAAQQQMEGLLAPHRPKEPAWFLATVGVSPDHQGKGLGSAVVLPGVEAAERAGVPAFLETSAPRNLPFYERLGFTVTADVEVPEGPRTWCMTRKPGA

SEQ ID NO: 20032 - protein, 717 aa, Artificial Sequence
  Synthetic Polypeptide
MALPVTALLLPLALLLHAARPDIQMTQSPSSVSASVGDRVTITCRASQSISSYLNWYQQKPGKAPKLLIYAASSLQSGVPSRFSGSGSGTDFTLTISSLQPEDFATYYCQQSYSTPWTFGQGTKVEIKRGGGGSGGGGSGGGGSEVQLVESGGGLVQPGRSLRLSCAASGFTFDDYAMHWVRQAPGKGLEWVSGISWNSGSIGYADSAKGRFTISRDNSKNTLYLQMNSLRAEDTAVYYCAKRGNSNSFDYWGQGTLVTVSSTREQKLISEEDLKIEVMYPPPYLDNEKSNGTIIHVKGKHLCPSPLFPGPSKPFWVLVVVGGVLACYSLLVTVAFIIFWVRSKRSRLLHSDYMNMTPRRPGPTRKHYQPYAPPRDFAAYRSRVKFSRSADAPAYQQGQNQLYNELNLGRREEYDVLDKRRGRDPEMGGKPRRKNPQEGLYNELQKDKMAEAYSEIGMKGERRRGKGHDGLYQGLSTATKDTYDALHMQALPPRSSGSGEGRGSLLTCGDVEENPGPHMTEYKPTVRLATRDDVPRAVRTLAAAFADYPATRHTVDPDRHIERVTELQELFLTRVGLDIGKVWVADDGAAVAVWTTPESVEAGAVFAEIGPRMAELSGSRLAAQQQMEGLLAPHRPKEPAWFLATVGVSPDHQGKGLGSAVVLPGVEAAERAGVPAFLETSAPRNLPFYERLGFTVTADVEVPEGPRTWCMTRKPGA

SEQ ID NO: 20033 - protein, 494 aa, Artificial Sequence
  Synthetic Polypeptide
MALPVTALLLPLALLLHAARPDIQMTQSPSSVSASVGDRVTITCRASQSISSYLNWYQQKPGKAPKLLIYAASSLQSGVPSRFSGSGSGTDFTLTISSLQPEDFATYYCQQSYSTPWTFGQGTKVEIKRGGGGSGGGGSGGGGSEVQLVESGGGLVQPGRSLRLSCAASGFTFDDYAMHWVRQAPGKGLEWVSGISWNSGSIGYADSAKGRFTISRDNSKNTLYLQMNSLRAEDTAVYYCAKRGNSNSFDYWGQGTLVTVSSTREQKLISEEDLKIEVMYPPPYLDNEKSNGTIIHVKGKHLCPSPLFPGPSKPFWVLVVVGGVLACYSLLVTVAFIIFWVRSKRSRLLHSDYMNMTPRRPGPTRKHYQPYAPPRDFAAYRSRVKFSRSADAPAYQQGQNQLYNELNLGRREEYDVLDKRRGRDPEMGGKPRRKNPQEGLYNELQKDKMAEAYSEIGMKGERRRGKGHDGLYQGLSTATKDTYDALHMQALPPR

SEQ ID NO: 20034 - protein, 500 aa, Artificial Sequence
  Synthetic Polypeptide
MALPVTALLLPLALLLHAARPDIQMTQSPSSVSASVGDRVTITCRASQSISSYLNWYQQKPGKAPKLLIYAASSLQSGVPSRFSGSGSGTDFTLTISSLQPEDFATYYCQQSYSTPWTFGQGTKVEIKRGGGGSGGGGSGGGGSEVQLVESGGGLVQPGRSLRLSCAASGFTFDDYAMHWVRQAPGKGLEWVSGISWNSGSIGYADSAKGRFTISRDNSKNTLYLQMNSLRAEDTAVYYCAKRGNSNSFDYWGQGTLVTVSSTREQKLISEEDLAKPTTTPAPRPPTPAPTIASQPLSLRPEACRPAAGGAVHTRGLDFACDIYIWAPLAGTCGVLLLSLVITLYCKRGRKKLLYIFKQPFMRPVQTTQEEDGCSCRFPEEEEGGCELRVKFSRSADAPAYQQGQNQLYNELNLGRREEYDVLDKRRGRDPEMGGKPRRKNPQEGLYNELQKDKMAEAYSEIGMKGERRRGKGHDGLYQGLSTATKDTYDALHMQALPPR

SEQ ID NO: 20035 - protein, 500 aa, Artificial Sequence
  Synthetic Polypeptide
MALPVTALLLPLALLLHAARPEVQLVESGGGLVQPGRSLRLSCAASGFTFDDYAMHWVRQAPGKGLEWVSGISWNSGSIGYADSAKGRFTISRDNSKNTLYLQMNSLRAEDTAVYYCAKRGNSNSFDYWGQGTLVTVSSGGGGSGGGGSGGGGSDIQMTQSPSSVSASVGDRVTITCRASQSISSYLNWYQQKPGKAPKLLIYAASSLQSGVPSRFSGSGSGTDFTLTISSLQPEDFATYYCQQSYSTPWTFGQGTKVEIKRTREQKLISEEDLAKPTTTPAPRPPTPAPTIASQPLSLRPEACRPAAGGAVHTRGLDFACDIYIWAPLAGTCGVLLLSLVITLYCKRGRKKLLYIFKQPFMRPVQTTQEEDGCSCRFPEEEEGGCELRVKFSRSADAPAYQQGQNQLYNELNLGRREEYDVLDKRRGRDPEMGGKPRRKNPQEGLYNELQKDKMAEAYSEIGMKGERRRGKGHDGLYQGLSTATKDTYDALHMQALPPR

SEQ ID NO: 20036 - protein, 913 aa, Artificial Sequence
  Synthetic Polypeptide
MALPVTALLLPLALLLHAARPDIQMTQSPSSVSASVGDRVTITCRASQSISSYLNWYQQKPGKAPKLLIYAASSLQSGVPSRFSGSGSGTDFTLTISSLQPEDFATYYCQQSYSTPWTFGQGTKVEIKRGGGGSGGGGSGGGGSEVQLVESGGGLVQPGRSLRLSCAASGFTFDDYAMHWVRQAPGKGLEWVSGISWNSGSIGYADSAKGRFTISRDNSKNTLYLQMNSLRAEDTAVYYCAKRGNSNSFDYWGQGTLVTVSSTREQKLISEEDLAKPTTTPAPRPPTPAPTIASQPLSLRPEACRPAAGGAVHTRGLDFACDIYIWAPLAGTCGVLLLSLVITLYCGRARVKFSRSADAPAYQQGQNQLYNELNLGRREEYDVLDKRRGRDPEMGGKPRRKNPQEGLYNELQKDKMAEAYSEIGMKGERRRGKGHDGLYQGLSTATKDTYDALHMQALPPRSRGSGATNFSLLKQAGDVEENPGPGIHMATYEVLCEVARKLGTDDREVVLFLLNVFIPQPTLAQLIGALRALKEEGRLTFPLLAECLFRAGRRDLLRDLLHLDPRFLERHLAGTMSYFSPYQLTVLHVDGELCARDIRSLIFLSKDTIGSRSTPQTFLHWVYCMENLDLLGPTDVDALMSMLRSLSRVDLQRQVQTLMGLHLSGPSHSQHYRHTPLETDFYDYKDDDDKTSGSGEGRGSLLTCGDVEENPGPHMTEYKPTVRLATRDDVPRAVRTLAAAFADYPATRHTVDPDRHIERVTELQELFLTRVGLDIGKVWVADDGAAVAVWTTPESVEAGAVFAEIGPRMAELSGSRLAAQQQMEGLLAPHRPKEPAWFLATVGVSPDHQGKGLGSAVVLPGVEAAERAGVPAFLETSAPRNLPFYERLGFTVTADVEVPEGPRTWCMTRKPGA

SEQ ID NO: 20037 - protein, 853 aa, Artificial Sequence
  Synthetic Polypeptide
MALPVTALLLPLALLLHAARPDIQMTQSPSSVSASVGDRVTITCRASQSISSYLNWYQQKPGKAPKLLIYAASSLQSGVPSRFSGSGSGTDFTLTISSLQPEDFATYYCQQSYSTPWTFGQGTKVEIKRLEIQNPDPAVYQLRDSKSSDKSVCLFTDFDSQTNVSQSKDSDVYITDKCVLDMRSMDFKSNSAVAWSNKSDFACANAFNNSIIPEDTFFPSSDVPCDVKLVEKSFETDTNLNFQNLSVIGFRILLLKVAGFNLLMTLRLWSSRAKRSGSGVKQTLNFDLLKLAGDVESNPGPTSMDWIWRILFLVGAATGAHSFEEVQLVESGGGLVQPGRSLRLSCAASGFTFDDYAMHWVRQAPGKGLEWVSGISWNSGSIGYADSAKGRFTISRDNSKNTLYLQMNSLRAEDTAVYYCAKRGNSNSFDYWGQGTLVTVSSTREDLKNVFPPEVAVFEPSKAEIAHTQKATLVCLATGFYPDHVELSWWVNGKEVHSGVCTDPQPLKEQPALNDSRYCLSSRLRVSATFWQNPRNHFRCQVQFYGLSENDEWTQDRAKPVTQIVSAEAWGRADCGITSASYHQGVLSATILYEILLGKATLYAVLVSALVLMAMVKRKDSRGRAKRSGSGATNFSLLKQAGDVEENPGPSRGHMTEYKPTVRLATRDDVPRAVRTLAAAFADYPATRHTVDPDRHIERVTELQELFLTRVGLDIGKVWVADDGAAVAVWTTPESVEAGAVFAEIGPRMAELSGSRLAAQQQMEGLLAPHRPKEPAWFLATVGVSPDHQGKGLGSAVVLPGVEAAERAGVPAFLETSAPRNLPFYERLGFTVTADVEVPEGPRTWCMTRKPGA

SEQ ID NO: 20038 - protein, 852 aa, Artificial Sequence
  Synthetic Polypeptide
MALPVTALLLPLALLLHAARPDIQMTQSPSSVSASVGDRVTITCRASQSISSYLNWYQQKPGKAPKLLIYAASSLQSGVPSRFSGSGSGTDFTLTISSLQPEDFATYYCQQSYSTPWTFGQGTKVEIKRLEDLKNVFPPEVAVFEPSKAEIAHTQKATLVCLATGFYPDHVELSWWVNGKEVHSGVCTDPQPLKEQPALNDSRYCLSSRLRVSATFWQNPRNHFRCQVQFYGLSENDEWTQDRAKPVTQIVSAEAWGRADCGITSASYHQGVLSATILYEILLGKATLYAVLVSALVLMAMVKRKDSRGRAKRSGSGATNFSLLKQAGDVEENPGPTSMDWIWRILFLVGAATGAHSFEEVQLVESGGGLVQPGRSLRLSCAASGFTFDDYAMHWVRQAPGKGLEWVSGISWNSGSIGYADSAKGRFTISRDNSKNTLYLQMNSLRAEDTAVYYCAKRGNSNSFDYWGQGTLVTVSSTRIQNPDPAVYQLRDSKSSDKSVCLFTDFDSQTNVSQSKDSDVYITDKCVLDMRSMDFKSNSAVAWSNKSDFACANAFNNSIIPEDTFFPSSDVPCDVKLVEKSFETDTNLNFQNLSVIGFRILLLKVAGFNLLMTLRLWSSRAKRSGSGVKQTLNFDLLKLAGDVESNPGPSRGHMTEYKPTVRLATRDDVPRAVRTLAAAFADYPATRHTVDPDRHIERVTELQELFLTRVGLDIGKVWVADDGAAVAVWTTPESVEAGAVFAEIGPRMAELSGSRLAAQQQMEGLLAPHRPKEPAWFLATVGVSPDHQGKGLGSAVVLPGVEAAERAGVPAFLETSAPRNLPFYERLGFTVTADVEVPEGPRTWCMTRKPGA

SEQ ID NO: 20039 - protein, 619 aa, Artificial Sequence
  Synthetic Polypeptide
MALPVTALLLPLALLLHAARPDIQMTQSPSSVSASVGDRVTITCRASQSISSYLNWYQQKPGKAPKLLIYAASSLQSGVPSRFSGSGSGTDFTLTISSLQPEDFATYYCQQSYSTPWTFGQGTKVEIKRLEDLKNVFPPEVAVFEPSEAEISHTQKATLVCLATGFYPDHVELSWWVNGKEVHSGVCTDPQPLKEQPALNDSRYCLSSRLRVSATFWQNPRNHFRCQVQFYGLSENDEWTQDRAKPVTQIVSAEAWGRADCGFTSESYQQGVLSATILYEILLGKATLYAVLVSALVLMAMVKRKDSRGRAKRSGSGATNFSLLKQAGDVEENPGPTSMDWIWRILFLVGAATGAHSFEEVQLVESGGGLVQPGRSLRLSCAASGFTFDDYAMHWVRQAPGKGLEWVSGISWNSGSIGYADSAKGRFTISRDNSKNTLYLQMNSLRAEDTAVYYCAKRGNSNSFDYWGQGTLVTVSSTRIQNPDPAVYQLRDSKSSDKSVCLFTDFDSQTNVSQSKDSDVYITDKCVLDMRSMDFKSNSAVAWSNKSDFACANAFNNSIIPEDTFFPSPESSCDVKLVEKSFETDTNLNFQNLSVIGFRILLLKVAGFNLLMTLRLWSS

SEQ ID NO: 20040 - protein, 844 aa, Artificial Sequence
  Synthetic Polypeptide
MALPVTALLLPLALLLHAARPDIQMTQSPSSVSASVGDRVTITCRASQSISSYLNWYQQKPGKAPKLLIYAASSLQSGVPSRFSGSGSGTDFTLTISSLQPEDFATYYCQQSYSTPWTFGQGTKVEIKRLEDLKNVFPPEVAVFEPSEAEISHTQKATLVCLATGFYPDHVELSWWVNGKEVHSGVCTDPQPLKEQPALNDSRYCLSSRLRVSATFWQNPRNHFRCQVQFYGLSENDEWTQDRAKPVTQIVSAEAWGRADCGFTSESYQQGVLSATILYEILLGKATLYAVLVSALVLMAMVKRKDSRGRAKRSGSGATNFSLLKQAGDVEENPGPTSMDWIWRILFLVGAATGAHSFEEVQLVESGGGLVQPGRSLRLSCAASGFTFDDYAMHWVRQAPGKGLEWVSGISWNSGSIGYADSAKGRFTISRDNSKNTLYLQMNSLRAEDTAVYYCAKRGNSNSFDYWGQGTLVTVSSTRIQNPDPAVYQLRDSKSSDKSVCLFTDFDSQTNVSQSKDSDVYITDKCVLDMRSMDFKSNSAVAWSNKSDFACANAFNNSIIPEDTFFPSPESSCDVKLVEKSFETDTNLNFQNLSVIGFRILLLKVAGFNLLMTLRLWSSRAKRSGSGVKQTLNFDLLKLAGDVESNPGPSRGGIHTMATYEVLCEVARKLGTDDREVVLFLLNVFIPQPTLAQLIGALRALKEEGRLTFPLLAECLFRAGRRDLLRDLLHLDPRFLERHLAGTMSYFSPYQLTVLHVDGELCARDIRSLIFLSKDTIGSRSTPQTFLHWVYCMENLDLLGPTDVDALMSMLRSLSRVDLQRQVQTLMGLHLSGPSHSQHYRHTP

SEQ ID NO: 20041 - protein, 623 aa, Artificial Sequence
  Synthetic Polypeptide
MALPVTALLLPLALLLHAARPDIQMTQSPSSVSASVGDRVTITCRASQSISSYLNWYQQKPGKAPKLLIYAASSLQSGVPSRFSGSGSGTDFTLTISSLQPEDFATYYCQQSYSTPWTFGQGTKVEIKRLEIQNPDPAVYQLRDSKSSDKSVCLFTDFDSQTNVSQSKDSDVYITDKCVLDMRSMDFKSNSAVAWSNKSDFACANAFNNSIIPEDTFFPSPESSCDVKLVEKSFETDTNLNFQNLSVIGFRILLLKVAGFNLLMTLRLWSSRAKRSGSGVKQTLNFDLLKLAGDVESNPGPTSMDWIWRILFLVGAATGAHSFEEVQLVESGGGLVQPGRSLRLSCAASGFTFDDYAMHWVRQAPGKGLEWVSGISWNSGSIGYADSAKGRFTISRDNSKNTLYLQMNSLRAEDTAVYYCAKRGNSNSFDYWGQGTLVTVSSTREDLKNVFPPEVAVFEPSEAEISHTQKATLVCLATGFYPDHVELSWWVNGKEVHSGVCTDPQPLKEQPALNDSRYCLSSRLRVSATFWQNPRNHFRCQVQFYGLSENDEWTQDRAKPVTQIVSAEAWGRADCGFTSESYQQGVLSATILYEILLGKATLYAVLVSALVLMAMVKRKDSRG

SEQ ID NO: 20042 - protein, 845 aa, Artificial Sequence
  Synthetic Polypeptide
MALPVTALLLPLALLLHAARPDIQMTQSPSSVSASVGDRVTITCRASQSISSYLNWYQQKPGKAPKLLIYAASSLQSGVPSRFSGSGSGTDFTLTISSLQPEDFATYYCQQSYSTPWTFGQGTKVEIKRLEIQNPDPAVYQLRDSKSSDKSVCLFTDFDSQTNVSQSKDSDVYITDKCVLDMRSMDFKSNSAVAWSNKSDFACANAFNNSIIPEDTFFPSPESSCDVKLVEKSFETDTNLNFQNLSVIGFRILLLKVAGFNLLMTLRLWSSRAKRSGSGVKQTLNFDLLKLAGDVESNPGPTSMDWIWRILFLVGAATGAHSFEEVQLVESGGGLVQPGRSLRLSCAASGFTFDDYAMHWVRQAPGKGLEWVSGISWNSGSIGYADSAKGRFTISRDNSKNTLYLQMNSLRAEDTAVYYCAKRGNSNSFDYWGQGTLVTVSSTREDLKNVFPPEVAVFEPSEAEISHTQKATLVCLATGFYPDHVELSWWVNGKEVHSGVCTDPQPLKEQPALNDSRYCLSSRLRVSATFWQNPRNHFRCQVQFYGLSENDEWTQDRAKPVTQIVSAEAWGRADCGFTSESYQQGVLSATILYEILLGKATLYAVLVSALVLMAMVKRKDSRGRAKRSGSGATNFSLLKQAGDVEENPGPSRGGIHTMATYEVLCEVARKLGTDDREVVLFLLNVFIPQPTLAQLIGALRALKEEGRLTFPLLAECLFRAGRRDLLRDLLHLDPRFLERHLAGTMSYFSPYQLTVLHVDGELCARDIRSLIFLSKDTIGSRSTPQTFLHWVYCMENLDLLGPTDVDALMSMLRSLSRVDLQRQVQTLMGLHLSGPSHSQHYRHTP

SEQ ID NO: 20043 - protein, 897 aa, Artificial Sequence
  Synthetic Polypeptide
MALPVTALLLPLALLLHAARPLEGKPIPNPLLGLDSTGSGEDLKNVFPPEVAVFEPSKAEIAHTQKATLVCLATGFYPDHVELSWWVNGKEVHSGVCTDPQPLKEQPALNDSRYCLSSRLRVSATFWQNPRNHFRCQVQFYGLSENDEWTQDRAKPVTQIVSAEAWGRADCGITSASYHQGVLSATILYEILLGKATLYAVLVSALVLMAMVKRKDSRGRAKRSGSGATNFSLLKQAGDVEENPGPTSMALPVTALLLPLALLLHAARPDIQMTQSPSSVSASVGDRVTITCRASQSISSYLNWYQQKPGKAPKLLIYAASSLQSGVPSRFSGSGSGTDFTLTISSLQPEDFATYYCQQSYSTPWTFGQGTKVEIKRGGGGSGGGGSGGGGSEVQLVESGGGLVQPGRSLRLSCAASGFTFDDYAMHWVRQAPGKGLEWVSGISWNSGSIGYADSAKGRFTISRDNSKNTLYLQMNSLRAEDTAVYYCAKRGNSNSFDYWGQGTLVTVSSTREQKLISEEDGSGIQNPDPAVYQLRDSKSSDKSVCLFTDFDSQTNVSQSKDSDVYITDKCVLDMRSMDFKSNSAVAWSNKSDFACANAFNNSIIPEDTFFPSSDVPCDVKLVEKSFETDTNLNFQNLSVIGFRILLLKVAGFNLLMTLRLWSSRAKRSGSGVKQTLNFDLLKLAGDVESNPGPSRGHMTEYKPTVRLATRDDVPRAVRTLAAAFADYPATRHTVDPDRHIERVTELQELFLTRVGLDIGKVWVADDGAAVAVWTTPESVEAGAVFAEIGPRMAELSGSRLAAQQQMEGLLAPHRPKEPAWFLATVGVSPDHQGKGLGSAVVLPGVEAAERAGVPAFLETSAPRNLPFYERLGFTVTADVEVPEGPRTWCMTRKPGA

SEQ ID NO: 20044 - protein, 898 aa, Artificial Sequence
  Synthetic Polypeptide
MALPVTALLLPLALLLHAARPLEQKLISEEDLGSGDRPDPAVYQLRDSKSSDKSVCLFTDFDSQTNVSQSKDSDVYITDKCVLDMRSMDFKSNSAVAWSNKSDFACANAFNNSIIPEDTFFPSPESSCDVKLVEKSFETDTNLNFQNLSVIGFRILLLKVAGFNLLMTLRLWSSSSRAKRSGSGVKQTLNFDLLKLAGDVESNPGPTSMALPVTALLLPLALLLHAARPDIQMTQSPSSVSASVGDRVTITCRASQSISSYLNWYQQKPGKAPKLLIYAASSLQSGVPSRFSGSGSGTDFTLTISSLQPEDFATYYCQQSYSTPWTFGQGTKVEIKRGGGGSGGGGSGGGGSEVQLVESGGGLVQPGRSLRLSCAASGFTFDDYAMHWVRQAPGKGLEWVSGISWNSGSIGYADSAKGRFTISRDNSKNTLYLQMNSLRAEDTAVYYCAKRGNSNSFDYWGQGTLVTVSSTRGKPIPNPLLGLDSTGSGEDLKNVFPPEVAVFEPSEAEISHTQKATLVCLATGFYPDHVELSWWVNGKEVHSGVCTDPQPLKEQPALNDSRYCLSSRLRVSATFWQNPRNHFRCQVQFYGLSENDEWTQDRAKPVTQIVSAEAWGRADCGFTSESYQQGVLSATILYEILLGKATLYAVLVSALVLMAMVKRKDSRGRAKRSGSGATNFSLLKQAGDVEENPGPSRGHMTEYKPTVRLATRDDVPRAVRTLAAAFADYPATRHTVDPDRHIERVTELQELFLTRVGLDIGKVWVADDGAAVAVWTTPESVEAGAVFAEIGPRMAELSGSRLAAQQQMEGLLAPHRPKEPAWFLATVGVSPDHQGKGLGSAVVLPGVEAAERAGVPAFLETSAPRNLPFYERLGFTVTADVEVPEGPRTWCMTRKPGA

SEQ ID NO: 20045 - protein, 852 aa, Artificial Sequence
  Synthetic Polypeptide
MALPVTALLLPLALLLHAARPDIQMTQSPSSVSASVGDRVTITCRASQSISSYLNWYQQKPGKAPKLLIYAASSLQSGVPSRFSGSGSGTDFTLTISSLQPEDFATYYCQQSYSTPWTFGQGTKVEIKRLEDLKNVFPPEVAVFEPSEAEISHTQKATLVCLATGFYPDHVELSWWVNGKEVHSGVSTDPQPLKEQPALNDSRYCLSSRLRVSATFWQNPRNHFRCQVQFYGLSENDEWTQDRAKPVTQIVSAEAWGRADCGFTSESYQQGVLSATILYEILLGKATLYAVLVSALVLMAMVKRKDSRGRAKRSGSGATNFSLLKQAGDVEENPGPTSMDWIWRILFLVGAATGAHSFEEVQLVESGGGLVQPGRSLRLSCAASGFTFDDYAMHWVRQAPGKGLEWVSGISWNSGSIGYADSAKGRFTISRDNSKNTLYLQMNSLRAEDTAVYYCAKRGNSNSFDYWGQGTLVTVSSTRIQNPDPAVYQLRDSKSSDKSVCLFTDFDSQTNVSQSKDSDVYITDKTVLDMRSMDFKSNSAVAWSNKSDFACANAFNNSIIPEDTFFPSPESSCDVKLVEKSFETDTNLNFQNLSVIGFRILLLKVAGFNLLMTLRLWSSRAKRSGSGVKQTLNFDLLKLAGDVESNPGPSRGHMTEYKPTVRLATRDDVPRAVRTLAAAFADYPATRHTVDPDRHIERVTELQELFLTRVGLDIGKVWVADDGAAVAVWTTPESVEAGAVFAEIGPRMAELSGSRLAAQQQMEGLLAPHRPKEPAWFLATVGVSPDHQGKGLGSAVVLPGVEAAERAGVPAFLETSAPRNLPFYERLGFTVTADVEVPEGPRTWCMTRKPGA

SEQ ID NO: 20046 - protein, 934 aa, Artificial Sequence
  Synthetic Polypeptide
MALPVTALLLPLALLLHAARPDIQMTQSPSSVSASVGDRVTITCRASQSISSYLNWYQQKPGKAPKLLIYAASSLQSGVPSRFSGSGSGTDFTLTISSLQPEDFATYYCQQSYSTPWTFGQGTKVEIKRLEDLKNVFPPEVAVFEPSEAEISHTQKATLVCLATGFYPDHVELSWWVNGKEVHSGVSTDPQPLKEQPALNDSRYCLSSRLRVSATFWQNPRNHFRCQVQFYGLSENDEWTQDRAKPVTQIVSAEAWGRADCGFTSESYQQGVLSATILYEILLGKATLYAVLVSALVLMAMVKRKDSRGRAKRSGSGATNFSLLKQAGDVEENPGPTSMDWIWRILFLVGAATGAHSFEEVQLVESGGGLVQPGRSLRLSCAASGFTFDDYAMHWVRQAPGKGLEWVSGISWNSGSIGYADSAKGRFTISRDNSKNTLYLQMNSLRAEDTAVYYCAKRGNSNSFDYWGQGTLVTVSSTREQKLISEEDGSGTPFPSLAPPIMLLVDGKQQMVVVCLVLDVAPPGLDSPIWFSAGNGSALDAFTYGPSPATDGTWTNLAHLSLPSEELASWEPLVCHTGPGAEGHSRSTQPMHLSGEASTARTCPQEPLRGTPGGALWLGVLRLLLFKLLLFDLLLTCSCLCDPAGPLPSPATTTRLRALGSHRLHPATETGGREATSSPRPQPRDRRWGDTPPGRKPGSPVRAKRSGSGVKQTLNFDLLKLAGDVESNPGPSRGHMTEYKPTVRLATRDDVPRAVRTLAAAFADYPATRHTVDPDRHIERVTELQELFLTRVGLDIGKVWVADDGAAVAVWTTPESVEAGAVFAEIGPRMAELSGSRLAAQQQMEGLLAPHRPKEPAWFLATVGVSPDHQGKGLGSAVVLPGVEAAERAGVPAFLETSAPRNLPFYERLGFTVTADVEVPEGPRTWCMTRKPGA

SEQ ID NO: 20047 - protein, 952 aa, Artificial Sequence
  Synthetic Polypeptide
MALPVTALLLPLALLLHAARPLEDLKNVFPPEVAVFEPSEAEISHTQKATLVCLATGFYPDHVELSWWVNGKEVHSGVSTDPQPLKEQPALNDSRYCLSSRLRVSATFWQNPRNHFRCQVQFYGLSENDEWTQDRAKPVTQIVSAEAWGRADCGFTSESYQQGVLSATILYEILLGKATLYAVLVSALVLMAMVKRKDSRGRAKRSGSGATNFSLLKQAGDVEENPGPTSMALPVTALLLPLALLLHAARPDIQMTQSPSSVSASVGDRVTITCRASQSISSYLNWYQQKPGKAPKLLIYAASSLQSGVPSRFSGSGSGTDFTLTISSLQPEDFATYYCQQSYSTPWTFGQGTKVEIKRGGGGSGGGGSGGGGSEVQLVESGGGLVQPGRSLRLSCAASGFTFDDYAMHWVRQAPGKGLEWVSGISWNSGSIGYADSAKGRFTISRDNSKNTLYLQMNSLRAEDTAVYYCAKRGNSNSFDYWGQGTLVTVSSTREQKLISEEDLGSGTPFPSLAPPIMLLVDGKQQMVVVCLVLDVAPPGLDSPIWFSAGNGSALDAFTYGPSPATDGTWTNLAHLSLPSEELASWEPLVCHTGPGAEGHSRSTQPMHLSGEASTARTCPQEPLRGTPGGALWLGVLRLLLFKLLLFDLLLTCSCLCDPAGPLPSPATTTRLRALGSHRLHPATETGGREATSSPRPQPRDRRWGDTPPGRKPGSPVRAKRSGSGVKQTLNFDLLKLAGDVESNPGPSRSRGHMTEYKPTVRLATRDDVPRAVRTLAAAFADYPATRHTVDPDRHIERVTELQELFLTRVGLDIGKVWVADDGAAVAVWTTPESVEAGAVFAEIGPRMAELSGSRLAAQQQMEGLLAPHRPKEPAWFLATVGVSPDHQGKGLGSAVVLPGVEAAERAGVPAFLETSAPRNLPFYERLGFTVTADVEVPEGPRTWCMTRKPGA

SEQ ID NO: 20048 - protein, 889 aa, Artificial Sequence
  Synthetic Polypeptide
MALPVTALLLPLALLLHAARPDIQMTQSPSSVSASVGDRVTITCRASQSISSYLNWYQQKPGKAPKLLIYAASSLQSGVPSRFSGSGSGTDFTLTISSLQPEDFATYYCQQSYSTPWTFGQGTKVEIKRLEGKPIPNPLLGLDSTGSGDKQLDADVSPKPTIFLPSIAETKLQKAGTYLCLLEKFFPDVIKIHWQEKKSNTILGSQEGNTMKTNDTYMKFSWLTVPEKSLDKEHRCIVRHENNKNGVDQEIIFPPIKTDVITMDPKDNCSKDANDTLLLQLTNTSAYYMYLLLLLKSVVYFAIITCCLLRRTAFCCNGEKSRAKRSGSGATNFSLLKQAGDVEENPGPTSMDWIWRILFLVGAATGAHSFEEVQLVESGGGLVQPGRSLRLSCAASGFTFDDYAMHWVRQAPGKGLEWVSGISWNSGSIGYADSAKGRFTISRDNSKNTLYLQMNSLRAEDTAVYYCAKRGNSNSFDYWGQGTLVTVSSTREQKLISEEDGSGSQPHTKPSVFVMKNGTNVACLVKEFYPKDIRINLVSSKKITEFDPAIVISPSGKYNAVKLGKYEDSNSVTCSVQHDNKTVHSTDFEVKTDSTDHVKPKETENTKQPSKSCHKPKAIVHTEKVNMMSLTVLGLRMLFAKTVAVNFLLTAKLFFLRAKRSGSGVKQTLNFDLLKLAGDVESNPGPSRGHMTEYKPTVRLATRDDVPRAVRTLAAAFADYPATRHTVDPDRHIERVTELQELFLTRVGLDIGKVWVADDGAAVAVWTTPESVEAGAVFAEIGPRMAELSGSRLAAQQQMEGLLAPHRPKEPAWFLATVGVSPDHQGKGLGSAVVLPGVEAAERAGVPAFLETSAPRNLPFYERLGFTVTADVEVPEGPRTWCMTRKPGA

SEQ ID NO: 20049 - protein, 627 aa, Artificial Sequence
  Synthetic Polypeptide
MALPVTALLLPLALLLHAARPDIQMTQSPSSVSASVGDRVTITCRASQSISSYLNWYQQKPGKAPKLLIYAASSLQSGVPSRFSGSGSGTDFTLTISSLQPEDFATYYCQQSYSTPWTFGQGTKVEIKRLESQPHTKPSVFVMKNGTNVACLVKEFYPKDIRINLVSSKKITEFDPAIVISPSGKYNAVKLGKYEDSNSVTCSVQHDNKTVHSTDFEVKTDSTDHVKPKETENTKQPSKSCHKPKAIVHTEKVNMMSLTVLGLRMLFAKTVAVNFLLTAKLFFLRAKRSGSGATNFSLLKQAGDVEENPGPTSMDWIWRILFLVGAATGAHSFEEVQLVESGGGLVQPGRSLRLSCAASGFTFDDYAMHWVRQAPGKGLEWVSGISWNSGSIGYADSAKGRFTISRDNSKNTLYLQMNSLRAEDTAVYYCAKRGNSNSFDYWGQGTLVTVSSTRDKQLDADVSPKPTIFLPSIAETKLQKAGTYLCLLEKFFPDVIKIHWQEKKSNTILGSQEGNTMKTNDTYMKFSWLTVPEKSLDKEHRCIVRHENNKNGVDQEIIFPPIKTDVITMDPKDNCSKDANDTLLLQLTNTSAYYMYLLLLLKSVVYFAIITCCLLRRTAFCCNGEKS

SEQ ID NO: 20050 - protein, 904 aa, Artificial Sequence
  Synthetic Polypeptide
MALPVTALLLPLALLLHAARPLEGKPIPNPLLGLDSTGSGDKQLDADVSPKPTIFLPSIAETKLQKAGTYLCLLEKFFPDVIKIHWQEKKSNTILGSQEGNTMKTNDTYMKFSWLTVPEKSLDKEHRCIVRHENNKNGVDQEIIFPPIKTDVITMDPKDNCSKDANDTLLLQLTNTSAYYMYLLLLLKSVVYFAIITCCLLRRTAFCCNGEKSRAKRSGSGATNFSLLKQAGDVEENPGPTSMALPVTALLLPLALLLHAARPDIQMTQSPSSVSASVGDRVTITCRASQSISSYLNWYQQKPGKAPKLLIYAASSLQSGVPSRFSGSGSGTDFTLTISSLQPEDFATYYCQQSYSTPWTFGQGTKVEIKRGGGGSGGGGSGGGGSEVQLVESGGGLVQPGRSLRLSCAASGFTFDDYAMHWVRQAPGKGLEWVSGISWNSGSIGYADSAKGRFTISRDNSKNTLYLQMNSLRAEDTAVYYCAKRGNSNSFDYWGQGTLVTVSSTREQKLISEEDGSGSQPHTKPSVFVMKNGTNVACLVKEFYPKDIRINLVSSKKITEFDPAIVISPSGKYNAVKLGKYEDSNSVTCSVQHDNKTVHSTDFEVKTDSTDHVKPKETENTKQPSKSCHKPKAIVHTEKVNMMSLTVLGLRMLFAKTVAVNFLLTAKLFFLRAKRSGSGVKQTLNFDLLKLAGDVESNPGPSRGHMTEYKPTVRLATRDDVPRAVRTLAAAFADYPATRHTVDPDRHIERVTELQELFLTRVGLDIGKVWVADDGAAVAVWTTPESVEAGAVFAEIGPRMAELSGSRLAAQQQMEGLLAPHRPKEPAWFLATVGVSPDHQGKGLGSAVVLPGVEAAERAGVPAFLETSAPRNLPFYERLGFTVTADVEVPEGPRTWCMTRKPGA

SEQ ID NO: 20051 - protein, 1029 aa, Artificial Sequence
  Synthetic Polypeptide
MALPVTALLLPLALLLHAARPDIQMTQSPSSVSASVGDRVTITCRASQSISSYLNWYQQKPGKAPKLLIYAASSLQSGVPSRFSGSGSGTDFTLTISSLQPEDFATYYCQQSYSTPWTFGQGTKVEIKRGQPKANPTVTLFPPSSEELQANKATLVCLISDFYPGAVTVAWKADGSPVKAGVETTKPSKQSNNKYAASSYLSLTPEQWKSHRSYSCQVTHEGSTVEKTVAPTECSGSQSFGLLDPKLCYLLDGILFIYGVILTALFLRVKFSRSADAPAYQQGQNQLYNELNLGRREEYDVLDKRRGRDPEMGGKPQRRKNPQEGLYNELQKDKMAEAYSEIGMKGERRRGKGHDGLYQGLSTATKDTYDALHMQALPPRRAKRSGSGATNFSLLKQAGDVEENPGPTSMDWIWRILFLVGAATGAHSFEEVQLVESGGGLVQPGRSLRLSCAASGFTFDDYAMHWVRQAPGKGLEWVSGISWNSGSIGYADSAKGRFTISRDNSKNTLYLQMNSLRAEDTAVYYCAKRGNSNSFDYWGQGTLVTVSSASTKGPSVFPLAPSSKSTSGGTAALGCLVKDYFPEPVTVSWNSGALTSGVHTFPAVLQSSGLYSLSSVVTVPSSSLGTQTYICNVNHKPSNTKVDKRVEPKSCGTQSFGLLDPKLCYLLDGILFIYGVILTALFLRVKFSRSADAPAYQQGQNQLYNELNLGRREEYDVLDKRRGRDPEMGGKPQRRKNPQEGLYNELQKDKMAEAYSEIGMKGERRRGKGHDGLYQGLSTATKDTYDALHMQALPPRRAKRSGSGVKQTLNFDLLKLAGDVESNPGPSRGHMTEYKPTVRLATRDDVPRAVRTLAAAFADYPATRHTVDPDRHIERVTELQELFLTRVGLDIGKVWVADDGAAVAVWTTPESVEAGAVFAEIGPRMAELSGSRLAAQQQMEGLLAPHRPKEPAWFLATVGVSPDHQGKGLGSAVVLPGVEAAERAGVPAFLETSAPRNLPFYERLGFTVTADVEVPEGPRTWCMTRKPGA

SEQ ID NO: 20052 - protein, 815 aa, Artificial Sequence
  Synthetic Polypeptide
MALPVTALLLPLALLLHAARPDIQMTQSPSSVSASVGDRVTITCRASQSISSYLNWYQQKPGKAPKLLIYAASSLQSGVPSRFSGSGSGTDFTLTISSLQPEDFATYYCQQSYSTPWTFGQGTKVEIKRLEDLKNVFPPEVAVFEPSEAEISHTQKATLVCLATGFYPDHVELSWWVNGKEVHSGVSTDPQPLKEQPALNDSRYCLSSRLRVSATFWQNPRNHFRCQVQFYGLSENDEWTQDRAKPVTQIVSAEAWGRADCGSQSFGLLDPKLCYLLDGILFIYGVILTALFLRVKFSRSADAPAYQQGQNQLYNELNLGRREEYDVLDKRRGRDPEMGGKPQRRKNPQEGLYNELQKDKMAEAYSEIGMKGERRRGKGHDGLYQGLSTATKDTYDALHMQALPPRRAKRSGSGATNFSLLKQAGDVEENPGPTSMDWIWRILFLVGAATGAHSFEEVQLVESGGGLVQPGRSLRLSCAASGFTFDDYAMHWVRQAPGKGLEWVSGISWNSGSIGYADSAKGRFTISRDNSKNTLYLQMNSLRAEDTAVYYCAKRGNSNSFDYWGQGTLVTVSSTRIQNPDPAVYQLRDSKSSDKSVCLFTDFDSQTNVSQSKDSDVYITDKTVLDMRSMDFKSNSAVAWSNKSDFACANAFNNSIIPEDTFFPSPESSCGTQSFGLLDPKLCYLLDGILFIYGVILTALFLRVKFSRSADAPAYQQGQNQLYNELNLGRREEYDVLDKRRGRDPEMGGKPQRRKNPQEGLYNELQKDKMAEAYSEIGMKGERRRGKGHDGLYQGLSTATKDTYDALHMQALPPR

SEQ ID NO: 20053 - protein, 815 aa, Artificial Sequence
  Synthetic Polypeptide
MALPVTALLLPLALLLHAARPDIQMTQSPSSVSASVGDRVTITCRASQSISSYLNWYQQKPGKAPKLLIYAASSLQSGVPSRFSGSGSGTDFTLTISSLQPEDFATYYCQQSYSTPWTFGQGTKVEIKRLEDLKNVFPPEVAVFEPSKAEIAHTQKATLVCLATGFYPDHVELSWWVNGKEVHSGVCTDPQPLKEQPALNDSRYCLSSRLRVSATFWQNPRNHFRCQVQFYGLSENDEWTQDRAKPVTQIVSAEAWGRADCGSQSFGLLDPKLCYLLDGILFIYGVILTALFLRVKFSRSADAPAYQQGQNQLYNELNLGRREEYDVLDKRRGRDPEMGGKPQRRKNPQEGLYNELQKDKMAEAYSEIGMKGERRRGKGHDGLYQGLSTATKDTYDALHMQALPPRRAKRSGSGATNFSLLKQAGDVEENPGPTSMDWIWRILFLVGAATGAHSFEEVQLVESGGGLVQPGRSLRLSCAASGFTFDDYAMHWVRQAPGKGLEWVSGISWNSGSIGYADSAKGRFTISRDNSKNTLYLQMNSLRAEDTAVYYCAKRGNSNSFDYWGQGTLVTVSSTRIQNPDPAVYQLRDSKSSDKSVCLFTDFDSQTNVSQSKDSDVYITDKCVLDMRSMDFKSNSAVAWSNKSDFACANAFNNSIIPEDTFFPSSDVPCGTQSFGLLDPKLCYLLDGILFIYGVILTALFLRVKFSRSADAPAYQQGQNQLYNELNLGRREEYDVLDKRRGRDPEMGGKPQRRKNPQEGLYNELQKDKMAEAYSEIGMKGERRRGKGHDGLYQGLSTATKDTYDALHMQALPPR

SEQ ID NO: 20054 - protein, 886 aa, Artificial Sequence
  Synthetic Polypeptide
MALPVTALLLPLALLLHAARPDIQMTQSPSSVSASVGDRVTITCRASQSISSYLNWYQQKPGKAPKLLIYAASSLQSGVPSRFSGSGSGTDFTLTISSLQPEDFATYYCQQSYSTPWTFGQGTKVEIKRLEGKPIPNPLLGLDSTGSGEDLKNVFPPEVAVFEPSEAEISHTQKATLVCLATGFYPDHVELSWWVNGKEVHSGVSTDPQPLKEQPALNDSRYCLSSRLRVSATFWQNPRNHFRCQVQFYGLSENDEWTQDRAKPVTQIVSAEAWGRADCGSQSFGLLDPKLCYLLDGILFIYGVILTALFLRVKFSRSADAPAYQQGQNQLYNELNLGRREEYDVLDKRRGRDPEMGGKPQRRKNPQEGLYNELQKDKMAEAYSEIGMKGERRRGKGHDGLYQGLSTATKDTYDALHMQALPPRRAKRSGSGATNFSLLKQAGDVEENPGPTSMDWIWRILFLVGAATGAHSFEEVQLVESGGGLVQPGRSLRLSCAASGFTFDDYAMHWVRQAPGKGLEWVSGISWNSGSIGYADSAKGRFTISRDNSKNTLYLQMNSLRAEDTAVYYCAKRGNSNSFDYWGQGTLVTVSSTREQKLISEEDGSGIQNPDPAVYQLRDSKSSDKSVCLFTDFDSQTNVSQSKDSDVYITDKTVLDMRSMDFKSNSAVAWSNKSDFACANAFNNSIIPEDTFFPSPESSCGTQSFGLLDPKLCYLLDGILFIYGVILTALFLRSKRSRLLHSDYMNMTPRRPGPTRKHYQPYAPPRDFAAYRSRVKFSRSADAPAYQQGQNQLYNELNLGRREEYDVLDKRRGRDPEMGGKPQRRKNPQEGLYNELQKDKMAEAYSEIGMKGERRRGKGHDGLYQGLSTATKDTYDALHMQALPPR

SEQ ID NO: 20055 - protein, 927 aa, Artificial Sequence
  Synthetic Polypeptide
MALPVTALLLPLALLLHAARPDIQMTQSPSSVSASVGDRVTITCRASQSISSYLNWYQQKPGKAPKLLIYAASSLQSGVPSRFSGSGSGTDFTLTISSLQPEDFATYYCQQSYSTPWTFGQGTKVEIKRLEGKPIPNPLLGLDSTGSGEDLKNVFPPEVAVFEPSEAEISHTQKATLVCLATGFYPDHVELSWWVNGKEVHSGVSTDPQPLKEQPALNDSRYCLSSRLRVSATFWQNPRNHFRCQVQFYGLSENDEWTQDRAKPVTQIVSAEAWGRADCGSQSFGLLDPKLCYLLDGILFIYGVILTALFLRSKRSRLLHSDYMNMTPRRPGPTRKHYQPYAPPRDFAAYRSRVKFSRSADAPAYQQGQNQLYNELNLGRREEYDVLDKRRGRDPEMGGKPQRRKNPQEGLYNELQKDKMAEAYSEIGMKGERRRGKGHDGLYQGLSTATKDTYDALHMQALPPRRAKRSGSGATNFSLLKQAGDVEENPGPTSMDWIWRILFLVGAATGAHSFEEVQLVESGGGLVQPGRSLRLSCAASGFTFDDYAMHWVRQAPGKGLEWVSGISWNSGSIGYADSAKGRFTISRDNSKNTLYLQMNSLRAEDTAVYYCAKRGNSNSFDYWGQGTLVTVSSTREQKLISEEDGSGIQNPDPAVYQLRDSKSSDKSVCLFTDFDSQTNVSQSKDSDVYITDKTVLDMRSMDFKSNSAVAWSNKSDFACANAFNNSIIPEDTFFPSPESSCGTQSFGLLDPKLCYLLDGILFIYGVILTALFLRSKRSRLLHSDYMNMTPRRPGPTRKHYQPYAPPRDFAAYRSRVKFSRSADAPAYQQGQNQLYNELNLGRREEYDVLDKRRGRDPEMGGKPQRRKNPQEGLYNELQKDKMAEAYSEIGMKGERRRGKGHDGLYQGLSTATKDTYDALHMQALPPR

SEQ ID NO: 20056 - protein, 888 aa, Artificial Sequence
  Synthetic Polypeptide
MALPVTALLLPLALLLHAARPDIQMTQSPSSVSASVGDRVTITCRASQSISSYLNWYQQKPGKAPKLLIYAASSLQSGVPSRFSGSGSGTDFTLTISSLQPEDFATYYCQQSYSTPWTFGQGTKVEIKRLEGKPIPNPLLGLDSTGSGEDLKNVFPPEVAVFEPSEAEISHTQKATLVCLATGFYPDHVELSWWVNGKEVHSGVSTDPQPLKEQPALNDSRYCLSSRLRVSATFWQNPRNHFRCQVQFYGLSENDEWTQDRAKPVTQIVSAEAWGRADCGSQSFGLLDPKLCYLLDGILFIYGVILTALFLRVKFSRSADAPAYQQGQNQLYNELNLGRREEYDVLDKRRGRDPEMGGKPQRRKNPQEGLYNELQKDKMAEAYSEIGMKGERRRGKGHDGLYQGLSTATKDTYDALHMQALPPRRAKRSGSGATNFSLLKQAGDVEENPGPTSMDWIWRILFLVGAATGAHSFEEVQLVESGGGLVQPGRSLRLSCAASGFTFDDYAMHWVRQAPGKGLEWVSGISWNSGSIGYADSAKGRFTISRDNSKNTLYLQMNSLRAEDTAVYYCAKRGNSNSFDYWGQGTLVTVSSTREQKLISEEDLGSGIQNPDPAVYQLRDSKSSDKSVCLFTDFDSQTNVSQSKDSDVYITDKTVLDMRSMDFKSNSAVAWSNKSDFACANAFNNSIIPEDTFFPSPESSCGTQSFGLLDPKLCYLLDGILFIYGVILTALFLKRGRKKLLYIFKQPFMRPVQTTQEEDGCSCRFPEEEEGGCELRVKFSRSADAPAYQQGQNQLYNELNLGRREEYDVLDKRRGRDPEMGGKPQRRKNPQEGLYNELQKDKMAEAYSEIGMKGERRRGKGHDGLYQGLSTATKDTYDALHMQALPPR

SEQ ID NO: 20057 - protein, 930 aa, Artificial Sequence
  Synthetic Polypeptide
MALPVTALLLPLALLLHAARPDIQMTQSPSSVSASVGDRVTITCRASQSISSYLNWYQQKPGKAPKLLIYAASSLQSGVPSRFSGSGSGTDFTLTISSLQPEDFATYYCQQSYSTPWTFGQGTKVEIKRLEGKPIPNPLLGLDSTGSGEDLKNVFPPEVAVFEPSEAEISHTQKATLVCLATGFYPDHVELSWWVNGKEVHSGVSTDPQPLKEQPALNDSRYCLSSRLRVSATFWQNPRNHFRCQVQFYGLSENDEWTQDRAKPVTQIVSAEAWGRADCGSQSFGLLDPKLCYLLDGILFIYGVILTALFLKRGRKKLLYIFKQPFMRPVQTTQEEDGCSCRFPEEEEGGCELRVKFSRSADAPAYQQGQNQLYNELNLGRREEYDVLDKRRGRDPEMGGKPQRRKNPQEGLYNELQKDKMAEAYSEIGMKGERRRGKGHDGLYQGLSTATKDTYDALHMQALPPRRAKRSGSGATNFSLLKQAGDVEENPGPTSMDWIWRILFLVGAATGAHSFEEVQLVESGGGLVQPGRSLRLSCAASGFTFDDYAMHWVRQAPGKGLEWVSGISWNSGSIGYADSAKGRFTISRDNSKNTLYLQMNSLRAEDTAVYYCAKRGNSNSFDYWGQGTLVTVSSTREQKLISEEDLGSGIQNPDPAVYQLRDSKSSDKSVCLFTDFDSQTNVSQSKDSDVYITDKTVLDMRSMDFKSNSAVAWSNKSDFACANAFNNSIIPEDTFFPSPESSCGTQSFGLLDPKLCYLLDGILFIYGVILTALFLKRGRKKLLYIFKQPFMRPVQTTQEEDGCSCRFPEEEEGGCELRVKFSRSADAPAYQQGQNQLYNELNLGRREEYDVLDKRRGRDPEMGGKPQRRKNPQEGLYNELQKDKMAEAYSEIGMKGERRRGKGHDGLYQGLSTATKDTYDALHMQALPPR

SEQ ID NO: 20058 - protein, 820 aa, Artificial Sequence
  Synthetic Polypeptide
MALPVTALLLPLALLLHAARPDIQMTQSPSSVSASVGDRVTITCRASQSISSYLNWYQQKPGKAPKLLIYAASSLQSGVPSRFSGSGSGTDFTLTISSLQPEDFATYYCQQSYSTPWTFGQGTKVEIKRLEQSFGLLDPKLCYLLDGILFIYGVILTALFLRVKFSRSADAPAYQQGQNQLYNELNLGRREEYDVLDKRRGRDPEMGGKPQRRKNPQEGLYNELQKDKMAEAYSEIGMKGERRRGKGHDGLYQGLSTATKDTYDALHMQALPPRRAKRSGSGATNFSLLKQAGDVEENPGPTSMDWIWRILFLVGAATGAHSFEEVQLVESGGGLVQPGRSLRLSCAASGFTFDDYAMHWVRQAPGKGLEWVSGISWNSGSIGYADSAKGRFTISRDNSKNTLYLQMNSLRAEDTAVYYCAKRGNSNSFDYWGQGTLVTVSSTRQSFGLLDPKLCYLLDGILFIYGVILTALFLRVKFSRSADAPAYQQGQNQLYNELNLGRREEYDVLDKRRGRDPEMGGKPQRRKNPQEGLYNELQKDKMAEAYSEIGMKGERRRGKGHDGLYQGLSTATKDTYDALHMQALPPRRAKRSGSGVKQTLNFDLLKLAGDVESNPGPSRGHMTEYKPTVRLATRDDVPRAVRTLAAAFADYPATRHTVDPDRHIERVTELQELFLTRVGLDIGKVWVADDGAAVAVWTTPESVEAGAVFAEIGPRMAELSGSRLAAQQQMEGLLAPHRPKEPAWFLATVGVSPDHQGKGLGSAVVLPGVEAAERAGVPAFLETSAPRNLPFYERLGFTVTADVEVPEGPRTWCMTRKPGA

SEQ ID NO: 20059 - protein, 645 aa, Artificial Sequence
  Synthetic Polypeptide
MALPVTALLLPLALLLHAARPDIQMTQSPSSVSASVGDRVTITCRASQSISSYLNWYQQKPGKAPKLLIYAASSLQSGVPSRFSGSGSGTDFTLTISSLQPEDFATYYCQQSYSTPWTFGQGTKVEIKRLEGQPKANPTVTLFPPSSEELQANKATLVCLISDFYPGAVTVAWKADGSPVKAGVETTKPSKQSNNKYAASSYLSLTPEQWKSHRSYSCQVTHEGSTVEKTVAPTECSPIKTDVITMDPKDNCSKDANDTLLLQLTNTSAYYMYLLLLLKSVVYFAIITCCLLRRTAFCCNGEKSRAKRSGSGATNFSLLKQAGDVEENPGPTSMDWIWRILFLVGAATGAHSFEEVQLVESGGGLVQPGRSLRLSCAASGFTFDDYAMHWVRQAPGKGLEWVSGISWNSGSIGYADSAKGRFTISRDNSKNTLYLQMNSLRAEDTAVYYCAKRGNSNSFDYWGQGTLVTVSSTRASTKGPSVFPLAPSSKSTSGGTAALGCLVKDYFPEPVTVSWNSGALTSGVHTFPAVLQSSGLYSLSSVVTVPSSSLGTQTYICNVNHKPSNTKVDKRVEPKSCEVKTDSTDHVKPKETENTKQPSKSCHKPKAIVHTEKVNMMSLTVLGLRMLFAKTVAVNFLLTAKLFFL

SEQ ID NO: 20060 - protein, 623 aa, Artificial Sequence
  Synthetic Polypeptide
MALPVTALLLPLALLLHAARPDIQMTQSPSSVSASVGDRVTITCRASQSISSYLNWYQQKPGKAPKLLIYAASSLQSGVPSRFSGSGSGTDFTLTISSLQPEDFATYYCQQSYSTPWTFGQGTKVEIKRLEGQPKANPTVTLFPPSSEELQANKATLVCLISDFYPGAVTVAWKADGSPVKAGVETTKPSKQSNNKYAASSYLSLTPEQWKSHRSYSCQVTHEGSTVEKTVAPTECSGRADCGITSASYHQGVLSATILYEILLGKATLYAVLVSALVLMAMVKRKDSRGRAKRSGSGATNFSLLKQAGDVEENPGPTSMDWIWRILFLVGAATGAHSFEEVQLVESGGGLVQPGRSLRLSCAASGFTFDDYAMHWVRQAPGKGLEWVSGISWNSGSIGYADSAKGRFTISRDNSKNTLYLQMNSLRAEDTAVYYCAKRGNSNSFDYWGQGTLVTVSSTRASTKGPSVFPLAPSSKSTSGGTAALGCLVKDYFPEPVTVSWNSGALTSGVHTFPAVLQSSGLYSLSSVVTVPSSSLGTQTYICNVNHKPSNTKVDKRVEPKSCIPEDTFFPSSDVPCDVKLVEKSFETDTNLNFQNLSVIGFRILLLKVAGFNLLMTLRLWSS

SEQ ID NO: 20061 - protein, 623 aa, Artificial Sequence
  Synthetic Polypeptide
MALPVTALLLPLALLLHAARPDIQMTQSPSSVSASVGDRVTITCRASQSISSYLNWYQQKPGKAPKLLIYAASSLQSGVPSRFSGSGSGTDFTLTISSLQPEDFATYYCQQSYSTPWTFGQGTKVEIKRLEGQPKANPTVTLFPPSSEELQANKATLVCLISDFYPGAVTVAWKADGSPVKAGVETTKPSKQSNNKYAASSYLSLTPEQWKSHRSYSCQVTHEGSTVEKTVAPTECSGRADCGFTSESYQQGVLSATILYEILLGKATLYAVLVSALVLMAMVKRKDSRGRAKRSGSGATNFSLLKQAGDVEENPGPTSMDWIWRILFLVGAATGAHSFEEVQLVESGGGLVQPGRSLRLSCAASGFTFDDYAMHWVRQAPGKGLEWVSGISWNSGSIGYADSAKGRFTISRDNSKNTLYLQMNSLRAEDTAVYYCAKRGNSNSFDYWGQGTLVTVSSTRASTKGPSVFPLAPSSKSTSGGTAALGCLVKDYFPEPVTVSWNSGALTSGVHTFPAVLQSSGLYSLSSVVTVPSSSLGTQTYICNVNHKPSNTKVDKRVEPKSCIPEDTFFPSPESSCDVKLVEKSFETDTNLNFQNLSVIGFRILLLKVAGFNLLMTLRLWSS

SEQ ID NO: 20062 - protein, 449 aa, Artificial Sequence
  Synthetic Polypeptide
MALPVTALLLPLALLLHAARPDIQMTQSPSSVSASVGDRVTITCRASQSISSYLNWYQQKPGKAPKLLIYAASSLQSGVPSRFSGSGSGTDFTLTISSLQPEDFATYYCQQSYSTPWTFGQGTKVEIKRGGGGSGGGGSGGGGSEVQLVESGGGLVQPGRSLRLSCAASGFTFDDYAMHWVRQAPGKGLEWVSGISWNSGSIGYADSAKGRFTISRDNSKNTLYLQMNSLRAEDTAVYYCAKRGNSNSFDYWGQGTLVTVSSTRDGNEEMGGITQTPYKVSISGTTVILTCPQYPGSEILWQHNDKNIGGDEDDKNIGSDEDHLSLKEFSELEQSGYYVCYPRGSKPEDANFYLYLRARVCENCMEMDVMSVATIVIVDICITGGLLLLVYYWSKNRKAKAKPVTRGAGAGGRQRGQNKERPPPVPNPDYEPIRKGQRDLYSGLNQRRI

SEQ ID NO: 20063 - protein, 414 aa, Artificial Sequence
  Synthetic Polypeptide
MALPVTALLLPLALLLHAARPDIQMTQSPSSVSASVGDRVTITCRASQSISSYLNWYQQKPGKAPKLLIYAASSLQSGVPSRFSGSGSGTDFTLTISSLQPEDFATYYCQQSYSTPWTFGQGTKVEIKRGGGGSGGGGSGGGGSEVQLVESGGGLVQPGRSLRLSCAASGFTFDDYAMHWVRQAPGKGLEWVSGISWNSGSIGYADSAKGRFTISRDNSKNTLYLQMNSLRAEDTAVYYCAKRGNSNSFDYWGQGTLVTVSSTRFKIPIEELEDRVFVNCNTSITWVEGTVGTLLSDITRLDLGKRILDPRGIYRCNGTDIYKDKESTVQVHYRMCQSCVELDPATVAGIIVTDVIATLLLALGVFCFAGHETGRLSGAADTQALLRNDQVYQPLRDRDDAQYSHLGGNWARNK

SEQ ID NO: 20064 - protein, 424 aa, Artificial Sequence
  Synthetic Polypeptide
MALPVTALLLPLALLLHAARPDIQMTQSPSSVSASVGDRVTITCRASQSISSYLNWYQQKPGKAPKLLIYAASSLQSGVPSRFSGSGSGTDFTLTISSLQPEDFATYYCQQSYSTPWTFGQGTKVEIKRGGGGSGGGGSGGGGSEVQLVESGGGLVQPGRSLRLSCAASGFTFDDYAMHWVRQAPGKGLEWVSGISWNSGSIGYADSAKGRFTISRDNSKNTLYLQMNSLRAEDTAVYYCAKRGNSNSFDYWGQGTLVTVSSTRQSIKGNHLVKVYDYQEDGSVLLTCDAEAKNITWFKDGKMIGFLTEDKKKWNLGSNAKDPRGMYQCKGSQNKSKPLQVYYRMCQNCIELNAATISGFLFAEIVSIFVLAVGVYFIAGQDGVRQSRASDKQTLLPNDQLYQPLKDREDDQYSHLQGNQLRRN

SEQ ID NO: 20065 - protein, 407 aa, Artificial Sequence
  Synthetic Polypeptide
MALPVTALLLPLALLLHAARPDIQMTQSPSSVSASVGDRVTITCRASQSISSYLNWYQQKPGKAPKLLIYAASSLQSGVPSRFSGSGSGTDFTLTISSLQPEDFATYYCQQSYSTPWTFGQGTKVEIKRGGGGSGGGGSGGGGSEVQLVESGGGLVQPGRSLRLSCAASGFTFDDYAMHWVRQAPGKGLEWVSGISWNSGSIGYADSAKGRFTISRDNSKNTLYLQMNSLRAEDTAVYYCAKRGNSNSFDYWGQGTLVTVSSTRQSFGLLDPKLCYLLDGILFIYGVILTALFLRVKFSRSADAPAYQQGQNQLYNELNLGRREEYDVLDKRRGRDPEMGGKPQRRKNPQEGLYNELQKDKMAEAYSEIGMKGERRRGKGHDGLYQGLSTATKDTYDALHMQALPPR

SEQ ID NO: 20066 - protein, 449 aa, Artificial Sequence
  Synthetic Polypeptide
MALPVTALLLPLALLLHAARPEVQLVESGGGLVQPGRSLRLSCAASGFTFDDYAMHWVRQAPGKGLEWVSGISWNSGSIGYADSAKGRFTISRDNSKNTLYLQMNSLRAEDTAVYYCAKRGNSNSFDYWGQGTLVTVSSGGGGSGGGGSGGGGSDIQMTQSPSSVSASVGDRVTITCRASQSISSYLNWYQQKPGKAPKLLIYAASSLQSGVPSRFSGSGSGTDFTLTISSLQPEDFATYYCQQSYSTPWTFGQGTKVEIKRTRDGNEEMGGITQTPYKVSISGTTVILTCPQYPGSEILWQHNDKNIGGDEDDKNIGSDEDHLSLKEFSELEQSGYYVCYPRGSKPEDANFYLYLRARVCENCMEMDVMSVATIVIVDICITGGLLLLVYYWSKNRKAKAKPVTRGAGAGGRQRGQNKERPPPVPNPDYEPIRKGQRDLYSGLNQRRI

SEQ ID NO: 20067 - protein, 414 aa, Artificial Sequence
  Synthetic Polypeptide
MALPVTALLLPLALLLHAARPEVQLVESGGGLVQPGRSLRLSCAASGFTFDDYAMHWVRQAPGKGLEWVSGISWNSGSIGYADSAKGRFTISRDNSKNTLYLQMNSLRAEDTAVYYCAKRGNSNSFDYWGQGTLVTVSSGGGGSGGGGSGGGGSDIQMTQSPSSVSASVGDRVTITCRASQSISSYLNWYQQKPGKAPKLLIYAASSLQSGVPSRFSGSGSGTDFTLTISSLQPEDFATYYCQQSYSTPWTFGQGTKVEIKRTRFKIPIEELEDRVFVNCNTSITWVEGTVGTLLSDITRLDLGKRILDPRGIYRCNGTDIYKDKESTVQVHYRMCQSCVELDPATVAGIIVTDVIATLLLALGVFCFAGHETGRLSGAADTQALLRNDQVYQPLRDRDDAQYSHLGGNWARNK

SEQ ID NO: 20068 - protein, 424 aa, Artificial Sequence
  Synthetic Polypeptide
MALPVTALLLPLALLLHAARPEVQLVESGGGLVQPGRSLRLSCAASGFTFDDYAMHWVRQAPGKGLEWVSGISWNSGSIGYADSAKGRFTISRDNSKNTLYLQMNSLRAEDTAVYYCAKRGNSNSFDYWGQGTLVTVSSGGGGSGGGGSGGGGSDIQMTQSPSSVSASVGDRVTITCRASQSISSYLNWYQQKPGKAPKLLIYAASSLQSGVPSRFSGSGSGTDFTLTISSLQPEDFATYYCQQSYSTPWTFGQGTKVEIKRTRQSIKGNHLVKVYDYQEDGSVLLTCDAEAKNITWFKDGKMIGFLTEDKKKWNLGSNAKDPRGMYQCKGSQNKSKPLQVYYRMCQNCIELNAATISGFLFAEIVSIFVLAVGVYFIAGQDGVRQSRASDKQTLLPNDQLYQPLKDREDDQYSHLQGNQLRRN

SEQ ID NO: 20069 - protein, 407 aa, Artificial Sequence
  Synthetic Polypeptide
MALPVTALLLPLALLLHAARPEVQLVESGGGLVQPGRSLRLSCAASGFTFDDYAMHWVRQAPGKGLEWVSGISWNSGSIGYADSAKGRFTISRDNSKNTLYLQMNSLRAEDTAVYYCAKRGNSNSFDYWGQGTLVTVSSGGGGSGGGGSGGGGSDIQMTQSPSSVSASVGDRVTITCRASQSISSYLNWYQQKPGKAPKLLIYAASSLQSGVPSRFSGSGSGTDFTLTISSLQPEDFATYYCQQSYSTPWTFGQGTKVEIKRTRQSFGLLDPKLCYLLDGILFIYGVILTALFLRVKFSRSADAPAYQQGQNQLYNELNLGRREEYDVLDKRRGRDPEMGGKPQRRKNPQEGLYNELQKDKMAEAYSEIGMKGERRRGKGHDGLYQGLSTATKDTYDALHMQALPPR

SEQ ID NO: 20070 - protein, 640 aa, Artificial Sequence
  Synthetic Polypeptide
MALPVTALLLPLALLLHAARPDIQMTQSPSSVSASVGDRVTITCRASQSISSYLNWYQQKPGKAPKLLIYAASSLQSGVPSRFSGSGSGTDFTLTISSLQPEDFATYYCQQSYSTPWTFGQGTKVEIKRGGGGSGGGGSGGGGSEVQLVESGGGLVQPGRSLRLSCAASGFTFDDYAMHWVRQAPGKGLEWVSGISWNSGSIGYADSAKGRFTISRDNSKNTLYLQMNSLRAEDTAVYYCAKRGNSNSFDYWGQGTLVTVSSTRGSGIQNPDPAVYQLRDSKSSDKSVCLFTDFDSQTNVSQSKDSDVYITDKTVLDMRSMDFKSNSAVAWSNKSDFACANAFNNSIIPEDTFFPSPESSCDVKLVEKSFETDTNLNFQNLSVIGFRILLLKVAGFNLLMTLRLWSSRAKRSGSGVKQTLNFDLLKLAGDVESNPGPSRGHMTEYKPTVRLATRDDVPRAVRTLAAAFADYPATRHTVDPDRHIERVTELQELFLTRVGLDIGKVWVADDGAAVAVWTTPESVEAGAVFAEIGPRMAELSGSRLAAQQQMEGLLAPHRPKEPAWFLATVGVSPDHQGKGLGSAVVLPGVEAAERAGVPAFLETSAPRNLPFYERLGFTVTADVEVPEGPRTWCMTRKPGA

SEQ ID NO: 20071 - protein, 672 aa, Artificial Sequence
  Synthetic Polypeptide
MALPVTALLLPLALLLHAARPDIQMTQSPSSVSASVGDRVTITCRASQSISSYLNWYQQKPGKAPKLLIYAASSLQSGVPSRFSGSGSGTDFTLTISSLQPEDFATYYCQQSYSTPWTFGQGTKVEIKRGGGGSGGGGSGGGGSEVQLVESGGGLVQPGRSLRLSCAASGFTFDDYAMHWVRQAPGKGLEWVSGISWNSGSIGYADSAKGRFTISRDNSKNTLYLQMNSLRAEDTAVYYCAKRGNSNSFDYWGQGTLVTVSSLEDLKNVFPPEVAVFEPSEAEISHTQKATLVCLATGFYPDHVELSWWVNGKEVHSGVSTDPQPLKEQPALNDSRYCLSSRLRVSATFWQNPRNHFRCQVQFYGLSENDEWTQDRAKPVTQIVSAEAWGRADCGFTSESYQQGVLSATILYEILLGKATLYAVLVSALVLMAMVKRKDSRGRAKRSGSGATNFSLLKQAGDVEENPGPTRGHMTEYKPTVRLATRDDVPRAVRTLAAAFADYPATRHTVDPDRHIERVTELQELFLTRVGLDIGKVWVADDGAAVAVWTTPESVEAGAVFAEIGPRMAELSGSRLAAQQQMEGLLAPHRPKEPAWFLATVGVSPDHQGKGLGSAVVLPGVEAAERAGVPAFLETSAPRNLPFYERLGFTVTADVEVPEGPRTWCMTRKPGA

SEQ ID NO: 20072 - protein, 722 aa, Artificial Sequence
  Synthetic Polypeptide
MALPVTALLLPLALLLHAARPDIQMTQSPSSVSASVGDRVTITCRASQSISSYLNWYQQKPGKAPKLLIYAASSLQSGVPSRFSGSGSGTDFTLTISSLQPEDFATYYCQQSYSTPWTFGQGTKVEIKRGGGGSGGGGSGGGGSEVQLVESGGGLVQPGRSLRLSCAASGFTFDDYAMHWVRQAPGKGLEWVSGISWNSGSIGYADSAKGRFTISRDNSKNTLYLQMNSLRAEDTAVYYCAKRGNSNSFDYWGQGTLVTVSSTREQKLISEEDLGSGTPFPSLAPPIMLLVDGKQQMVVVCLVLDVAPPGLDSPIWFSAGNGSALDAFTYGPSPATDGTWTNLAHLSLPSEELASWEPLVCHTGPGAEGHSRSTQPMHLSGEASTARTCPQEPLRGTPGGALWLGVLRLLLFKLLLFDLLLTCSCLCDPAGPLPSPATTTRLRALGSHRLHPATETGGREATSSPRPQPRDRRWGDTPPGRKPGSPVRAKRSGSGVKQTLNFDLLKLAGDVESNPGPSRSRGHMTEYKPTVRLATRDDVPRAVRTLAAAFADYPATRHTVDPDRHIERVTELQELFLTRVGLDIGKVWVADDGAAVAVWTTPESVEAGAVFAEIGPRMAELSGSRLAAQQQMEGLLAPHRPKEPAWFLATVGVSPDHQGKGLGSAVVLPGVEAAERAGVPAFLETSAPRNLPFYERLGFTVTADVEVPEGPRTWCMTRKPGA

SEQ ID NO: 20073 - protein, 539 aa, Artificial Sequence
  Synthetic Polypeptide
MALPVTALLLPLALLLHAARPDIQMTQSPSSVSASVGDRVTITCRASQSISSYLNWYQQKPGKAPKLLIYAASSLQSGVPSRFSGSGSGTDFTLTISSLQPEDFATYYCQQSYSTPWTFGQGTKVEIKRLEDLKNVFPPEVAVFEPSEAEISHTQKATLVCLATGFYPDHVELSWWVNGKEVHSGVSTDPQPLKEQPALNDSRYCLSSRLRVSATFWQNPRNHFRCQVQFYGLSENDEWTQDRAKPVTQIVSAEAWGRADCGFTSESYQQGVLSATILYEILLGKATLYAVLVSALVLMAMVKRKDSRGRAKRSGSGATNFSLLKQAGDVEENPGPTRGHMTEYKPTVRLATRDDVPRAVRTLAAAFADYPATRHTVDPDRHIERVTELQELFLTRVGLDIGKVWVADDGAAVAVWTTPESVEAGAVFAEIGPRMAELSGSRLAAQQQMEGLLAPHRPKEPAWFLATVGVSPDHQGKGLGSAVVLPGVEAAERAGVPAFLETSAPRNLPFYERLGFTVTADVEVPEGPRTWCMTRKPGA

SEQ ID NO: 20074 - protein, 309 aa, Artificial Sequence
  Synthetic Polypeptide
MALPVTALLLPLALLLHAARPDIQMTQSPSSVSASVGDRVTITCRASQSISSYLNWYQQKPGKAPKLLIYAASSLQSGVPSRFSGSGSGTDFTLTISSLQPEDFATYYCQQSYSTPWTFGQGTKVEIKRLEDLKNVFPPEVAVFEPSEAEISHTQKATLVCLATGFYPDHVELSWWVNGKEVHSGVSTDPQPLKEQPALNDSRYCLSSRLRVSATFWQNPRNHFRCQVQFYGLSENDEWTQDRAKPVTQIVSAEAWGRADCGFTSESYQQGVLSATILYEILLGKATLYAVLVSALVLMAMVKRKDSRG

SEQ ID NO: 20075 - protein, 447 aa, Artificial Sequence
  Synthetic Polypeptide
MDWIWRILFLVGAATGAHSFEEVQLVESGGGLVQPGRSLRLSCAASGFTFDDYAMHWVRQAPGKGLEWVSGISWNSGSIGYADSAKGRFTISRDNSKNTLYLQMNSLRAEDTAVYYCAKRGNSNSFDYWGQGTLVTVSSTRIQNPDPAVYQLRDSKSSDKSVCLFTDFDSQTNVSQSKDSDVYITDKTVLDMRSMDFKSNSAVAWSNKSDFACANAFNNSIIPEDTFFPSPESSCDVKLVEKSFETDTNLNFQNLSVIGFRILLLKVAGFNLLMTLRLWSSRAKRSGSGVKQTLNFDLLKLAGDVESNPGPSRGHMAKPLSQEESTLIERATATINSIPISEDYSVASAALSSDGRIFTGVNVYHFTGGPCAELVVLGTAAAAAAGNLTCIVAIGNENRGILSPCGRCRQVLLDLHPGIKAIVKDSDGQPTAVGIRELLPSGYVWEG

SEQ ID NO: 20076 - protein, 281 aa, Artificial Sequence
  Synthetic Polypeptide
MDWIWRILFLVGAATGAHSFEEVQLVESGGGLVQPGRSLRLSCAASGFTFDDYAMHWVRQAPGKGLEWVSGISWNSGSIGYADSAKGRFTISRDNSKNTLYLQMNSLRAEDTAVYYCAKRGNSNSFDYWGQGTLVTVSSTRIQNPDPAVYQLRDSKSSDKSVCLFTDFDSQTNVSQSKDSDVYITDKTVLDMRSMDFKSNSAVAWSNKSDFACANAFNNSIIPEDTFFPSPESSCDVKLVEKSFETDTNLNFQNLSVIGFRILLLKVAGFNLLMTLRLWSS

SEQ ID NO: 20077 - protein, 557 aa, Artificial Sequence
  Synthetic Polypeptide
MALPVTALLLPLALLLHAARPDIQMTQSPSSVSASVGDRVTITCRASQSISSYLNWYQQKPGKAPKLLIYAASSLQSGVPSRFSGSGSGTDFTLTISSLQPEDFATYYCQQSYSTPWTFGQGTKVEIKRLEGKPIPNPLLGLDSTGSGEDLKNVFPPEVAVFEPSEAEISHTQKATLVCLATGFYPDHVELSWWVNGKEVHSGVCTDPQPLKEQPALNDSRYCLSSRLRVSATFWQNPRNHFRCQVQFYGLSENDEWTQDRAKPVTQIVSAEAWGRADCGFTSESYQQGVLSATILYEILLGKATLYAVLVSALVLMAMVKRKDSRGRAKRSGSGATNFSLLKQAGDVEENPGPTRGHMTEYKPTVRLATRDDVPRAVRTLAAAFADYPATRHTVDPDRHIERVTELQELFLTRVGLDIGKVWVADDGAAVAVWTTPESVEAGAVFAEIGPRMAELSGSRLAAQQQMEGLLAPHRPKEPAWFLATVGVSPDHQGKGLGSAVVLPGVEAAERAGVPAFLETSAPRNLPFYERLGFTVTADVEVPEGPRTWCMTRKPGA

SEQ ID NO: 20078 - protein, 327 aa, Artificial Sequence
  Synthetic Polypeptide
MALPVTALLLPLALLLHAARPDIQMTQSPSSVSASVGDRVTITCRASQSISSYLNWYQQKPGKAPKLLIYAASSLQSGVPSRFSGSGSGTDFTLTISSLQPEDFATYYCQQSYSTPWTFGQGTKVEIKRLEGKPIPNPLLGLDSTGSGEDLKNVFPPEVAVFEPSEAEISHTQKATLVCLATGFYPDHVELSWWVNGKEVHSGVCTDPQPLKEQPALNDSRYCLSSRLRVSATFWQNPRNHFRCQVQFYGLSENDEWTQDRAKPVTQIVSAEAWGRADCGFTSESYQQGVLSATILYEILLGKATLYAVLVSALVLMAMVKRKDSRG

SEQ ID NO: 20079 - protein, 459 aa, Artificial Sequence
  Synthetic Polypeptide
MDWIWRILFLVGAATGAHSFEEVQLVESGGGLVQPGRSLRLSCAASGFTFDDYAMHWVRQAPGKGLEWVSGISWNSGSIGYADSAKGRFTISRDNSKNTLYLQMNSLRAEDTAVYYCAKRGNSNSFDYWGQGTLVTVSSTREQKLISEEDGSGIQNPDPAVYQLRDSKSSDKSVCLFTDFDSQTNVSQSKDSDVYITDKCVLDMRSMDFKSNSAVAWSNKSDFACANAFNNSIIPEDTFFPSPESSCDVKLVEKSFETDTNLNFQNLSVIGFRILLLKVAGFNLLMTLRLWSSRAKRSGSGVKQTLNFDLLKLAGDVESNPGPSRGHMAKPLSQEESTLIERATATINSIPISEDYSVASAALSSDGRIFTGVNVYHFTGGPCAELVVLGTAAAAAAGNLTCIVAIGNENRGILSPCGRCRQVLLDLHPGIKAIVKDSDGQPTAVGIRELLPSGYVWEG

SEQ ID NO: 20080 - protein, 293 aa, Artificial Sequence
  Synthetic Polypeptide
MDWIWRILFLVGAATGAHSFEEVQLVESGGGLVQPGRSLRLSCAASGFTFDDYAMHWVRQAPGKGLEWVSGISWNSGSIGYADSAKGRFTISRDNSKNTLYLQMNSLRAEDTAVYYCAKRGNSNSFDYWGQGTLVTVSSTREQKLISEEDGSGIQNPDPAVYQLRDSKSSDKSVCLFTDFDSQTNVSQSKDSDVYITDKCVLDMRSMDFKSNSAVAWSNKSDFACANAFNNSIIPEDTFFPSPESSCDVKLVEKSFETDTNLNFQNLSVIGFRILLLKVAGFNLLMTLRLWSS

SEQ ID NO: 20081 - protein, 640 aa, Artificial Sequence
  Synthetic Polypeptide
MALPVTALLLPLALLLHAARPDIQMTQSPSSVSASVGDRVTITCRASQSISSYLNWYQQKPGKAPKLLIYAASSLQSGVPSRFSGSGSGTDFTLTISSLQPEDFATYYCQQSYSTPWTFGQGTKVEIKRGGGGSGGGGSGGGGSEVQLVESGGGLVQPGRSLRLSCAASGFTFDDYAMHWVRQAPGKGLEWVSGISWNSGSIGYADSAKGRFTISRDNSKNTLYLQMNSLRAEDTAVYYCAKRGNSNSFDYWGQGTLVTVSSTRGSGIQNPDPAVYQLRDSKSSDKSVCLFTDFDSQTNVSQSKDSDVYITDKTVLDMRSMDFKSNSAVAWSNKSDFACANAFNNSIIPEDTFFPSSDVPCDVKLVEKSFETDTNLNFQNLSVIGFRILLLKVAGFNLLMTLRLWSSRAKRSGSGVKQTLNFDLLKLAGDVESNPGPSRGHMTEYKPTVRLATRDDVPRAVRTLAAAFADYPATRHTVDPDRHIERVTELQELFLTRVGLDIGKVWVADDGAAVAVWTTPESVEAGAVFAEIGPRMAELSGSRLAAQQQMEGLLAPHRPKEPAWFLATVGVSPDHQGKGLGSAVVLPGVEAAERAGVPAFLETSAPRNLPFYERLGFTVTADVEVPEGPRTWCMTRKPGA

SEQ ID NO: 20082 - protein, 672 aa, Artificial Sequence
  Synthetic Polypeptide
MALPVTALLLPLALLLHAARPDIQMTQSPSSVSASVGDRVTITCRASQSISSYLNWYQQKPGKAPKLLIYAASSLQSGVPSRFSGSGSGTDFTLTISSLQPEDFATYYCQQSYSTPWTFGQGTKVEIKRGGGGSGGGGSGGGGSEVQLVESGGGLVQPGRSLRLSCAASGFTFDDYAMHWVRQAPGKGLEWVSGISWNSGSIGYADSAKGRFTISRDNSKNTLYLQMNSLRAEDTAVYYCAKRGNSNSFDYWGQGTLVTVSSLEDLKNVFPPEVAVFEPSKAEIAHTQKATLVCLATGFYPDHVELSWWVNGKEVHSGVSTDPQPLKEQPALNDSRYCLSSRLRVSATFWQNPRNHFRCQVQFYGLSENDEWTQDRAKPVTQIVSAEAWGRADCGITSASYHQGVLSATILYEILLGKATLYAVLVSALVLMAMVKRKDSRGRAKRSGSGATNFSLLKQAGDVEENPGPTRGHMTEYKPTVRLATRDDVPRAVRTLAAAFADYPATRHTVDPDRHIERVTELQELFLTRVGLDIGKVWVADDGAAVAVWTTPESVEAGAVFAEIGPRMAELSGSRLAAQQQMEGLLAPHRPKEPAWFLATVGVSPDHQGKGLGSAVVLPGVEAAERAGVPAFLETSAPRNLPFYERLGFTVTADVEVPEGPRTWCMTRKPGA

SEQ ID NO: 20083 - protein, 695 aa, Artificial Sequence
  Synthetic Polypeptide
MALPVTALLLPLALLLHAARPDIQMTQSPSSVSASVGDRVTITCRASQSISSYLNWYQQKPGKAPKLLIYAASSLQSGVPSRFSGSGSGTDFTLTISSLQPEDFATYYCQQSYSTPWTFGQGTKVEIKRGGGGSGGGGSGGGGSEVQLVESGGGLVQPGRSLRLSCAASGFTFDDYAMHWVRQAPGKGLEWVSGISWNSGSIGYADSAKGRFTISRDNSKNTLYLQMNSLRAEDTAVYYCAKRGNSNSFDYWGQGTLVTVSSTRGSGGGGSGGGGSGDGNEEMGGITQTPYKVSISGTTVILTCPQYPGSEILWQHNDKNIGGDEDDKNIGSDEDHLSLKEFSELEQSGYYVCYPRGSKPEDANFYLYLRARVCENCMEMDVMSVATIVIVDICITGGLLLLVYYWSKNRKAKAKPVTRGAGAGGRQRGQNKERPPPVPNPDYEPIRKGQRDLYSGLNQRRIRAKRSGSGVKQTLNFDLLKLAGDVESNPGPSRGHMTEYKPTVRLATRDDVPRAVRTLAAAFADYPATRHTVDPDRHIERVTELQELFLTRVGLDIGKVWVADDGAAVAVWTTPESVEAGAVFAEIGPRMAELSGSRLAAQQQMEGLLAPHRPKEPAWFLATVGVSPDHQGKGLGSAVVLPGVEAAERAGVPAFLETSAPRNLPFYERLGFTVTADVEVPEGPRTWCMTRKPGA

SEQ ID NO: 20084 - protein, 660 aa, Artificial Sequence
  Synthetic Polypeptide
MALPVTALLLPLALLLHAARPDIQMTQSPSSVSASVGDRVTITCRASQSISSYLNWYQQKPGKAPKLLIYAASSLQSGVPSRFSGSGSGTDFTLTISSLQPEDFATYYCQQSYSTPWTFGQGTKVEIKRGGGGSGGGGSGGGGSEVQLVESGGGLVQPGRSLRLSCAASGFTFDDYAMHWVRQAPGKGLEWVSGISWNSGSIGYADSAKGRFTISRDNSKNTLYLQMNSLRAEDTAVYYCAKRGNSNSFDYWGQGTLVTVSSTRGSGGGGSGGGGSGFKIPIEELEDRVFVNCNTSITWVEGTVGTLLSDITRLDLGKRILDPRGIYRCNGTDIYKDKESTVQVHYRMCQSCVELDPATVAGIIVTDVIATLLLALGVFCFAGHETGRLSGAADTQALLRNDQVYQPLRDRDDAQYSHLGGNWARNKRAKRSGSGVKQTLNFDLLKLAGDVESNPGPSRGHMTEYKPTVRLATRDDVPRAVRTLAAAFADYPATRHTVDPDRHIERVTELQELFLTRVGLDIGKVWVADDGAAVAVWTTPESVEAGAVFAEIGPRMAELSGSRLAAQQQMEGLLAPHRPKEPAWFLATVGVSPDHQGKGLGSAVVLPGVEAAERAGVPAFLETSAPRNLPFYERLGFTVTADVEVPEGPRTWCMTRKPGA

SEQ ID NO: 20085 - protein, 670 aa, Artificial Sequence
  Synthetic Polypeptide
MALPVTALLLPLALLLHAARPDIQMTQSPSSVSASVGDRVTITCRASQSISSYLNWYQQKPGKAPKLLIYAASSLQSGVPSRFSGSGSGTDFTLTISSLQPEDFATYYCQQSYSTPWTFGQGTKVEIKRGGGGSGGGGSGGGGSEVQLVESGGGLVQPGRSLRLSCAASGFTFDDYAMHWVRQAPGKGLEWVSGISWNSGSIGYADSAKGRFTISRDNSKNTLYLQMNSLRAEDTAVYYCAKRGNSNSFDYWGQGTLVTVSSTRGSGGGGSGGGGSGQSIKGNHLVKVYDYQEDGSVLLTCDAEAKNITWFKDGKMIGFLTEDKKKWNLGSNAKDPRGMYQCKGSQNKSKPLQVYYRMCQNCIELNAATISGFLFAEIVSIFVLAVGVYFIAGQDGVRQSRASDKQTLLPNDQLYQPLKDREDDQYSHLQGNQLRRNRAKRSGSGVKQTLNFDLLKLAGDVESNPGPSRGHMTEYKPTVRLATRDDVPRAVRTLAAAFADYPATRHTVDPDRHIERVTELQELFLTRVGLDIGKVWVADDGAAVAVWTTPESVEAGAVFAEIGPRMAELSGSRLAAQQQMEGLLAPHRPKEPAWFLATVGVSPDHQGKGLGSAVVLPGVEAAERAGVPAFLETSAPRNLPFYERLGFTVTADVEVPEGPRTWCMTRKPGA

SEQ ID NO: 20086 - protein, 653 aa, Artificial Sequence
  Synthetic Polypeptide
MALPVTALLLPLALLLHAARPDIQMTQSPSSVSASVGDRVTITCRASQSISSYLNWYQQKPGKAPKLLIYAASSLQSGVPSRFSGSGSGTDFTLTISSLQPEDFATYYCQQSYSTPWTFGQGTKVEIKRGGGGSGGGGSGGGGSEVQLVESGGGLVQPGRSLRLSCAASGFTFDDYAMHWVRQAPGKGLEWVSGISWNSGSIGYADSAKGRFTISRDNSKNTLYLQMNSLRAEDTAVYYCAKRGNSNSFDYWGQGTLVTVSSTRGSGGGGSGGGGSGQSFGLLDPKLCYLLDGILFIYGVILTALFLRVKFSRSADAPAYQQGQNQLYNELNLGRREEYDVLDKRRGRDPEMGGKPQRRKNPQEGLYNELQKDKMAEAYSEIGMKGERRRGKGHDGLYQGLSTATKDTYDALHMQALPPRRAKRSGSGVKQTLNFDLLKLAGDVESNPGPSRGHMTEYKPTVRLATRDDVPRAVRTLAAAFADYPATRHTVDPDRHIERVTELQELFLTRVGLDIGKVWVADDGAAVAVWTTPESVEAGAVFAEIGPRMAELSGSRLAAQQQMEGLLAPHRPKEPAWFLATVGVSPDHQGKGLGSAVVLPGVEAAERAGVPAFLETSAPRNLPFYERLGFTVTADVEVPEGPRTWCMTRKPGA

SEQ ID NO: 20087 - protein, 754 aa, Artificial Sequence
  Synthetic Polypeptide
MALPVTALLLPLALLLHAARPEVQLVESGGGLVQPGGSLRLSCAASGFSFSDFWMSWVRQAPGKGLEWVATISQAGSEKDYVDSVKGRFTISRDNAKKSLYLQMNSLRAEDTAVYYCASGVYSFDYRGQGTLVTVSSGTGGGGSGGGGSGGGGSEFDIQMTQSPSSVSASVGDRVTITCRASQSISSYLNWYQQKPGKAPKLLIYAASSLQSGVPSRFSGSGSGTDFTLTISSLQPEDFATYYCQQSYSTPWTFGQGTKVEIKRLEDLKNVFPPEVAVFEPSEAEISHTQKATLVCLATGFYPDHVELSWWVNGKEVHSGVCTDPQPLKEQPALNDSRYCLSSRLRVSATFWQNPRNHFRCQVQFYGLSENDEWTQDRAKPVTQIVSAEAWGRADCGFTSESYQQGVLSATILYEILLGKATLYAVLVSALVLMAMVKRKDSRGRAKRSGSGATNFSLLKQAGDVEENPGPTSMDWIWRILFLVGAATGAHSFEEVQLVESGGGLVQPGRSLRLSCAASGFTFDDYAMHWVRQAPGKGLEWVSGISWNSGSIGYADSAKGRFTISRDNSKNTLYLQMNSLRAEDTAVYYCAKRGNSNSFDYWGQGTLVTVSSTRIQNPDPAVYQLRDSKSSDKSVCLFTDFDSQTNVSQSKDSDVYITDKCVLDMRSMDFKSNSAVAWSNKSDFACANAFNNSIIPEDTFFPSPESSCDVKLVEKSFETDTNLNFQNLSVIGFRILLLKVAGFNLLMTLRLWSS

SEQ ID NO: 20088 - protein, 758 aa, Artificial Sequence
  Synthetic Polypeptide
MALPVTALLLPLALLLHAARPEVQLVESGGGLVQPGGSLRLSCAASGFSFSDFWMSWVRQAPGKGLEWVATISQAGSEKDYVDSVKGRFTISRDNAKKSLYLQMNSLRAEDTAVYYCASGVYSFDYRGQGTLVTVSSGTGGGGSGGGGSGGGGSEFDIQMTQSPSSVSASVGDRVTITCRASQSISSYLNWYQQKPGKAPKLLIYAASSLQSGVPSRFSGSGSGTDFTLTISSLQPEDFATYYCQQSYSTPWTFGQGTKVEIKRLEIQNPDPAVYQLRDSKSSDKSVCLFTDFDSQTNVSQSKDSDVYITDKCVLDMRSMDFKSNSAVAWSNKSDFACANAFNNSIIPEDTFFPSPESSCDVKLVEKSFETDTNLNFQNLSVIGFRILLLKVAGFNLLMTLRLWSSRAKRSGSGVKQTLNFDLLKLAGDVESNPGPTSMDWIWRILFLVGAATGAHSFEEVQLVESGGGLVQPGRSLRLSCAASGFTFDDYAMHWVRQAPGKGLEWVSGISWNSGSIGYADSAKGRFTISRDNSKNTLYLQMNSLRAEDTAVYYCAKRGNSNSFDYWGQGTLVTVSSTREDLKNVFPPEVAVFEPSEAEISHTQKATLVCLATGFYPDHVELSWWVNGKEVHSGVCTDPQPLKEQPALNDSRYCLSSRLRVSATFWQNPRNHFRCQVQFYGLSENDEWTQDRAKPVTQIVSAEAWGRADCGFTSESYQQGVLSATILYEILLGKATLYAVLVSALVLMAMVKRKDSRG

SEQ ID NO: 20089 - protein, 950 aa, Artificial Sequence
  Synthetic Polypeptide
MALPVTALLLPLALLLHAARPEVQLVESGGGLVQPGGSLRLSCAASGFSFSDFWMSWVRQAPGKGLEWVATISQAGSEKDYVDSVKGRFTISRDNAKKSLYLQMNSLRAEDTAVYYCASGVYSFDYRGQGTLVTVSSGTGGGGSGGGGSGGGGSEFDIQMTQSPSSVSASVGDRVTITCRASQSISSYLNWYQQKPGKAPKLLIYAASSLQSGVPSRFSGSGSGTDFTLTISSLQPEDFATYYCQQSYSTPWTFGQGTKVEIKRLEDLKNVFPPEVAVFEPSEAEISHTQKATLVCLATGFYPDHVELSWWVNGKEVHSGVSTDPQPLKEQPALNDSRYCLSSRLRVSATFWQNPRNHFRCQVQFYGLSENDEWTQDRAKPVTQIVSAEAWGRADCGSQSFGLLDPKLCYLLDGILFIYGVILTALFLRVKFSRSADAPAYQQGQNQLYNELNLGRREEYDVLDKRRGRDPEMGGKPQRRKNPQEGLYNELQKDKMAEAYSEIGMKGERRRGKGHDGLYQGLSTATKDTYDALHMQALPPRRAKRSGSGATNFSLLKQAGDVEENPGPTSMDWIWRILFLVGAATGAHSFEEVQLVESGGGLVQPGRSLRLSCAASGFTFDDYAMHWVRQAPGKGLEWVSGISWNSGSIGYADSAKGRFTISRDNSKNTLYLQMNSLRAEDTAVYYCAKRGNSNSFDYWGQGTLVTVSSTRIQNPDPAVYQLRDSKSSDKSVCLFTDFDSQTNVSQSKDSDVYITDKTVLDMRSMDFKSNSAVAWSNKSDFACANAFNNSIIPEDTFFPSPESSCGTQSFGLLDPKLCYLLDGILFIYGVILTALFLRVKFSRSADAPAYQQGQNQLYNELNLGRREEYDVLDKRRGRDPEMGGKPQRRKNPQEGLYNELQKDKMAEAYSEIGMKGERRRGKGHDGLYQGLSTATKDTYDALHMQALPPR

SEQ ID NO: 20090 - protein, 780 aa, Artificial Sequence
  Synthetic Polypeptide
MALPVTALLLPLALLLHAARPEVQLVESGGGLVQPGGSLRLSCAASGFSFSDFWMSWVRQAPGKGLEWVATISQAGSEKDYVDSVKGRFTISRDNAKKSLYLQMNSLRAEDTAVYYCASGVYSFDYRGQGTLVTVSSGTGGGGSGGGGSGGGGSEFDIQMTQSPSSVSASVGDRVTITCRASQSISSYLNWYQQKPGKAPKLLIYAASSLQSGVPSRFSGSGSGTDFTLTISSLQPEDFATYYCQQSYSTPWTFGQGTKVEIKRLEGQPKANPTVTLFPPSSEELQANKATLVCLISDFYPGAVTVAWKADGSPVKAGVETTKPSKQSNNKYAASSYLSLTPEQWKSHRSYSCQVTHEGSTVEKTVAPTECSPIKTDVITMDPKDNCSKDANDTLLLQLTNTSAYYMYLLLLLKSVVYFAIITCCLLRRTAFCCNGEKSRAKRSGSGATNFSLLKQAGDVEENPGPTSMDWIWRILFLVGAATGAHSFEEVQLVESGGGLVQPGRSLRLSCAASGFTFDDYAMHWVRQAPGKGLEWVSGISWNSGSIGYADSAKGRFTISRDNSKNTLYLQMNSLRAEDTAVYYCAKRGNSNSFDYWGQGTLVTVSSTRASTKGPSVFPLAPSSKSTSGGTAALGCLVKDYFPEPVTVSWNSGALTSGVHTFPAVLQSSGLYSLSSVVTVPSSSLGTQTYICNVNHKPSNTKVDKRVEPKSCEVKTDSTDHVKPKETENTKQPSKSCHKPKAIVHTEKVNMMSLTVLGLRMLFAKTVAVNFLLTAKLFFL

SEQ ID NO: 20091 - protein, 761 aa, Artificial Sequence
  Synthetic Polypeptide
MALPVTALLLPLALLLHAARPEVQLVESGGGLVQPGGSLRLSCAASGFSFSDFWMSWVRQAPGKGLEWVATISQAGSEKDYVDSVKGRFTISRDNAKKSLYLQMNSLRAEDTAVYYCASGVYSFDYRGQGTLVTVSSGTGGGGSGGGGSGGGGSEFDIQMTQSPSSVSASVGDRVTITCRASQSISSYLNWYQQKPGKAPKLLIYAASSLQSGVPSRFSGSGSGTDFTLTISSLQPEDFATYYCQQSYSTPWTFGQGTKVEIKRLEGQPKANPTVTLFPPSSEELQANKATLVCLISDFYPGAVTVAWKADGSPVKAGVETTKPSKQSNNKYAASSYLSLTPEQWKSHRSYSCQVTHEGSTVEKTVAPTECSGRADCGFTSESYQQGVLSATILYEILLGKATLYAVLVSALVLMAMVKRKDSRGRAKRSGSGVKQTLNFDLLKLAGDVESNPGPTSMDWIWRILFLVGAATGAHSFEEVQLVESGGGLVQPGRSLRLSCAASGFTFDDYAMHWVRQAPGKGLEWVSGISWNSGSIGYADSAKGRFTISRDNSKNTLYLQMNSLRAEDTAVYYCAKRGNSNSFDYWGQGTLVTVSSTRASTKGPSVFPLAPSSKSTSGGTAALGCLVKDYFPEPVTVSWNSGALTSGVHTFPAVLQSSGLYSLSSVVTVPSSSLGTQTYICNVNHKPSNTKVDKRVEPKSCIPEDTFFPSPESSCDVKLVEKSFETDTNLNFQNLSVIGFRILLLKVAGFNLLMTLRLWSS

SEQ ID NO: 20092 - protein, 895 aa, Artificial Sequence
  Synthetic Polypeptide
MALPVTALLLPLALLLHAARPEVQLVESGGGLVQPGGSLRLSCAASGFSFSDFWMSWVRQAPGKGLEWVATISQAGSEKDYVDSVKGRFTISRDNAKKSLYLQMNSLRAEDTAVYYCASGVYSFDYRGQGTLVTVSSGTGGGGSGGGGSGGGGSEFDIQMTQSPSSVSASVGDRVTITCRASQSISSYLNWYQQKPGKAPKLLIYAASSLQSGVPSRFSGSGSGTDFTLTISSLQPEDFATYYCQQSYSTPWTFGQGTKVEIKRLEIQNPDPAVYQLRDSKSSDKSVCLFTDFDSQTNVSQSKDSDVYITDKCVLDMRSMDFKSNSAVAWSNKSDFACANAFNNSIIPEDTFFPSPESSCDVKLVEKSFETDTNLNFQNLSVIGFRILLLKVAGFNLLMTLRLWSSRAKRSGSGVKQTLNFDLLKLAGDVESNPGPTSMDWIWRILFLVGAATGAHSGPQLQLQESGPGLVKPSETLSLTCTVSGDSISSGDYYWGWIRQPPGKGLEWIGHIYYSGVTYYNPSLKSRVTISVDTSRNQFSLKLSSVTAADTAVYYCTREDSSNWRSRGQGTLVTVSSGSGGGGSGGGGSGGGGSFEEVQLVESGGGLVQPGRSLRLSCAASGFTFDDYAMHWVRQAPGKGLEWVSGISWNSGSIGYADSAKGRFTISRDNSKNTLYLQMNSLRAEDTAVYYCAKRGNSNSFDYWGQGTLVTVSSTREDLKNVFPPEVAVFEPSEAEISHTQKATLVCLATGFYPDHVELSWWVNGKEVHSGVCTDPQPLKEQPALNDSRYCLSSRLRVSATFWQNPRNHFRCQVQFYGLSENDEWTQDRAKPVTQIVSAEAWGRADCGFTSESYQQGVLSATILYEILLGKATLYAVLVSALVLMAMVKRKDSRG

SEQ ID NO: 20093 - protein, 1087 aa, Artificial Sequence
  Synthetic Polypeptide
MALPVTALLLPLALLLHAARPEVQLVESGGGLVQPGGSLRLSCAASGFSFSDFWMSWVRQAPGKGLEWVATISQAGSEKDYVDSVKGRFTISRDNAKKSLYLQMNSLRAEDTAVYYCASGVYSFDYRGQGTLVTVSSGTGGGGSGGGGSGGGGSEFDIQMTQSPSSVSASVGDRVTITCRASQSISSYLNWYQQKPGKAPKLLIYAASSLQSGVPSRFSGSGSGTDFTLTISSLQPEDFATYYCQQSYSTPWTFGQGTKVEIKRLEDLKNVFPPEVAVFEPSEAEISHTQKATLVCLATGFYPDHVELSWWVNGKEVHSGVSTDPQPLKEQPALNDSRYCLSSRLRVSATFWQNPRNHFRCQVQFYGLSENDEWTQDRAKPVTQIVSAEAWGRADCGSQSFGLLDPKLCYLLDGILFIYGVILTALFLRVKFSRSADAPAYQQGQNQLYNELNLGRREEYDVLDKRRGRDPEMGGKPQRRKNPQEGLYNELQKDKMAEAYSEIGMKGERRRGKGHDGLYQGLSTATKDTYDALHMQALPPRRAKRSGSGATNFSLLKQAGDVEENPGPTSMDWIWRILFLVGAATGAHSGPQLQLQESGPGLVKPSETLSLTCTVSGDSISSGDYYWGWIRQPPGKGLEWIGHIYYSGVTYYNPSLKSRVTISVDTSRNQFSLKLSSVTAADTAVYYCTREDSSNWRSRGQGTLVTVSSGSGGGGSGGGGSGGGGSFEEVQLVESGGGLVQPGRSLRLSCAASGFTFDDYAMHWVRQAPGKGLEWVSGISWNSGSIGYADSAKGRFTISRDNSKNTLYLQMNSLRAEDTAVYYCAKRGNSNSFDYWGQGTLVTVSSTRIQNPDPAVYQLRDSKSSDKSVCLFTDFDSQTNVSQSKDSDVYITDKTVLDMRSMDFKSNSAVAWSNKSDFACANAFNNSIIPEDTFFPSPESSCGTQSFGLLDPKLCYLLDGILFIYGVILTALFLRVKFSRSADAPAYQQGQNQLYNELNLGRREEYDVLDKRRGRDPEMGGKPQRRKNPQEGLYNELQKDKMAEAYSEIGMKGERRRGKGHDGLYQGLSTATKDTYDALHMQALPPR

SEQ ID NO: 20094 - protein, 917 aa, Artificial Sequence
  Synthetic Polypeptide
MALPVTALLLPLALLLHAARPEVQLVESGGGLVQPGGSLRLSCAASGFSFSDFWMSWVRQAPGKGLEWVATISQAGSEKDYVDSVKGRFTISRDNAKKSLYLQMNSLRAEDTAVYYCASGVYSFDYRGQGTLVTVSSGTGGGGSGGGGSGGGGSEFDIQMTQSPSSVSASVGDRVTITCRASQSISSYLNWYQQKPGKAPKLLIYAASSLQSGVPSRFSGSGSGTDFTLTISSLQPEDFATYYCQQSYSTPWTFGQGTKVEIKRLEGQPKANPTVTLFPPSSEELQANKATLVCLISDFYPGAVTVAWKADGSPVKAGVETTKPSKQSNNKYAASSYLSLTPEQWKSHRSYSCQVTHEGSTVEKTVAPTECSPIKTDVITMDPKDNCSKDANDTLLLQLTNTSAYYMYLLLLLKSVVYFAIITCCLLRRTAFCCNGEKSRAKRSGSGATNFSLLKQAGDVEENPGPTSMDWIWRILFLVGAATGAHSGPQLQLQESGPGLVKPSETLSLTCTVSGDSISSGDYYWGWIRQPPGKGLEWIGHIYYSGVTYYNPSLKSRVTISVDTSRNQFSLKLSSVTAADTAVYYCTREDSSNWRSRGQGTLVTVSSGSGGGGSGGGGSGGGGSFEEVQLVESGGGLVQPGRSLRLSCAASGFTFDDYAMHWVRQAPGKGLEWVSGISWNSGSIGYADSAKGRFTISRDNSKNTLYLQMNSLRAEDTAVYYCAKRGNSNSFDYWGQGTLVTVSSTRASTKGPSVFPLAPSSKSTSGGTAALGCLVKDYFPEPVTVSWNSGALTSGVHTFPAVLQSSGLYSLSSVVTVPSSSLGTQTYICNVNHKPSNTKVDKRVEPKSCEVKTDSTDHVKPKETENTKQPSKSCHKPKAIVHTEKVNMMSLTVLGLRMLFAKTVAVNFLLTAKLFFL

SEQ ID NO: 20095 - protein, 898 aa, Artificial Sequence
  Synthetic Polypeptide
MALPVTALLLPLALLLHAARPEVQLVESGGGLVQPGGSLRLSCAASGFSFSDFWMSWVRQAPGKGLEWVATISQAGSEKDYVDSVKGRFTISRDNAKKSLYLQMNSLRAEDTAVYYCASGVYSFDYRGQGTLVTVSSGTGGGGSGGGGSGGGGSEFDIQMTQSPSSVSASVGDRVTITCRASQSISSYLNWYQQKPGKAPKLLIYAASSLQSGVPSRFSGSGSGTDFTLTISSLQPEDFATYYCQQSYSTPWTFGQGTKVEIKRLEGQPKANPTVTLFPPSSEELQANKATLVCLISDFYPGAVTVAWKADGSPVKAGVETTKPSKQSNNKYAASSYLSLTPEQWKSHRSYSCQVTHEGSTVEKTVAPTECSGRADCGFTSESYQQGVLSATILYEILLGKATLYAVLVSALVLMAMVKRKDSRGRAKRSGSGVKQTLNFDLLKLAGDVESNPGPTSMDWIWRILFLVGAATGAHSGPQLQLQESGPGLVKPSETLSLTCTVSGDSISSGDYYWGWIRQPPGKGLEWIGHIYYSGVTYYNPSLKSRVTISVDTSRNQFSLKLSSVTAADTAVYYCTREDSSNWRSRGQGTLVTVSSGSGGGGSGGGGSGGGGSFEEVQLVESGGGLVQPGRSLRLSCAASGFTFDDYAMHWVRQAPGKGLEWVSGISWNSGSIGYADSAKGRFTISRDNSKNTLYLQMNSLRAEDTAVYYCAKRGNSNSFDYWGQGTLVTVSSTRASTKGPSVFPLAPSSKSTSGGTAALGCLVKDYFPEPVTVSWNSGALTSGVHTFPAVLQSSGLYSLSSVVTVPSSSLGTQTYICNVNHKPSNTKVDKRVEPKSCIPEDTFFPSPESSCDVKLVEKSFETDTNLNFQNLSVIGFRILLLKVAGFNLLMTLRLWSS

SEQ ID NO: 20096 - protein, 755 aa, Artificial Sequence
  Synthetic Polypeptide
MALPVTALLLPLALLLHAARPEVQVLESGGGLVQPGGSLRLSCAASGFTFSNFAMSWVRQAPGKGLEWVSTISGSAGTTDYADSVKGRFTISRDNSKKTLYLQMNSLRVEDTAVYYCADGRGPFFDYRGQGTLVTVSSGTGGGGSGGGGSGGGGSEFDIQMTQSPSSVSASVGDRVTITCRASQSISSYLNWYQQKPGKAPKLLIYAASSLQSGVPSRFSGSGSGTDFTLTISSLQPEDFATYYCQQSYSTPWTFGQGTKVEIKRLEDLKNVFPPEVAVFEPSEAEISHTQKATLVCLATGFYPDHVELSWWVNGKEVHSGVCTDPQPLKEQPALNDSRYCLSSRLRVSATFWQNPRNHFRCQVQFYGLSENDEWTQDRAKPVTQIVSAEAWGRADCGFTSESYQQGVLSATILYEILLGKATLYAVLVSALVLMAMVKRKDSRGRAKRSGSGATNFSLLKQAGDVEENPGPTSMDWIWRILFLVGAATGAHSFEEVQLVESGGGLVQPGRSLRLSCAASGFTFDDYAMHWVRQAPGKGLEWVSGISWNSGSIGYADSAKGRFTISRDNSKNTLYLQMNSLRAEDTAVYYCAKRGNSNSFDYWGQGTLVTVSSTRIQNPDPAVYQLRDSKSSDKSVCLFTDFDSQTNVSQSKDSDVYITDKCVLDMRSMDFKSNSAVAWSNKSDFACANAFNNSIIPEDTFFPSPESSCDVKLVEKSFETDTNLNFQNLSVIGFRILLLKVAGFNLLMTLRLWSS

SEQ ID NO: 20097 - protein, 756 aa, Artificial Sequence
  Synthetic Polypeptide
MALPVTALLLPLALLLHAARPDIQMTQSPSSVSASVGDRVTITCRASQSISSYLNWYQQKPGKAPKLLIYAASSLQSGVPSRFSGSGSGTDFTLTISSLQPEDFATYYCQQSYSTPWTFGQGTKVEIKRLEDLKNVFPPEVAVFEPSEAEISHTQKATLVCLATGFYPDHVELSWWVNGKEVHSGVCTDPQPLKEQPALNDSRYCLSSRLRVSATFWQNPRNHFRCQVQFYGLSENDEWTQDRAKPVTQIVSAEAWGRADCGFTSESYQQGVLSATILYEILLGKATLYAVLVSALVLMAMVKRKDSRGRAKRSGSGATNFSLLKQAGDVEENPGPTSMDWIWRILFLVGAATGAHSGPEVQLVESGGGLVQAGGSLRLSCAASGRTFSMGWFRQAPGKEREFVAAITYSGGSPYYADSVKGRFTISRDNAKNTVYLQMNSLKPEDTAVYYCAANPTYGSDWNAENWGQGTQVTVSSGSGGGGSGGGGSGGGGSFEEVQLVESGGGLVQPGRSLRLSCAASGFTFDDYAMHWVRQAPGKGLEWVSGISWNSGSIGYADSAKGRFTISRDNSKNTLYLQMNSLRAEDTAVYYCAKRGNSNSFDYWGQGTLVTVSSTRIQNPDPAVYQLRDSKSSDKSVCLFTDFDSQTNVSQSKDSDVYITDKCVLDMRSMDFKSNSAVAWSNKSDFACANAFNNSIIPEDTFFPSPESSCDVKLVEKSFETDTNLNFQNLSVIGFRILLLKVAGFNLLMTLRLWSS

SEQ ID NO: 20098 - protein, 883 aa, Artificial Sequence
  Synthetic Polypeptide
MALPVTALLLPLALLLHAARPDIQMTQSPSSVSASVGDRVTITCRASQSISSYLNWYQQKPGKAPKLLIYAASSLQSGVPSRFSGSGSGTDFTLTISSLQPEDFATYYCQQSYSTPWTFGQGTKVEIKRLEDLKNVFPPEVAVFEPSEAEISHTQKATLVCLATGFYPDHVELSWWVNGKEVHSGVCTDPQPLKEQPALNDSRYCLSSRLRVSATFWQNPRNHFRCQVQFYGLSENDEWTQDRAKPVTQIVSAEAWGRADCGFTSESYQQGVLSATILYEILLGKATLYAVLVSALVLMAMVKRKDSRGRAKRSGSGATNFSLLKQAGDVEENPGPTSMDWIWRILFLVGAATGAHSQLQLQESGPGLVKPSETLSLTCTVSGGSISSGDYYWGWIRQPPGKGLEWIGSISYSGSTYYNPSLKSRVTISVDTSRNQFSLKLSSVTAADTAVYYCTREDSSNWRSRGQGTLVTVSSSGGGGSGGGGSEVQLVESGGGLVQAGGSLRLSCAASGRTFSMGWFRQAPGKEREFVAAITYSGGSPYYADSVKGRFTISRDNAKNTVYLQMNSLKPEDTAVYYCAANPTYGSDWNAENWGQGTQVTVSSGSGGGGSGGGGSGGGGSFEEVQLVESGGGLVQPGRSLRLSCAASGFTFDDYAMHWVRQAPGKGLEWVSGISWNSGSIGYADSAKGRFTISRDNSKNTLYLQMNSLRAEDTAVYYCAKRGNSNSFDYWGQGTLVTVSSTRIQNPDPAVYQLRDSKSSDKSVCLFTDFDSQTNVSQSKDSDVYITDKCVLDMRSMDFKSNSAVAWSNKSDFACANAFNNSIIPEDTFFPSPESSCDVKLVEKSFETDTNLNFQNLSVIGFRILLLKVAGFNLLMTLRLWSS

SEQ ID NO: 20099 - protein, 892 aa, Artificial Sequence
  Synthetic Polypeptide
MALPVTALLLPLALLLHAARPEVQVLESGGGLVQPGGSLRLSCAASGFTFSNFAMSWVRQAPGKGLEWVSTISGSAGTTDYADSVKGRFTISRDNSKKTLYLQMNSLRVEDTAVYYCADGRGPFFDYRGQGTLVTVSSGTGGGGSGGGGSGGGGSEFDIQMTQSPSSVSASVGDRVTITCRASQSISSYLNWYQQKPGKAPKLLIYAASSLQSGVPSRFSGSGSGTDFTLTISSLQPEDFATYYCQQSYSTPWTFGQGTKVEIKRLEDLKNVFPPEVAVFEPSEAEISHTQKATLVCLATGFYPDHVELSWWVNGKEVHSGVCTDPQPLKEQPALNDSRYCLSSRLRVSATFWQNPRNHFRCQVQFYGLSENDEWTQDRAKPVTQIVSAEAWGRADCGFTSESYQQGVLSATILYEILLGKATLYAVLVSALVLMAMVKRKDSRGRAKRSGSGATNFSLLKQAGDVEENPGPTSMDWIWRILFLVGAATGAHSGPEVQLVESGGGLVQAGGSLRLSCAASGRTFSMGWFRQAPGKEREFVAAITYSGGSPYYASSVRGRFTISRDNAKNTVYLQMNSLKPEDTAVYYCAANPTYGSDWNAENWGQGTQVTVSSGSGGGGSGGGGSGGGGSFEEVQLVESGGGLVQPGRSLRLSCAASGFTFDDYAMHWVRQAPGKGLEWVSGISWNSGSIGYADSAKGRFTISRDNSKNTLYLQMNSLRAEDTAVYYCAKRGNSNSFDYWGQGTLVTVSSTRIQNPDPAVYQLRDSKSSDKSVCLFTDFDSQTNVSQSKDSDVYITDKCVLDMRSMDFKSNSAVAWSNKSDFACANAFNNSIIPEDTFFPSPESSCDVKLVEKSFETDTNLNFQNLSVIGFRILLLKVAGFNLLMTLRLWSS

SEQ ID NO: 20100 - protein, 723 aa, Artificial Sequence
  Synthetic Polypeptide
MALPVTALLLPLALLLHAARPDTVLTQSPALAVSPGERVTISCKASESVSTRMHWYRQKPGQQPKLLIYKTSNLASGVPARFSGSGSGTDFTLTIDPVEADDTATYFCQQSWNGPLTFGSGTKLEIKRGGGGSGGGGSGGGGSQVQLKESGPGLVQPSQTLSLTCTVSGLSLTSNGVSWIRQPPGKGLEWLGVIWSNGGTDYNSAIKSRLSFSRDTSKSQVFLKMNSLQTEDTAMYFCARPRYNSGYFFDYWGQGVMVTVSSTREQKLISEEDLAKPTTTPAPRPPTPAPTIASQPLSLRPEACRPAAGGAVHTRGLDFACDIYIWAPLAGTCGVLLLSLVITLYCKRGRKKLLYIFKQPFMRPVQTTQEEDGCSCRFPEEEEGGCELRVKFSRSADAPAYQQGQNQLYNELNLGRREEYDVLDKRRGRDPEMGGKPRRKNPQEGLYNELQKDKMAEAYSEIGMKGERRRGKGHDGLYQGLSTATKDTYDALHMQALPPRSSGSGEGRGSLLTCGDVEENPGPHMTEYKPTVRLATRDDVPRAVRTLAAAFADYPATRHTVDPDRHIERVTELQELFLTRVGLDIGKVWVADDGAAVAVWTTPESVEAGAVFAEIGPRMAELSGSRLAAQQQMEGLLAPHRPKEPAWFLATVGVSPDHQGKGLGSAVVLPGVEAAERAGVPAFLETSAPRNLPFYERLGFTVTADVEVPEGPRTWCMTRKPGA

SEQ ID NO: 20101 - protein, 717 aa, Artificial Sequence
  Synthetic Polypeptide
MALPVTALLLPLALLLHAARPDTVLTQSPALAVSPGERVTISCKASESVSTRMHWYRQKPGQQPKLLIYKTSNLASGVPARFSGSGSGTDFTLTIDPVEADDTATYFCQQSWNGPLTFGSGTKLEIKRGGGGSGGGGSGGGGSQVQLKESGPGLVQPSQTLSLTCTVSGLSLTSNGVSWIRQPPGKGLEWLGVIWSNGGTDYNSAIKSRLSFSRDTSKSQVFLKMNSLQTEDTAMYFCARPRYNSGYFFDYWGQGVMVTVSSTREQKLISEEDLKIEVMYPPPYLDNEKSNGTIIHVKGKHLCPSPLFPGPSKPFWVLVVVGGVLACYSLLVTVAFIIFWVRSKRSRLLHSDYMNMTPRRPGPTRKHYQPYAPPRDFAAYRSRVKFSRSADAPAYQQGQNQLYNELNLGRREEYDVLDKRRGRDPEMGGKPRRKNPQEGLYNELQKDKMAEAYSEIGMKGERRRGKGHDGLYQGLSTATKDTYDALHMQALPPRSSGSGEGRGSLLTCGDVEENPGPHMTEYKPTVRLATRDDVPRAVRTLAAAFADYPATRHTVDPDRHIERVTELQELFLTRVGLDIGKVWVADDGAAVAVWTTPESVEAGAVFAEIGPRMAELSGSRLAAQQQMEGLLAPHRPKEPAWFLATVGVSPDHQGKGLGSAVVLPGVEAAERAGVPAFLETSAPRNLPFYERLGFTVTADVEVPEGPRTWCMTRKPGA

SEQ ID NO: 20102 - protein, 494 aa, Artificial Sequence
  Synthetic Polypeptide
MALPVTALLLPLALLLHAARPDTVLTQSPALAVSPGERVTISCKASESVSTRMHWYRQKPGQQPKLLIYKTSNLASGVPARFSGSGSGTDFTLTIDPVEADDTATYFCQQSWNGPLTFGSGTKLEIKRGGGGSGGGGSGGGGSQVQLKESGPGLVQPSQTLSLTCTVSGLSLTSNGVSWIRQPPGKGLEWLGVIWSNGGTDYNSAIKSRLSFSRDTSKSQVFLKMNSLQTEDTAMYFCARPRYNSGYFFDYWGQGVMVTVSSTREQKLISEEDLKIEVMYPPPYLDNEKSNGTIIHVKGKHLCPSPLFPGPSKPFWVLVVVGGVLACYSLLVTVAFIIFWVRSKRSRLLHSDYMNMTPRRPGPTRKHYQPYAPPRDFAAYRSRVKFSRSADAPAYQQGQNQLYNELNLGRREEYDVLDKRRGRDPEMGGKPRRKNPQEGLYNELQKDKMAEAYSEIGMKGERRRGKGHDGLYQGLSTATKDTYDALHMQALPPR

SEQ ID NO: 20103 - protein, 500 aa, Artificial Sequence
  Synthetic Polypeptide
MALPVTALLLPLALLLHAARPDTVLTQSPALAVSPGERVTISCKASESVSTRMHWYRQKPGQQPKLLIYKTSNLASGVPARFSGSGSGTDFTLTIDPVEADDTATYFCQQSWNGPLTFGSGTKLEIKRGGGGSGGGGSGGGGSQVQLKESGPGLVQPSQTLSLTCTVSGLSLTSNGVSWIRQPPGKGLEWLGVIWSNGGTDYNSAIKSRLSFSRDTSKSQVFLKMNSLQTEDTAMYFCARPRYNSGYFFDYWGQGVMVTVSSTREQKLISEEDLAKPTTTPAPRPPTPAPTIASQPLSLRPEACRPAAGGAVHTRGLDFACDIYIWAPLAGTCGVLLLSLVITLYCKRGRKKLLYIFKQPFMRPVQTTQEEDGCSCRFPEEEEGGCELRVKFSRSADAPAYQQGQNQLYNELNLGRREEYDVLDKRRGRDPEMGGKPRRKNPQEGLYNELQKDKMAEAYSEIGMKGERRRGKGHDGLYQGLSTATKDTYDALHMQALPPR

SEQ ID NO: 20104 - protein, 500 aa, Artificial Sequence
  Synthetic Polypeptide
MALPVTALLLPLALLLHAARPQVQLKESGPGLVQPSQTLSLTCTVSGLSLTSNGVSWIRQPPGKGLEWLGVIWSNGGTDYNSAIKSRLSFSRDTSKSQVFLKMNSLQTEDTAMYFCARPRYNSGYFFDYWGQGVMVTVSSGGGGSGGGGSGGGGSDTVLTQSPALAVSPGERVTISCKASESVSTRMHWYRQKPGQQPKLLIYKTSNLASGVPARFSGSGSGTDFTLTIDPVEADDTATYFCQQSWNGPLTFGSGTKLEIKRTREQKLISEEDLAKPTTTPAPRPPTPAPTIASQPLSLRPEACRPAAGGAVHTRGLDFACDIYIWAPLAGTCGVLLLSLVITLYCKRGRKKLLYIFKQPFMRPVQTTQEEDGCSCRFPEEEEGGCELRVKFSRSADAPAYQQGQNQLYNELNLGRREEYDVLDKRRGRDPEMGGKPRRKNPQEGLYNELQKDKMAEAYSEIGMKGERRRGKGHDGLYQGLSTATKDTYDALHMQALPPR

SEQ ID NO: 20105 - protein, 913 aa, Artificial Sequence
  Synthetic Polypeptide
MALPVTALLLPLALLLHAARPDTVLTQSPALAVSPGERVTISCKASESVSTRMHWYRQKPGQQPKLLIYKTSNLASGVPARFSGSGSGTDFTLTIDPVEADDTATYFCQQSWNGPLTFGSGTKLEIKRGGGGSGGGGSGGGGSQVQLKESGPGLVQPSQTLSLTCTVSGLSLTSNGVSWIRQPPGKGLEWLGVIWSNGGTDYNSAIKSRLSFSRDTSKSQVFLKMNSLQTEDTAMYFCARPRYNSGYFFDYWGQGVMVTVSSTREQKLISEEDLAKPTTTPAPRPPTPAPTIASQPLSLRPEACRPAAGGAVHTRGLDFACDIYIWAPLAGTCGVLLLSLVITLYCGRARVKFSRSADAPAYQQGQNQLYNELNLGRREEYDVLDKRRGRDPEMGGKPRRKNPQEGLYNELQKDKMAEAYSEIGMKGERRRGKGHDGLYQGLSTATKDTYDALHMQALPPRSRGSGATNFSLLKQAGDVEENPGPGIHMATYEVLCEVARKLGTDDREVVLFLLNVFIPQPTLAQLIGALRALKEEGRLTFPLLAECLFRAGRRDLLRDLLHLDPRFLERHLAGTMSYFSPYQLTVLHVDGELCARDIRSLIFLSKDTIGSRSTPQTFLHWVYCMENLDLLGPTDVDALMSMLRSLSRVDLQRQVQTLMGLHLSGPSHSQHYRHTPLETDFYDYKDDDDKTSGSGEGRGSLLTCGDVEENPGPHMTEYKPTVRLATRDDVPRAVRTLAAAFADYPATRHTVDPDRHIERVTELQELFLTRVGLDIGKVWVADDGAAVAVWTTPESVEAGAVFAEIGPRMAELSGSRLAAQQQMEGLLAPHRPKEPAWFLATVGVSPDHQGKGLGSAVVLPGVEAAERAGVPAFLETSAPRNLPFYERLGFTVTADVEVPEGPRTWCMTRKPGA

SEQ ID NO: 20106 - protein, 853 aa, Artificial Sequence
  Synthetic Polypeptide
MALPVTALLLPLALLLHAARPDTVLTQSPALAVSPGERVTISCKASESVSTRMHWYRQKPGQQPKLLIYKTSNLASGVPARFSGSGSGTDFTLTIDPVEADDTATYFCQQSWNGPLTFGSGTKLEIKRLEIQNPDPAVYQLRDSKSSDKSVCLFTDFDSQTNVSQSKDSDVYITDKCVLDMRSMDFKSNSAVAWSNKSDFACANAFNNSIIPEDTFFPSSDVPCDVKLVEKSFETDTNLNFQNLSVIGFRILLLKVAGFNLLMTLRLWSSRAKRSGSGVKQTLNFDLLKLAGDVESNPGPTSMDWIWRILFLVGAATGAHSFEQVQLKESGPGLVQPSQTLSLTCTVSGLSLTSNGVSWIRQPPGKGLEWLGVIWSNGGTDYNSAIKSRLSFSRDTSKSQVFLKMNSLQTEDTAMYFCARPRYNSGYFFDYWGQGVMVTVSSTREDLKNVFPPEVAVFEPSKAEIAHTQKATLVCLATGFYPDHVELSWWVNGKEVHSGVCTDPQPLKEQPALNDSRYCLSSRLRVSATFWQNPRNHFRCQVQFYGLSENDEWTQDRAKPVTQIVSAEAWGRADCGITSASYHQGVLSATILYEILLGKATLYAVLVSALVLMAMVKRKDSRGRAKRSGSGATNFSLLKQAGDVEENPGPSRGHMTEYKPTVRLATRDDVPRAVRTLAAAFADYPATRHTVDPDRHIERVTELQELFLTRVGLDIGKVWVADDGAAVAVWTTPESVEAGAVFAEIGPRMAELSGSRLAAQQQMEGLLAPHRPKEPAWFLATVGVSPDHQGKGLGSAVVLPGVEAAERAGVPAFLETSAPRNLPFYERLGFTVTADVEVPEGPRTWCMTRKPGA

SEQ ID NO: 20107 - protein, 852 aa, Artificial Sequence
  Synthetic Polypeptide
MALPVTALLLPLALLLHAARPDTVLTQSPALAVSPGERVTISCKASESVSTRMHWYRQKPGQQPKLLIYKTSNLASGVPARFSGSGSGTDFTLTIDPVEADDTATYFCQQSWNGPLTFGSGTKLEIKRLEDLKNVFPPEVAVFEPSKAEIAHTQKATLVCLATGFYPDHVELSWWVNGKEVHSGVCTDPQPLKEQPALNDSRYCLSSRLRVSATFWQNPRNHFRCQVQFYGLSENDEWTQDRAKPVTQIVSAEAWGRADCGITSASYHQGVLSATILYEILLGKATLYAVLVSALVLMAMVKRKDSRGRAKRSGSGATNFSLLKQAGDVEENPGPTSMDWIWRILFLVGAATGAHSFEQVQLKESGPGLVQPSQTLSLTCTVSGLSLTSNGVSWIRQPPGKGLEWLGVIWSNGGTDYNSAIKSRLSFSRDTSKSQVFLKMNSLQTEDTAMYFCARPRYNSGYFFDYWGQGVMVTVSSTRIQNPDPAVYQLRDSKSSDKSVCLFTDFDSQTNVSQSKDSDVYITDKCVLDMRSMDFKSNSAVAWSNKSDFACANAFNNSIIPEDTFFPSSDVPCDVKLVEKSFETDTNLNFQNLSVIGFRILLLKVAGFNLLMTLRLWSSRAKRSGSGVKQTLNFDLLKLAGDVESNPGPSRGHMTEYKPTVRLATRDDVPRAVRTLAAAFADYPATRHTVDPDRHIERVTELQELFLTRVGLDIGKVWVADDGAAVAVWTTPESVEAGAVFAEIGPRMAELSGSRLAAQQQMEGLLAPHRPKEPAWFLATVGVSPDHQGKGLGSAVVLPGVEAAERAGVPAFLETSAPRNLPFYERLGFTVTADVEVPEGPRTWCMTRKPGA

SEQ ID NO: 20108 - protein, 619 aa, Artificial Sequence
  Synthetic Polypeptide
MALPVTALLLPLALLLHAARPDTVLTQSPALAVSPGERVTISCKASESVSTRMHWYRQKPGQQPKLLIYKTSNLASGVPARFSGSGSGTDFTLTIDPVEADDTATYFCQQSWNGPLTFGSGTKLEIKRLEDLKNVFPPEVAVFEPSEAEISHTQKATLVCLATGFYPDHVELSWWVNGKEVHSGVCTDPQPLKEQPALNDSRYCLSSRLRVSATFWQNPRNHFRCQVQFYGLSENDEWTQDRAKPVTQIVSAEAWGRADCGFTSESYQQGVLSATILYEILLGKATLYAVLVSALVLMAMVKRKDSRGRAKRSGSGATNFSLLKQAGDVEENPGPTSMDWIWRILFLVGAATGAHSFEQVQLKESGPGLVQPSQTLSLTCTVSGLSLTSNGVSWIRQPPGKGLEWLGVIWSNGGTDYNSAIKSRLSFSRDTSKSQVFLKMNSLQTEDTAMYFCARPRYNSGYFFDYWGQGVMVTVSSTRIQNPDPAVYQLRDSKSSDKSVCLFTDFDSQTNVSQSKDSDVYITDKCVLDMRSMDFKSNSAVAWSNKSDFACANAFNNSIIPEDTFFPSPESSCDVKLVEKSFETDTNLNFQNLSVIGFRILLLKVAGFNLLMTLRLWSS

SEQ ID NO: 20109 - protein, 844 aa, Artificial Sequence
  Synthetic Polypeptide
MALPVTALLLPLALLLHAARPDTVLTQSPALAVSPGERVTISCKASESVSTRMHWYRQKPGQQPKLLIYKTSNLASGVPARFSGSGSGTDFTLTIDPVEADDTATYFCQQSWNGPLTFGSGTKLEIKRLEDLKNVFPPEVAVFEPSEAEISHTQKATLVCLATGFYPDHVELSWWVNGKEVHSGVCTDPQPLKEQPALNDSRYCLSSRLRVSATFWQNPRNHFRCQVQFYGLSENDEWTQDRAKPVTQIVSAEAWGRADCGFTSESYQQGVLSATILYEILLGKATLYAVLVSALVLMAMVKRKDSRGRAKRSGSGATNFSLLKQAGDVEENPGPTSMDWIWRILFLVGAATGAHSFEQVQLKESGPGLVQPSQTLSLTCTVSGLSLTSNGVSWIRQPPGKGLEWLGVIWSNGGTDYNSAIKSRLSFSRDTSKSQVFLKMNSLQTEDTAMYFCARPRYNSGYFFDYWGQGVMVTVSSTRIQNPDPAVYQLRDSKSSDKSVCLFTDFDSQTNVSQSKDSDVYITDKCVLDMRSMDFKSNSAVAWSNKSDFACANAFNNSIIPEDTFFPSPESSCDVKLVEKSFETDTNLNFQNLSVIGFRILLLKVAGFNLLMTLRLWSSRAKRSGSGVKQTLNFDLLKLAGDVESNPGPSRGGIHTMATYEVLCEVARKLGTDDREVVLFLLNVFIPQPTLAQLIGALRALKEEGRLTFPLLAECLFRAGRRDLLRDLLHLDPRFLERHLAGTMSYFSPYQLTVLHVDGELCARDIRSLIFLSKDTIGSRSTPQTFLHWVYCMENLDLLGPTDVDALMSMLRSLSRVDLQRQVQTLMGLHLSGPSHSQHYRHTP

SEQ ID NO: 20110 - protein, 623 aa, Artificial Sequence
  Synthetic Polypeptide
MALPVTALLLPLALLLHAARPDTVLTQSPALAVSPGERVTISCKASESVSTRMHWYRQKPGQQPKLLIYKTSNLASGVPARFSGSGSGTDFTLTIDPVEADDTATYFCQQSWNGPLTFGSGTKLEIKRLEIQNPDPAVYQLRDSKSSDKSVCLFTDFDSQTNVSQSKDSDVYITDKCVLDMRSMDFKSNSAVAWSNKSDFACANAFNNSIIPEDTFFPSPESSCDVKLVEKSFETDTNLNFQNLSVIGFRILLLKVAGFNLLMTLRLWSSRAKRSGSGVKQTLNFDLLKLAGDVESNPGPTSMDWIWRILFLVGAATGAHSFEQVQLKESGPGLVQPSQTLSLTCTVSGLSLTSNGVSWIRQPPGKGLEWLGVIWSNGGTDYNSAIKSRLSFSRDTSKSQVFLKMNSLQTEDTAMYFCARPRYNSGYFFDYWGQGVMVTVSSTREDLKNVFPPEVAVFEPSEAEISHTQKATLVCLATGFYPDHVELSWWVNGKEVHSGVCTDPQPLKEQPALNDSRYCLSSRLRVSATFWQNPRNHFRCQVQFYGLSENDEWTQDRAKPVTQIVSAEAWGRADCGFTSESYQQGVLSATILYEILLGKATLYAVLVSALVLMAMVKRKDSRG

SEQ ID NO: 20111 - protein, 845 aa, Artificial Sequence
  Synthetic Polypeptide
MALPVTALLLPLALLLHAARPDTVLTQSPALAVSPGERVTISCKASESVSTRMHWYRQKPGQQPKLLIYKTSNLASGVPARFSGSGSGTDFTLTIDPVEADDTATYFCQQSWNGPLTFGSGTKLEIKRLEIQNPDPAVYQLRDSKSSDKSVCLFTDFDSQTNVSQSKDSDVYITDKCVLDMRSMDFKSNSAVAWSNKSDFACANAFNNSIIPEDTFFPSPESSCDVKLVEKSFETDTNLNFQNLSVIGFRILLLKVAGFNLLMTLRLWSSRAKRSGSGVKQTLNFDLLKLAGDVESNPGPTSMDWIWRILFLVGAATGAHSFEQVQLKESGPGLVQPSQTLSLTCTVSGLSLTSNGVSWIRQPPGKGLEWLGVIWSNGGTDYNSAIKSRLSFSRDTSKSQVFLKMNSLQTEDTAMYFCARPRYNSGYFFDYWGQGVMVTVSSTREDLKNVFPPEVAVFEPSEAEISHTQKATLVCLATGFYPDHVELSWWVNGKEVHSGVCTDPQPLKEQPALNDSRYCLSSRLRVSATFWQNPRNHFRCQVQFYGLSENDEWTQDRAKPVTQIVSAEAWGRADCGFTSESYQQGVLSATILYEILLGKATLYAVLVSALVLMAMVKRKDSRGRAKRSGSGATNFSLLKQAGDVEENPGPSRGGIHTMATYEVLCEVARKLGTDDREVVLFLLNVFIPQPTLAQLIGALRALKEEGRLTFPLLAECLFRAGRRDLLRDLLHLDPRFLERHLAGTMSYFSPYQLTVLHVDGELCARDIRSLIFLSKDTIGSRSTPQTFLHWVYCMENLDLLGPTDVDALMSMLRSLSRVDLQRQVQTLMGLHLSGPSHSQHYRHTP

SEQ ID NO: 20112 - protein, 897 aa, Artificial Sequence
  Synthetic Polypeptide
MALPVTALLLPLALLLHAARPLEGKPIPNPLLGLDSTGSGEDLKNVFPPEVAVFEPSKAEIAHTQKATLVCLATGFYPDHVELSWWVNGKEVHSGVCTDPQPLKEQPALNDSRYCLSSRLRVSATFWQNPRNHFRCQVQFYGLSENDEWTQDRAKPVTQIVSAEAWGRADCGITSASYHQGVLSATILYEILLGKATLYAVLVSALVLMAMVKRKDSRGRAKRSGSGATNFSLLKQAGDVEENPGPTSMALPVTALLLPLALLLHAARPDTVLTQSPALAVSPGERVTISCKASESVSTRMHWYRQKPGQQPKLLIYKTSNLASGVPARFSGSGSGTDFTLTIDPVEADDTATYFCQQSWNGPLTFGSGTKLEIKRGGGGSGGGGSGGGGSQVQLKESGPGLVQPSQTLSLTCTVSGLSLTSNGVSWIRQPPGKGLEWLGVIWSNGGTDYNSAIKSRLSFSRDTSKSQVFLKMNSLQTEDTAMYFCARPRYNSGYFFDYWGQGVMVTVSSTREQKLISEEDGSGIQNPDPAVYQLRDSKSSDKSVCLFTDFDSQTNVSQSKDSDVYITDKCVLDMRSMDFKSNSAVAWSNKSDFACANAFNNSIIPEDTFFPSSDVPCDVKLVEKSFETDTNLNFQNLSVIGFRILLLKVAGFNLLMTLRLWSSRAKRSGSGVKQTLNFDLLKLAGDVESNPGPSRGHMTEYKPTVRLATRDDVPRAVRTLAAAFADYPATRHTVDPDRHIERVTELQELFLTRVGLDIGKVWVADDGAAVAVWTTPESVEAGAVFAEIGPRMAELSGSRLAAQQQMEGLLAPHRPKEPAWFLATVGVSPDHQGKGLGSAVVLPGVEAAERAGVPAFLETSAPRNLPFYERLGFTVTADVEVPEGPRTWCMTRKPGA

SEQ ID NO: 20113 - protein, 898 aa, Artificial Sequence
  Synthetic Polypeptide
MALPVTALLLPLALLLHAARPLEQKLISEEDLGSGDRPDPAVYQLRDSKSSDKSVCLFTDFDSQTNVSQSKDSDVYITDKCVLDMRSMDFKSNSAVAWSNKSDFACANAFNNSIIPEDTFFPSPESSCDVKLVEKSFETDTNLNFQNLSVIGFRILLLKVAGFNLLMTLRLWSSSSRAKRSGSGVKQTLNFDLLKLAGDVESNPGPTSMALPVTALLLPLALLLHAARPDTVLTQSPALAVSPGERVTISCKASESVSTRMHWYRQKPGQQPKLLIYKTSNLASGVPARFSGSGSGTDFTLTIDPVEADDTATYFCQQSWNGPLTFGSGTKLEIKRGGGGSGGGGSGGGGSQVQLKESGPGLVQPSQTLSLTCTVSGLSLTSNGVSWIRQPPGKGLEWLGVIWSNGGTDYNSAIKSRLSFSRDTSKSQVFLKMNSLQTEDTAMYFCARPRYNSGYFFDYWGQGVMVTVSSTRGKPIPNPLLGLDSTGSGEDLKNVFPPEVAVFEPSEAEISHTQKATLVCLATGFYPDHVELSWWVNGKEVHSGVCTDPQPLKEQPALNDSRYCLSSRLRVSATFWQNPRNHFRCQVQFYGLSENDEWTQDRAKPVTQIVSAEAWGRADCGFTSESYQQGVLSATILYEILLGKATLYAVLVSALVLMAMVKRKDSRGRAKRSGSGATNFSLLKQAGDVEENPGPSRGHMTEYKPTVRLATRDDVPRAVRTLAAAFADYPATRHTVDPDRHIERVTELQELFLTRVGLDIGKVWVADDGAAVAVWTTPESVEAGAVFAEIGPRMAELSGSRLAAQQQMEGLLAPHRPKEPAWFLATVGVSPDHQGKGLGSAVVLPGVEAAERAGVPAFLETSAPRNLPFYERLGFTVTADVEVPEGPRTWCMTRKPGA

SEQ ID NO: 20114 - protein, 852 aa, Artificial Sequence
  Synthetic Polypeptide
MALPVTALLLPLALLLHAARPDTVLTQSPALAVSPGERVTISCKASESVSTRMHWYRQKPGQQPKLLIYKTSNLASGVPARFSGSGSGTDFTLTIDPVEADDTATYFCQQSWNGPLTFGSGTKLEIKRLEDLKNVFPPEVAVFEPSEAEISHTQKATLVCLATGFYPDHVELSWWVNGKEVHSGVSTDPQPLKEQPALNDSRYCLSSRLRVSATFWQNPRNHFRCQVQFYGLSENDEWTQDRAKPVTQIVSAEAWGRADCGFTSESYQQGVLSATILYEILLGKATLYAVLVSALVLMAMVKRKDSRGRAKRSGSGATNFSLLKQAGDVEENPGPTSMDWIWRILFLVGAATGAHSFEQVQLKESGPGLVQPSQTLSLTCTVSGLSLTSNGVSWIRQPPGKGLEWLGVIWSNGGTDYNSAIKSRLSFSRDTSKSQVFLKMNSLQTEDTAMYFCARPRYNSGYFFDYWGQGVMVTVSSTRIQNPDPAVYQLRDSKSSDKSVCLFTDFDSQTNVSQSKDSDVYITDKTVLDMRSMDFKSNSAVAWSNKSDFACANAFNNSIIPEDTFFPSPESSCDVKLVEKSFETDTNLNFQNLSVIGFRILLLKVAGFNLLMTLRLWSSRAKRSGSGVKQTLNFDLLKLAGDVESNPGPSRGHMTEYKPTVRLATRDDVPRAVRTLAAAFADYPATRHTVDPDRHIERVTELQELFLTRVGLDIGKVWVADDGAAVAVWTTPESVEAGAVFAEIGPRMAELSGSRLAAQQQMEGLLAPHRPKEPAWFLATVGVSPDHQGKGLGSAVVLPGVEAAERAGVPAFLETSAPRNLPFYERLGFTVTADVEVPEGPRTWCMTRKPGA

SEQ ID NO: 20115 - protein, 934 aa, Artificial Sequence
  Synthetic Polypeptide
MALPVTALLLPLALLLHAARPDTVLTQSPALAVSPGERVTISCKASESVSTRMHWYRQKPGQQPKLLIYKTSNLASGVPARFSGSGSGTDFTLTIDPVEADDTATYFCQQSWNGPLTFGSGTKLEIKRLEDLKNVFPPEVAVFEPSEAEISHTQKATLVCLATGFYPDHVELSWWVNGKEVHSGVSTDPQPLKEQPALNDSRYCLSSRLRVSATFWQNPRNHFRCQVQFYGLSENDEWTQDRAKPVTQIVSAEAWGRADCGFTSESYQQGVLSATILYEILLGKATLYAVLVSALVLMAMVKRKDSRGRAKRSGSGATNFSLLKQAGDVEENPGPTSMDWIWRILFLVGAATGAHSFEQVQLKESGPGLVQPSQTLSLTCTVSGLSLTSNGVSWIRQPPGKGLEWLGVIWSNGGTDYNSAIKSRLSFSRDTSKSQVFLKMNSLQTEDTAMYFCARPRYNSGYFFDYWGQGVMVTVSSTREQKLISEEDGSGTPFPSLAPPIMLLVDGKQQMVVVCLVLDVAPPGLDSPIWFSAGNGSALDAFTYGPSPATDGTWTNLAHLSLPSEELASWEPLVCHTGPGAEGHSRSTQPMHLSGEASTARTCPQEPLRGTPGGALWLGVLRLLLFKLLLFDLLLTCSCLCDPAGPLPSPATTTRLRALGSHRLHPATETGGREATSSPRPQPRDRRWGDTPPGRKPGSPVRAKRSGSGVKQTLNFDLLKLAGDVESNPGPSRGHMTEYKPTVRLATRDDVPRAVRTLAAAFADYPATRHTVDPDRHIERVTELQELFLTRVGLDIGKVWVADDGAAVAVWTTPESVEAGAVFAEIGPRMAELSGSRLAAQQQMEGLLAPHRPKEPAWFLATVGVSPDHQGKGLGSAVVLPGVEAAERAGVPAFLETSAPRNLPFYERLGFTVTADVEVPEGPRTWCMTRKPGA

SEQ ID NO: 20116 - protein, 952 aa, Artificial Sequence
  Synthetic Polypeptide
MALPVTALLLPLALLLHAARPLEDLKNVFPPEVAVFEPSEAEISHTQKATLVCLATGFYPDHVELSWWVNGKEVHSGVSTDPQPLKEQPALNDSRYCLSSRLRVSATFWQNPRNHFRCQVQFYGLSENDEWTQDRAKPVTQIVSAEAWGRADCGFTSESYQQGVLSATILYEILLGKATLYAVLVSALVLMAMVKRKDSRGRAKRSGSGATNFSLLKQAGDVEENPGPTSMALPVTALLLPLALLLHAARPDTVLTQSPALAVSPGERVTISCKASESVSTRMHWYRQKPGQQPKLLIYKTSNLASGVPARFSGSGSGTDFTLTIDPVEADDTATYFCQQSWNGPLTFGSGTKLEIKRGGGGSGGGGSGGGGSQVQLKESGPGLVQPSQTLSLTCTVSGLSLTSNGVSWIRQPPGKGLEWLGVIWSNGGTDYNSAIKSRLSFSRDTSKSQVFLKMNSLQTEDTAMYFCARPRYNSGYFFDYWGQGVMVTVSSTREQKLISEEDLGSGTPFPSLAPPIMLLVDGKQQMVVVCLVLDVAPPGLDSPIWFSAGNGSALDAFTYGPSPATDGTWTNLAHLSLPSEELASWEPLVCHTGPGAEGHSRSTQPMHLSGEASTARTCPQEPLRGTPGGALWLGVLRLLLFKLLLFDLLLTCSCLCDPAGPLPSPATTTRLRALGSHRLHPATETGGREATSSPRPQPRDRRWGDTPPGRKPGSPVRAKRSGSGVKQTLNFDLLKLAGDVESNPGPSRSRGHMTEYKPTVRLATRDDVPRAVRTLAAAFADYPATRHTVDPDRHIERVTELQELFLTRVGLDIGKVWVADDGAAVAVWTTPESVEAGAVFAEIGPRMAELSGSRLAAQQQMEGLLAPHRPKEPAWFLATVGVSPDHQGKGLGSAVVLPGVEAAERAGVPAFLETSAPRNLPFYERLGFTVTADVEVPEGPRTWCMTRKPGA

SEQ ID NO: 20117 - protein, 889 aa, Artificial Sequence
  Synthetic Polypeptide
MALPVTALLLPLALLLHAARPDTVLTQSPALAVSPGERVTISCKASESVSTRMHWYRQKPGQQPKLLIYKTSNLASGVPARFSGSGSGTDFTLTIDPVEADDTATYFCQQSWNGPLTFGSGTKLEIKRLEGKPIPNPLLGLDSTGSGDKQLDADVSPKPTIFLPSIAETKLQKAGTYLCLLEKFFPDVIKIHWQEKKSNTILGSQEGNTMKTNDTYMKFSWLTVPEKSLDKEHRCIVRHENNKNGVDQEIIFPPIKTDVITMDPKDNCSKDANDTLLLQLTNTSAYYMYLLLLLKSVVYFAIITCCLLRRTAFCCNGEKSRAKRSGSGATNFSLLKQAGDVEENPGPTSMDWIWRILFLVGAATGAHSFEQVQLKESGPGLVQPSQTLSLTCTVSGLSLTSNGVSWIRQPPGKGLEWLGVIWSNGGTDYNSAIKSRLSFSRDTSKSQVFLKMNSLQTEDTAMYFCARPRYNSGYFFDYWGQGVMVTVSSTREQKLISEEDGSGSQPHTKPSVFVMKNGTNVACLVKEFYPKDIRINLVSSKKITEFDPAIVISPSGKYNAVKLGKYEDSNSVTCSVQHDNKTVHSTDFEVKTDSTDHVKPKETENTKQPSKSCHKPKAIVHTEKVNMMSLTVLGLRMLFAKTVAVNFLLTAKLFFLRAKRSGSGVKQTLNFDLLKLAGDVESNPGPSRGHMTEYKPTVRLATRDDVPRAVRTLAAAFADYPATRHTVDPDRHIERVTELQELFLTRVGLDIGKVWVADDGAAVAVWTTPESVEAGAVFAEIGPRMAELSGSRLAAQQQMEGLLAPHRPKEPAWFLATVGVSPDHQGKGLGSAVVLPGVEAAERAGVPAFLETSAPRNLPFYERLGFTVTADVEVPEGPRTWCMTRKPGA

SEQ ID NO: 20118 - protein, 627 aa, Artificial Sequence
  Synthetic Polypeptide
MALPVTALLLPLALLLHAARPDTVLTQSPALAVSPGERVTISCKASESVSTRMHWYRQKPGQQPKLLIYKTSNLASGVPARFSGSGSGTDFTLTIDPVEADDTATYFCQQSWNGPLTFGSGTKLEIKRLESQPHTKPSVFVMKNGTNVACLVKEFYPKDIRINLVSSKKITEFDPAIVISPSGKYNAVKLGKYEDSNSVTCSVQHDNKTVHSTDFEVKTDSTDHVKPKETENTKQPSKSCHKPKAIVHTEKVNMMSLTVLGLRMLFAKTVAVNFLLTAKLFFLRAKRSGSGATNFSLLKQAGDVEENPGPTSMDWIWRILFLVGAATGAHSFEQVQLKESGPGLVQPSQTLSLTCTVSGLSLTSNGVSWIRQPPGKGLEWLGVIWSNGGTDYNSAIKSRLSFSRDTSKSQVFLKMNSLQTEDTAMYFCARPRYNSGYFFDYWGQGVMVTVSSTRDKQLDADVSPKPTIFLPSIAETKLQKAGTYLCLLEKFFPDVIKIHWQEKKSNTILGSQEGNTMKTNDTYMKFSWLTVPEKSLDKEHRCIVRHENNKNGVDQEIIFPPIKTDVITMDPKDNCSKDANDTLLLQLTNTSAYYMYLLLLLKSVVYFAIITCCLLRRTAFCCNGEKS

SEQ ID NO: 20119 - protein, 904 aa, Artificial Sequence
  Synthetic Polypeptide
MALPVTALLLPLALLLHAARPLEGKPIPNPLLGLDSTGSGDKQLDADVSPKPTIFLPSIAETKLQKAGTYLCLLEKFFPDVIKIHWQEKKSNTILGSQEGNTMKTNDTYMKFSWLTVPEKSLDKEHRCIVRHENNKNGVDQEIIFPPIKTDVITMDPKDNCSKDANDTLLLQLTNTSAYYMYLLLLLKSVVYFAIITCCLLRRTAFCCNGEKSRAKRSGSGATNFSLLKQAGDVEENPGPTSMALPVTALLLPLALLLHAARPDTVLTQSPALAVSPGERVTISCKASESVSTRMHWYRQKPGQQPKLLIYKTSNLASGVPARFSGSGSGTDFTLTIDPVEADDTATYFCQQSWNGPLTFGSGTKLEIKRGGGGSGGGGSGGGGSQVQLKESGPGLVQPSQTLSLTCTVSGLSLTSNGVSWIRQPPGKGLEWLGVIWSNGGTDYNSAIKSRLSFSRDTSKSQVFLKMNSLQTEDTAMYFCARPRYNSGYFFDYWGQGVMVTVSSTREQKLISEEDGSGSQPHTKPSVFVMKNGTNVACLVKEFYPKDIRINLVSSKKITEFDPAIVISPSGKYNAVKLGKYEDSNSVTCSVQHDNKTVHSTDFEVKTDSTDHVKPKETENTKQPSKSCHKPKAIVHTEKVNMMSLTVLGLRMLFAKTVAVNFLLTAKLFFLRAKRSGSGVKQTLNFDLLKLAGDVESNPGPSRGHMTEYKPTVRLATRDDVPRAVRTLAAAFADYPATRHTVDPDRHIERVTELQELFLTRVGLDIGKVWVADDGAAVAVWTTPESVEAGAVFAEIGPRMAELSGSRLAAQQQMEGLLAPHRPKEPAWFLATVGVSPDHQGKGLGSAVVLPGVEAAERAGVPAFLETSAPRNLPFYERLGFTVTADVEVPEGPRTWCMTRKPGA

SEQ ID NO: 20120 - protein, 1029 aa, Artificial Sequence
  Synthetic Polypeptide
MALPVTALLLPLALLLHAARPDTVLTQSPALAVSPGERVTISCKASESVSTRMHWYRQKPGQQPKLLIYKTSNLASGVPARFSGSGSGTDFTLTIDPVEADDTATYFCQQSWNGPLTFGSGTKLEIKRGQPKANPTVTLFPPSSEELQANKATLVCLISDFYPGAVTVAWKADGSPVKAGVETTKPSKQSNNKYAASSYLSLTPEQWKSHRSYSCQVTHEGSTVEKTVAPTECSGSQSFGLLDPKLCYLLDGILFIYGVILTALFLRVKFSRSADAPAYQQGQNQLYNELNLGRREEYDVLDKRRGRDPEMGGKPQRRKNPQEGLYNELQKDKMAEAYSEIGMKGERRRGKGHDGLYQGLSTATKDTYDALHMQALPPRRAKRSGSGATNFSLLKQAGDVEENPGPTSMDWIWRILFLVGAATGAHSFEQVQLKESGPGLVQPSQTLSLTCTVSGLSLTSNGVSWIRQPPGKGLEWLGVIWSNGGTDYNSAIKSRLSFSRDTSKSQVFLKMNSLQTEDTAMYFCARPRYNSGYFFDYWGQGVMVTVSSASTKGPSVFPLAPSSKSTSGGTAALGCLVKDYFPEPVTVSWNSGALTSGVHTFPAVLQSSGLYSLSSVVTVPSSSLGTQTYICNVNHKPSNTKVDKRVEPKSCGTQSFGLLDPKLCYLLDGILFIYGVILTALFLRVKFSRSADAPAYQQGQNQLYNELNLGRREEYDVLDKRRGRDPEMGGKPQRRKNPQEGLYNELQKDKMAEAYSEIGMKGERRRGKGHDGLYQGLSTATKDTYDALHMQALPPRRAKRSGSGVKQTLNFDLLKLAGDVESNPGPSRGHMTEYKPTVRLATRDDVPRAVRTLAAAFADYPATRHTVDPDRHIERVTELQELFLTRVGLDIGKVWVADDGAAVAVWTTPESVEAGAVFAEIGPRMAELSGSRLAAQQQMEGLLAPHRPKEPAWFLATVGVSPDHQGKGLGSAVVLPGVEAAERAGVPAFLETSAPRNLPFYERLGFTVTADVEVPEGPRTWCMTRKPGA

SEQ ID NO: 20121 - protein, 815 aa, Artificial Sequence
  Synthetic Polypeptide
MALPVTALLLPLALLLHAARPDTVLTQSPALAVSPGERVTISCKASESVSTRMHWYRQKPGQQPKLLIYKTSNLASGVPARFSGSGSGTDFTLTIDPVEADDTATYFCQQSWNGPLTFGSGTKLEIKRLEDLKNVFPPEVAVFEPSEAEISHTQKATLVCLATGFYPDHVELSWWVNGKEVHSGVSTDPQPLKEQPALNDSRYCLSSRLRVSATFWQNPRNHFRCQVQFYGLSENDEWTQDRAKPVTQIVSAEAWGRADCGSQSFGLLDPKLCYLLDGILFIYGVILTALFLRVKFSRSADAPAYQQGQNQLYNELNLGRREEYDVLDKRRGRDPEMGGKPQRRKNPQEGLYNELQKDKMAEAYSEIGMKGERRRGKGHDGLYQGLSTATKDTYDALHMQALPPRRAKRSGSGATNFSLLKQAGDVEENPGPTSMDWIWRILFLVGAATGAHSFEQVQLKESGPGLVQPSQTLSLTCTVSGLSLTSNGVSWIRQPPGKGLEWLGVIWSNGGTDYNSAIKSRLSFSRDTSKSQVFLKMNSLQTEDTAMYFCARPRYNSGYFFDYWGQGVMVTVSSTRIQNPDPAVYQLRDSKSSDKSVCLFTDFDSQTNVSQSKDSDVYITDKTVLDMRSMDFKSNSAVAWSNKSDFACANAFNNSIIPEDTFFPSPESSCGTQSFGLLDPKLCYLLDGILFIYGVILTALFLRVKFSRSADAPAYQQGQNQLYNELNLGRREEYDVLDKRRGRDPEMGGKPQRRKNPQEGLYNELQKDKMAEAYSEIGMKGERRRGKGHDGLYQGLSTATKDTYDALHMQALPPR

SEQ ID NO: 20122 - protein, 815 aa, Artificial Sequence
  Synthetic Polypeptide
MALPVTALLLPLALLLHAARPDTVLTQSPALAVSPGERVTISCKASESVSTRMHWYRQKPGQQPKLLIYKTSNLASGVPARFSGSGSGTDFTLTIDPVEADDTATYFCQQSWNGPLTFGSGTKLEIKRLEDLKNVFPPEVAVFEPSKAEIAHTQKATLVCLATGFYPDHVELSWWVNGKEVHSGVCTDPQPLKEQPALNDSRYCLSSRLRVSATFWQNPRNHFRCQVQFYGLSENDEWTQDRAKPVTQIVSAEAWGRADCGSQSFGLLDPKLCYLLDGILFIYGVILTALFLRVKFSRSADAPAYQQGQNQLYNELNLGRREEYDVLDKRRGRDPEMGGKPQRRKNPQEGLYNELQKDKMAEAYSEIGMKGERRRGKGHDGLYQGLSTATKDTYDALHMQALPPRRAKRSGSGATNFSLLKQAGDVEENPGPTSMDWIWRILFLVGAATGAHSFEQVQLKESGPGLVQPSQTLSLTCTVSGLSLTSNGVSWIRQPPGKGLEWLGVIWSNGGTDYNSAIKSRLSFSRDTSKSQVFLKMNSLQTEDTAMYFCARPRYNSGYFFDYWGQGVMVTVSSTRIQNPDPAVYQLRDSKSSDKSVCLFTDFDSQTNVSQSKDSDVYITDKCVLDMRSMDFKSNSAVAWSNKSDFACANAFNNSIIPEDTFFPSSDVPCGTQSFGLLDPKLCYLLDGILFIYGVILTALFLRVKFSRSADAPAYQQGQNQLYNELNLGRREEYDVLDKRRGRDPEMGGKPQRRKNPQEGLYNELQKDKMAEAYSEIGMKGERRRGKGHDGLYQGLSTATKDTYDALHMQALPPR

SEQ ID NO: 20123 - protein, 886 aa, Artificial Sequence
  Synthetic Polypeptide
MALPVTALLLPLALLLHAARPDTVLTQSPALAVSPGERVTISCKASESVSTRMHWYRQKPGQQPKLLIYKTSNLASGVPARFSGSGSGTDFTLTIDPVEADDTATYFCQQSWNGPLTFGSGTKLEIKRLEGKPIPNPLLGLDSTGSGEDLKNVFPPEVAVFEPSEAEISHTQKATLVCLATGFYPDHVELSWWVNGKEVHSGVSTDPQPLKEQPALNDSRYCLSSRLRVSATFWQNPRNHFRCQVQFYGLSENDEWTQDRAKPVTQIVSAEAWGRADCGSQSFGLLDPKLCYLLDGILFIYGVILTALFLRVKFSRSADAPAYQQGQNQLYNELNLGRREEYDVLDKRRGRDPEMGGKPQRRKNPQEGLYNELQKDKMAEAYSEIGMKGERRRGKGHDGLYQGLSTATKDTYDALHMQALPPRRAKRSGSGATNFSLLKQAGDVEENPGPTSMDWIWRILFLVGAATGAHSFEQVQLKESGPGLVQPSQTLSLTCTVSGLSLTSNGVSWIRQPPGKGLEWLGVIWSNGGTDYNSAIKSRLSFSRDTSKSQVFLKMNSLQTEDTAMYFCARPRYNSGYFFDYWGQGVMVTVSSTREQKLISEEDGSGIQNPDPAVYQLRDSKSSDKSVCLFTDFDSQTNVSQSKDSDVYITDKTVLDMRSMDFKSNSAVAWSNKSDFACANAFNNSIIPEDTFFPSPESSCGTQSFGLLDPKLCYLLDGILFIYGVILTALFLRSKRSRLLHSDYMNMTPRRPGPTRKHYQPYAPPRDFAAYRSRVKFSRSADAPAYQQGQNQLYNELNLGRREEYDVLDKRRGRDPEMGGKPQRRKNPQEGLYNELQKDKMAEAYSEIGMKGERRRGKGHDGLYQGLSTATKDTYDALHMQALPPR

SEQ ID NO: 20124 - protein, 927 aa, Artificial Sequence
  Synthetic Polypeptide
MALPVTALLLPLALLLHAARPDTVLTQSPALAVSPGERVTISCKASESVSTRMHWYRQKPGQQPKLLIYKTSNLASGVPARFSGSGSGTDFTLTIDPVEADDTATYFCQQSWNGPLTFGSGTKLEIKRLEGKPIPNPLLGLDSTGSGEDLKNVFPPEVAVFEPSEAEISHTQKATLVCLATGFYPDHVELSWWVNGKEVHSGVSTDPQPLKEQPALNDSRYCLSSRLRVSATFWQNPRNHFRCQVQFYGLSENDEWTQDRAKPVTQIVSAEAWGRADCGSQSFGLLDPKLCYLLDGILFIYGVILTALFLRSKRSRLLHSDYMNMTPRRPGPTRKHYQPYAPPRDFAAYRSRVKFSRSADAPAYQQGQNQLYNELNLGRREEYDVLDKRRGRDPEMGGKPQRRKNPQEGLYNELQKDKMAEAYSEIGMKGERRRGKGHDGLYQGLSTATKDTYDALHMQALPPRRAKRSGSGATNFSLLKQAGDVEENPGPTSMDWIWRILFLVGAATGAHSFEQVQLKESGPGLVQPSQTLSLTCTVSGLSLTSNGVSWIRQPPGKGLEWLGVIWSNGGTDYNSAIKSRLSFSRDTSKSQVFLKMNSLQTEDTAMYFCARPRYNSGYFFDYWGQGVMVTVSSTREQKLISEEDGSGIQNPDPAVYQLRDSKSSDKSVCLFTDFDSQTNVSQSKDSDVYITDKTVLDMRSMDFKSNSAVAWSNKSDFACANAFNNSIIPEDTFFPSPESSCGTQSFGLLDPKLCYLLDGILFIYGVILTALFLRSKRSRLLHSDYMNMTPRRPGPTRKHYQPYAPPRDFAAYRSRVKFSRSADAPAYQQGQNQLYNELNLGRREEYDVLDKRRGRDPEMGGKPQRRKNPQEGLYNELQKDKMAEAYSEIGMKGERRRGKGHDGLYQGLSTATKDTYDALHMQALPPR

SEQ ID NO: 20125 - protein, 888 aa, Artificial Sequence
  Synthetic Polypeptide
MALPVTALLLPLALLLHAARPDTVLTQSPALAVSPGERVTISCKASESVSTRMHWYRQKPGQQPKLLIYKTSNLASGVPARFSGSGSGTDFTLTIDPVEADDTATYFCQQSWNGPLTFGSGTKLEIKRLEGKPIPNPLLGLDSTGSGEDLKNVFPPEVAVFEPSEAEISHTQKATLVCLATGFYPDHVELSWWVNGKEVHSGVSTDPQPLKEQPALNDSRYCLSSRLRVSATFWQNPRNHFRCQVQFYGLSENDEWTQDRAKPVTQIVSAEAWGRADCGSQSFGLLDPKLCYLLDGILFIYGVILTALFLRVKFSRSADAPAYQQGQNQLYNELNLGRREEYDVLDKRRGRDPEMGGKPQRRKNPQEGLYNELQKDKMAEAYSEIGMKGERRRGKGHDGLYQGLSTATKDTYDALHMQALPPRRAKRSGSGATNFSLLKQAGDVEENPGPTSMDWIWRILFLVGAATGAHSFEQVQLKESGPGLVQPSQTLSLTCTVSGLSLTSNGVSWIRQPPGKGLEWLGVIWSNGGTDYNSAIKSRLSFSRDTSKSQVFLKMNSLQTEDTAMYFCARPRYNSGYFFDYWGQGVMVTVSSTREQKLISEEDLGSGIQNPDPAVYQLRDSKSSDKSVCLFTDFDSQTNVSQSKDSDVYITDKTVLDMRSMDFKSNSAVAWSNKSDFACANAFNNSIIPEDTFFPSPESSCGTQSFGLLDPKLCYLLDGILFIYGVILTALFLKRGRKKLLYIFKQPFMRPVQTTQEEDGCSCRFPEEEEGGCELRVKFSRSADAPAYQQGQNQLYNELNLGRREEYDVLDKRRGRDPEMGGKPQRRKNPQEGLYNELQKDKMAEAYSEIGMKGERRRGKGHDGLYQGLSTATKDTYDALHMQALPPR

SEQ ID NO: 20126 - protein, 930 aa, Artificial Sequence
  Synthetic Polypeptide
MALPVTALLLPLALLLHAARPDTVLTQSPALAVSPGERVTISCKASESVSTRMHWYRQKPGQQPKLLIYKTSNLASGVPARFSGSGSGTDFTLTIDPVEADDTATYFCQQSWNGPLTFGSGTKLEIKRLEGKPIPNPLLGLDSTGSGEDLKNVFPPEVAVFEPSEAEISHTQKATLVCLATGFYPDHVELSWWVNGKEVHSGVSTDPQPLKEQPALNDSRYCLSSRLRVSATFWQNPRNHFRCQVQFYGLSENDEWTQDRAKPVTQIVSAEAWGRADCGSQSFGLLDPKLCYLLDGILFIYGVILTALFLKRGRKKLLYIFKQPFMRPVQTTQEEDGCSCRFPEEEEGGCELRVKFSRSADAPAYQQGQNQLYNELNLGRREEYDVLDKRRGRDPEMGGKPQRRKNPQEGLYNELQKDKMAEAYSEIGMKGERRRGKGHDGLYQGLSTATKDTYDALHMQALPPRRAKRSGSGATNFSLLKQAGDVEENPGPTSMDWIWRILFLVGAATGAHSFEQVQLKESGPGLVQPSQTLSLTCTVSGLSLTSNGVSWIRQPPGKGLEWLGVIWSNGGTDYNSAIKSRLSFSRDTSKSQVFLKMNSLQTEDTAMYFCARPRYNSGYFFDYWGQGVMVTVSSTREQKLISEEDLGSGIQNPDPAVYQLRDSKSSDKSVCLFTDFDSQTNVSQSKDSDVYITDKTVLDMRSMDFKSNSAVAWSNKSDFACANAFNNSIIPEDTFFPSPESSCGTQSFGLLDPKLCYLLDGILFIYGVILTALFLKRGRKKLLYIFKQPFMRPVQTTQEEDGCSCRFPEEEEGGCELRVKFSRSADAPAYQQGQNQLYNELNLGRREEYDVLDKRRGRDPEMGGKPQRRKNPQEGLYNELQKDKMAEAYSEIGMKGERRRGKGHDGLYQGLSTATKDTYDALHMQALPPR

SEQ ID NO: 20127 - protein, 820 aa, Artificial Sequence
  Synthetic Polypeptide
MALPVTALLLPLALLLHAARPDTVLTQSPALAVSPGERVTISCKASESVSTRMHWYRQKPGQQPKLLIYKTSNLASGVPARFSGSGSGTDFTLTIDPVEADDTATYFCQQSWNGPLTFGSGTKLEIKRLEQSFGLLDPKLCYLLDGILFIYGVILTALFLRVKFSRSADAPAYQQGQNQLYNELNLGRREEYDVLDKRRGRDPEMGGKPQRRKNPQEGLYNELQKDKMAEAYSEIGMKGERRRGKGHDGLYQGLSTATKDTYDALHMQALPPRRAKRSGSGATNFSLLKQAGDVEENPGPTSMDWIWRILFLVGAATGAHSFEQVQLKESGPGLVQPSQTLSLTCTVSGLSLTSNGVSWIRQPPGKGLEWLGVIWSNGGTDYNSAIKSRLSFSRDTSKSQVFLKMNSLQTEDTAMYFCARPRYNSGYFFDYWGQGVMVTVSSTRQSFGLLDPKLCYLLDGILFIYGVILTALFLRVKFSRSADAPAYQQGQNQLYNELNLGRREEYDVLDKRRGRDPEMGGKPQRRKNPQEGLYNELQKDKMAEAYSEIGMKGERRRGKGHDGLYQGLSTATKDTYDALHMQALPPRRAKRSGSGVKQTLNFDLLKLAGDVESNPGPSRGHMTEYKPTVRLATRDDVPRAVRTLAAAFADYPATRHTVDPDRHIERVTELQELFLTRVGLDIGKVWVADDGAAVAVWTTPESVEAGAVFAEIGPRMAELSGSRLAAQQQMEGLLAPHRPKEPAWFLATVGVSPDHQGKGLGSAVVLPGVEAAERAGVPAFLETSAPRNLPFYERLGFTVTADVEVPEGPRTWCMTRKPGA

SEQ ID NO: 20128 - protein, 645 aa, Artificial Sequence
  Synthetic Polypeptide
MALPVTALLLPLALLLHAARPDTVLTQSPALAVSPGERVTISCKASESVSTRMHWYRQKPGQQPKLLIYKTSNLASGVPARFSGSGSGTDFTLTIDPVEADDTATYFCQQSWNGPLTFGSGTKLEIKRLEGQPKANPTVTLFPPSSEELQANKATLVCLISDFYPGAVTVAWKADGSPVKAGVETTKPSKQSNNKYAASSYLSLTPEQWKSHRSYSCQVTHEGSTVEKTVAPTECSPIKTDVITMDPKDNCSKDANDTLLLQLTNTSAYYMYLLLLLKSVVYFAIITCCLLRRTAFCCNGEKSRAKRSGSGATNFSLLKQAGDVEENPGPTSMDWIWRILFLVGAATGAHSFEQVQLKESGPGLVQPSQTLSLTCTVSGLSLTSNGVSWIRQPPGKGLEWLGVIWSNGGTDYNSAIKSRLSFSRDTSKSQVFLKMNSLQTEDTAMYFCARPRYNSGYFFDYWGQGVMVTVSSTRASTKGPSVFPLAPSSKSTSGGTAALGCLVKDYFPEPVTVSWNSGALTSGVHTFPAVLQSSGLYSLSSVVTVPSSSLGTQTYICNVNHKPSNTKVDKRVEPKSCEVKTDSTDHVKPKETENTKQPSKSCHKPKAIVHTEKVNMMSLTVLGLRMLFAKTVAVNFLLTAKLFFL

SEQ ID NO: 20129 - protein, 623 aa, Artificial Sequence
  Synthetic Polypeptide
MALPVTALLLPLALLLHAARPDTVLTQSPALAVSPGERVTISCKASESVSTRMHWYRQKPGQQPKLLIYKTSNLASGVPARFSGSGSGTDFTLTIDPVEADDTATYFCQQSWNGPLTFGSGTKLEIKRLEGQPKANPTVTLFPPSSEELQANKATLVCLISDFYPGAVTVAWKADGSPVKAGVETTKPSKQSNNKYAASSYLSLTPEQWKSHRSYSCQVTHEGSTVEKTVAPTECSGRADCGITSASYHQGVLSATILYEILLGKATLYAVLVSALVLMAMVKRKDSRGRAKRSGSGATNFSLLKQAGDVEENPGPTSMDWIWRILFLVGAATGAHSFEQVQLKESGPGLVQPSQTLSLTCTVSGLSLTSNGVSWIRQPPGKGLEWLGVIWSNGGTDYNSAIKSRLSFSRDTSKSQVFLKMNSLQTEDTAMYFCARPRYNSGYFFDYWGQGVMVTVSSTRASTKGPSVFPLAPSSKSTSGGTAALGCLVKDYFPEPVTVSWNSGALTSGVHTFPAVLQSSGLYSLSSVVTVPSSSLGTQTYICNVNHKPSNTKVDKRVEPKSCIPEDTFFPSSDVPCDVKLVEKSFETDTNLNFQNLSVIGFRILLLKVAGFNLLMTLRLWSS

SEQ ID NO: 20130 - protein, 623 aa, Artificial Sequence
  Synthetic Polypeptide
MALPVTALLLPLALLLHAARPDTVLTQSPALAVSPGERVTISCKASESVSTRMHWYRQKPGQQPKLLIYKTSNLASGVPARFSGSGSGTDFTLTIDPVEADDTATYFCQQSWNGPLTFGSGTKLEIKRLEGQPKANPTVTLFPPSSEELQANKATLVCLISDFYPGAVTVAWKADGSPVKAGVETTKPSKQSNNKYAASSYLSLTPEQWKSHRSYSCQVTHEGSTVEKTVAPTECSGRADCGFTSESYQQGVLSATILYEILLGKATLYAVLVSALVLMAMVKRKDSRGRAKRSGSGATNFSLLKQAGDVEENPGPTSMDWIWRILFLVGAATGAHSFEQVQLKESGPGLVQPSQTLSLTCTVSGLSLTSNGVSWIRQPPGKGLEWLGVIWSNGGTDYNSAIKSRLSFSRDTSKSQVFLKMNSLQTEDTAMYFCARPRYNSGYFFDYWGQGVMVTVSSTRASTKGPSVFPLAPSSKSTSGGTAALGCLVKDYFPEPVTVSWNSGALTSGVHTFPAVLQSSGLYSLSSVVTVPSSSLGTQTYICNVNHKPSNTKVDKRVEPKSCIPEDTFFPSPESSCDVKLVEKSFETDTNLNFQNLSVIGFRILLLKVAGFNLLMTLRLWSS

SEQ ID NO: 20131 - protein, 449 aa, Artificial Sequence
  Synthetic Polypeptide
MALPVTALLLPLALLLHAARPDTVLTQSPALAVSPGERVTISCKASESVSTRMHWYRQKPGQQPKLLIYKTSNLASGVPARFSGSGSGTDFTLTIDPVEADDTATYFCQQSWNGPLTFGSGTKLEIKRGGGGSGGGGSGGGGSQVQLKESGPGLVQPSQTLSLTCTVSGLSLTSNGVSWIRQPPGKGLEWLGVIWSNGGTDYNSAIKSRLSFSRDTSKSQVFLKMNSLQTEDTAMYFCARPRYNSGYFFDYWGQGVMVTVSSTRDGNEEMGGITQTPYKVSISGTTVILTCPQYPGSEILWQHNDKNIGGDEDDKNIGSDEDHLSLKEFSELEQSGYYVCYPRGSKPEDANFYLYLRARVCENCMEMDVMSVATIVIVDICITGGLLLLVYYWSKNRKAKAKPVTRGAGAGGRQRGQNKERPPPVPNPDYEPIRKGQRDLYSGLNQRRI

SEQ ID NO: 20132 - protein, 414 aa, Artificial Sequence
  Synthetic Polypeptide
MALPVTALLLPLALLLHAARPDTVLTQSPALAVSPGERVTISCKASESVSTRMHWYRQKPGQQPKLLIYKTSNLASGVPARFSGSGSGTDFTLTIDPVEADDTATYFCQQSWNGPLTFGSGTKLEIKRGGGGSGGGGSGGGGSQVQLKESGPGLVQPSQTLSLTCTVSGLSLTSNGVSWIRQPPGKGLEWLGVIWSNGGTDYNSAIKSRLSFSRDTSKSQVFLKMNSLQTEDTAMYFCARPRYNSGYFFDYWGQGVMVTVSSTRFKIPIEELEDRVFVNCNTSITWVEGTVGTLLSDITRLDLGKRILDPRGIYRCNGTDIYKDKESTVQVHYRMCQSCVELDPATVAGIIVTDVIATLLLALGVFCFAGHETGRLSGAADTQALLRNDQVYQPLRDRDDAQYSHLGGNWARNK

SEQ ID NO: 20133 - protein, 424 aa, Artificial Sequence
  Synthetic Polypeptide
MALPVTALLLPLALLLHAARPDTVLTQSPALAVSPGERVTISCKASESVSTRMHWYRQKPGQQPKLLIYKTSNLASGVPARFSGSGSGTDFTLTIDPVEADDTATYFCQQSWNGPLTFGSGTKLEIKRGGGGSGGGGSGGGGSQVQLKESGPGLVQPSQTLSLTCTVSGLSLTSNGVSWIRQPPGKGLEWLGVIWSNGGTDYNSAIKSRLSFSRDTSKSQVFLKMNSLQTEDTAMYFCARPRYNSGYFFDYWGQGVMVTVSSTRQSIKGNHLVKVYDYQEDGSVLLTCDAEAKNITWFKDGKMIGFLTEDKKKWNLGSNAKDPRGMYQCKGSQNKSKPLQVYYRMCQNCIELNAATISGFLFAEIVSIFVLAVGVYFIAGQDGVRQSRASDKQTLLPNDQLYQPLKDREDDQYSHLQGNQLRRN

SEQ ID NO: 20134 - protein, 407 aa, Artificial Sequence
  Synthetic Polypeptide
MALPVTALLLPLALLLHAARPDTVLTQSPALAVSPGERVTISCKASESVSTRMHWYRQKPGQQPKLLIYKTSNLASGVPARFSGSGSGTDFTLTIDPVEADDTATYFCQQSWNGPLTFGSGTKLEIKRGGGGSGGGGSGGGGSQVQLKESGPGLVQPSQTLSLTCTVSGLSLTSNGVSWIRQPPGKGLEWLGVIWSNGGTDYNSAIKSRLSFSRDTSKSQVFLKMNSLQTEDTAMYFCARPRYNSGYFFDYWGQGVMVTVSSTRQSFGLLDPKLCYLLDGILFIYGVILTALFLRVKFSRSADAPAYQQGQNQLYNELNLGRREEYDVLDKRRGRDPEMGGKPQRRKNPQEGLYNELQKDKMAEAYSEIGMKGERRRGKGHDGLYQGLSTATKDTYDALHMQALPPR

SEQ ID NO: 20135 - protein, 449 aa, Artificial Sequence
  Synthetic Polypeptide
MALPVTALLLPLALLLHAARPQVQLKESGPGLVQPSQTLSLTCTVSGLSLTSNGVSWIRQPPGKGLEWLGVIWSNGGTDYNSAIKSRLSFSRDTSKSQVFLKMNSLQTEDTAMYFCARPRYNSGYFFDYWGQGVMVTVSSGGGGSGGGGSGGGGSDTVLTQSPALAVSPGERVTISCKASESVSTRMHWYRQKPGQQPKLLIYKTSNLASGVPARFSGSGSGTDFTLTIDPVEADDTATYFCQQSWNGPLTFGSGTKLEIKRTRDGNEEMGGITQTPYKVSISGTTVILTCPQYPGSEILWQHNDKNIGGDEDDKNIGSDEDHLSLKEFSELEQSGYYVCYPRGSKPEDANFYLYLRARVCENCMEMDVMSVATIVIVDICITGGLLLLVYYWSKNRKAKAKPVTRGAGAGGRQRGQNKERPPPVPNPDYEPIRKGQRDLYSGLNQRRI

SEQ ID NO: 20136 - protein, 414 aa, Artificial Sequence
  Synthetic Polypeptide
MALPVTALLLPLALLLHAARPQVQLKESGPGLVQPSQTLSLTCTVSGLSLTSNGVSWIRQPPGKGLEWLGVIWSNGGTDYNSAIKSRLSFSRDTSKSQVFLKMNSLQTEDTAMYFCARPRYNSGYFFDYWGQGVMVTVSSGGGGSGGGGSGGGGSDTVLTQSPALAVSPGERVTISCKASESVSTRMHWYRQKPGQQPKLLIYKTSNLASGVPARFSGSGSGTDFTLTIDPVEADDTATYFCQQSWNGPLTFGSGTKLEIKRTRFKIPIEELEDRVFVNCNTSITWVEGTVGTLLSDITRLDLGKRILDPRGIYRCNGTDIYKDKESTVQVHYRMCQSCVELDPATVAGIIVTDVIATLLLALGVFCFAGHETGRLSGAADTQALLRNDQVYQPLRDRDDAQYSHLGGNWARNK

SEQ ID NO: 20137 - protein, 424 aa, Artificial Sequence
  Synthetic Polypeptide
MALPVTALLLPLALLLHAARPQVQLKESGPGLVQPSQTLSLTCTVSGLSLTSNGVSWIRQPPGKGLEWLGVIWSNGGTDYNSAIKSRLSFSRDTSKSQVFLKMNSLQTEDTAMYFCARPRYNSGYFFDYWGQGVMVTVSSGGGGSGGGGSGGGGSDTVLTQSPALAVSPGERVTISCKASESVSTRMHWYRQKPGQQPKLLIYKTSNLASGVPARFSGSGSGTDFTLTIDPVEADDTATYFCQQSWNGPLTFGSGTKLEIKRTRQSIKGNHLVKVYDYQEDGSVLLTCDAEAKNITWFKDGKMIGFLTEDKKKWNLGSNAKDPRGMYQCKGSQNKSKPLQVYYRMCQNCIELNAATISGFLFAEIVSIFVLAVGVYFIAGQDGVRQSRASDKQTLLPNDQLYQPLKDREDDQYSHLQGNQLRRN

SEQ ID NO: 20138 - protein, 407 aa, Artificial Sequence
  Synthetic Polypeptide
MALPVTALLLPLALLLHAARPQVQLKESGPGLVQPSQTLSLTCTVSGLSLTSNGVSWIRQPPGKGLEWLGVIWSNGGTDYNSAIKSRLSFSRDTSKSQVFLKMNSLQTEDTAMYFCARPRYNSGYFFDYWGQGVMVTVSSGGGGSGGGGSGGGGSDTVLTQSPALAVSPGERVTISCKASESVSTRMHWYRQKPGQQPKLLIYKTSNLASGVPARFSGSGSGTDFTLTIDPVEADDTATYFCQQSWNGPLTFGSGTKLEIKRTRQSFGLLDPKLCYLLDGILFIYGVILTALFLRVKFSRSADAPAYQQGQNQLYNELNLGRREEYDVLDKRRGRDPEMGGKPQRRKNPQEGLYNELQKDKMAEAYSEIGMKGERRRGKGHDGLYQGLSTATKDTYDALHMQALPPR

SEQ ID NO: 20139 - protein, 640 aa, Artificial Sequence
  Synthetic Polypeptide
MALPVTALLLPLALLLHAARPDTVLTQSPALAVSPGERVTISCKASESVSTRMHWYRQKPGQQPKLLIYKTSNLASGVPARFSGSGSGTDFTLTIDPVEADDTATYFCQQSWNGPLTFGSGTKLEIKRGGGGSGGGGSGGGGSQVQLKESGPGLVQPSQTLSLTCTVSGLSLTSNGVSWIRQPPGKGLEWLGVIWSNGGTDYNSAIKSRLSFSRDTSKSQVFLKMNSLQTEDTAMYFCARPRYNSGYFFDYWGQGVMVTVSSTRGSGIQNPDPAVYQLRDSKSSDKSVCLFTDFDSQTNVSQSKDSDVYITDKTVLDMRSMDFKSNSAVAWSNKSDFACANAFNNSIIPEDTFFPSPESSCDVKLVEKSFETDTNLNFQNLSVIGFRILLLKVAGFNLLMTLRLWSSRAKRSGSGVKQTLNFDLLKLAGDVESNPGPSRGHMTEYKPTVRLATRDDVPRAVRTLAAAFADYPATRHTVDPDRHIERVTELQELFLTRVGLDIGKVWVADDGAAVAVWTTPESVEAGAVFAEIGPRMAELSGSRLAAQQQMEGLLAPHRPKEPAWFLATVGVSPDHQGKGLGSAVVLPGVEAAERAGVPAFLETSAPRNLPFYERLGFTVTADVEVPEGPRTWCMTRKPGA

SEQ ID NO: 20140 - protein, 672 aa, Artificial Sequence
  Synthetic Polypeptide
MALPVTALLLPLALLLHAARPDTVLTQSPALAVSPGERVTISCKASESVSTRMHWYRQKPGQQPKLLIYKTSNLASGVPARFSGSGSGTDFTLTIDPVEADDTATYFCQQSWNGPLTFGSGTKLEIKRGGGGSGGGGSGGGGSQVQLKESGPGLVQPSQTLSLTCTVSGLSLTSNGVSWIRQPPGKGLEWLGVIWSNGGTDYNSAIKSRLSFSRDTSKSQVFLKMNSLQTEDTAMYFCARPRYNSGYFFDYWGQGVMVTVSSLEDLKNVFPPEVAVFEPSEAEISHTQKATLVCLATGFYPDHVELSWWVNGKEVHSGVSTDPQPLKEQPALNDSRYCLSSRLRVSATFWQNPRNHFRCQVQFYGLSENDEWTQDRAKPVTQIVSAEAWGRADCGFTSESYQQGVLSATILYEILLGKATLYAVLVSALVLMAMVKRKDSRGRAKRSGSGATNFSLLKQAGDVEENPGPTRGHMTEYKPTVRLATRDDVPRAVRTLAAAFADYPATRHTVDPDRHIERVTELQELFLTRVGLDIGKVWVADDGAAVAVWTTPESVEAGAVFAEIGPRMAELSGSRLAAQQQMEGLLAPHRPKEPAWFLATVGVSPDHQGKGLGSAVVLPGVEAAERAGVPAFLETSAPRNLPFYERLGFTVTADVEVPEGPRTWCMTRKPGA

SEQ ID NO: 20141 - protein, 722 aa, Artificial Sequence
  Synthetic Polypeptide
MALPVTALLLPLALLLHAARPDTVLTQSPALAVSPGERVTISCKASESVSTRMHWYRQKPGQQPKLLIYKTSNLASGVPARFSGSGSGTDFTLTIDPVEADDTATYFCQQSWNGPLTFGSGTKLEIKRGGGGSGGGGSGGGGSQVQLKESGPGLVQPSQTLSLTCTVSGLSLTSNGVSWIRQPPGKGLEWLGVIWSNGGTDYNSAIKSRLSFSRDTSKSQVFLKMNSLQTEDTAMYFCARPRYNSGYFFDYWGQGVMVTVSSTREQKLISEEDLGSGTPFPSLAPPIMLLVDGKQQMVVVCLVLDVAPPGLDSPIWFSAGNGSALDAFTYGPSPATDGTWTNLAHLSLPSEELASWEPLVCHTGPGAEGHSRSTQPMHLSGEASTARTCPQEPLRGTPGGALWLGVLRLLLFKLLLFDLLLTCSCLCDPAGPLPSPATTTRLRALGSHRLHPATETGGREATSSPRPQPRDRRWGDTPPGRKPGSPVRAKRSGSGVKQTLNFDLLKLAGDVESNPGPSRSRGHMTEYKPTVRLATRDDVPRAVRTLAAAFADYPATRHTVDPDRHIERVTELQELFLTRVGLDIGKVWVADDGAAVAVWTTPESVEAGAVFAEIGPRMAELSGSRLAAQQQMEGLLAPHRPKEPAWFLATVGVSPDHQGKGLGSAVVLPGVEAAERAGVPAFLETSAPRNLPFYERLGFTVTADVEVPEGPRTWCMTRKPGA

SEQ ID NO: 20142 - protein, 538 aa, Artificial Sequence
  Synthetic Polypeptide
MALPVTALLLPLALLLHAARPDTVLTQSPALAVSPGERVTISCKASESVSTRMHWYRQKPGQQPKLLIYKTSNLASGVPARFSGSGSGTDFTLTIDPVEADDTATYFCQQSWNGPLTFGSGTKLEIKRLEDLKNVFPPEVAVFEPSEAEISHTQKATLVCLATGFYPDHVELSWWVNGKEVHSGVSTDPQPLKEQPALNDSRYCLSSRLRVSATFWQNPRNHFRCQVQFYGLSENDEWTQDRAKPVTQIVSAEAWGRADCGFTSESYQQGVLSATILYEILLGKATLYAVLVSALVLMAMVKRKDSRGRAKRSGSGATNFSLLKQAGDVEENPGPTRGHMTEYKPTVRLATRDDVPRAVRTLAAAFADYPATRHTVDPDRHIERVTELQELFLTRVGLDIGKVWVADDGAAVAVWTTPESVEAGAVFAEIGPRMAELSGSRLAAQQQMEGLLAPHRPKEPAWFLATVGVSPDHQGKGLGSAVVLPGVEAAERAGVPAFLETSAPRNLPFYERLGFTVTADVEVPEGPRTWCMTRKPGA

SEQ ID NO: 20143 - protein, 308 aa, Artificial Sequence
  Synthetic Polypeptide
MALPVTALLLPLALLLHAARPDTVLTQSPALAVSPGERVTISCKASESVSTRMHWYRQKPGQQPKLLIYKTSNLASGVPARFSGSGSGTDFTLTIDPVEADDTATYFCQQSWNGPLTFGSGTKLEIKRLEDLKNVFPPEVAVFEPSEAEISHTQKATLVCLATGFYPDHVELSWWVNGKEVHSGVSTDPQPLKEQPALNDSRYCLSSRLRVSATFWQNPRNHFRCQVQFYGLSENDEWTQDRAKPVTQIVSAEAWGRADCGFTSESYQQGVLSATILYEILLGKATLYAVLVSALVLMAMVKRKDSRG

SEQ ID NO: 20144 - protein, 448 aa, Artificial Sequence
  Synthetic Polypeptide
MDWIWRILFLVGAATGAHSFEQVQLKESGPGLVQPSQTLSLTCTVSGLSLTSNGVSWIRQPPGKGLEWLGVIWSNGGTDYNSAIKSRLSFSRDTSKSQVFLKMNSLQTEDTAMYFCARPRYNSGYFFDYWGQGVMVTVSSTRIQNPDPAVYQLRDSKSSDKSVCLFTDFDSQTNVSQSKDSDVYITDKTVLDMRSMDFKSNSAVAWSNKSDFACANAFNNSIIPEDTFFPSPESSCDVKLVEKSFETDTNLNFQNLSVIGFRILLLKVAGFNLLMTLRLWSSRAKRSGSGVKQTLNFDLLKLAGDVESNPGPSRGHMAKPLSQEESTLIERATATINSIPISEDYSVASAALSSDGRIFTGVNVYHFTGGPCAELVVLGTAAAAAAGNLTCIVAIGNENRGILSPCGRCRQVLLDLHPGIKAIVKDSDGQPTAVGIRELLPSGYVWEG

SEQ ID NO: 20145 - protein, 282 aa, Artificial Sequence
  Synthetic Polypeptide
MDWIWRILFLVGAATGAHSFEQVQLKESGPGLVQPSQTLSLTCTVSGLSLTSNGVSWIRQPPGKGLEWLGVIWSNGGTDYNSAIKSRLSFSRDTSKSQVFLKMNSLQTEDTAMYFCARPRYNSGYFFDYWGQGVMVTVSSTRIQNPDPAVYQLRDSKSSDKSVCLFTDFDSQTNVSQSKDSDVYITDKTVLDMRSMDFKSNSAVAWSNKSDFACANAFNNSIIPEDTFFPSPESSCDVKLVEKSFETDTNLNFQNLSVIGFRILLLKVAGFNLLMTLRLWSS

SEQ ID NO: 20146 - protein, 556 aa, Artificial Sequence
  Synthetic Polypeptide
MALPVTALLLPLALLLHAARPDTVLTQSPALAVSPGERVTISCKASESVSTRMHWYRQKPGQQPKLLIYKTSNLASGVPARFSGSGSGTDFTLTIDPVEADDTATYFCQQSWNGPLTFGSGTKLEIKRLEGKPIPNPLLGLDSTGSGEDLKNVFPPEVAVFEPSEAEISHTQKATLVCLATGFYPDHVELSWWVNGKEVHSGVCTDPQPLKEQPALNDSRYCLSSRLRVSATFWQNPRNHFRCQVQFYGLSENDEWTQDRAKPVTQIVSAEAWGRADCGFTSESYQQGVLSATILYEILLGKATLYAVLVSALVLMAMVKRKDSRGRAKRSGSGATNFSLLKQAGDVEENPGPTRGHMTEYKPTVRLATRDDVPRAVRTLAAAFADYPATRHTVDPDRHIERVTELQELFLTRVGLDIGKVWVADDGAAVAVWTTPESVEAGAVFAEIGPRMAELSGSRLAAQQQMEGLLAPHRPKEPAWFLATVGVSPDHQGKGLGSAVVLPGVEAAERAGVPAFLETSAPRNLPFYERLGFTVTADVEVPEGPRTWCMTRKPGA

SEQ ID NO: 20147 - protein, 326 aa, Artificial Sequence
  Synthetic Polypeptide
MALPVTALLLPLALLLHAARPDTVLTQSPALAVSPGERVTISCKASESVSTRMHWYRQKPGQQPKLLIYKTSNLASGVPARFSGSGSGTDFTLTIDPVEADDTATYFCQQSWNGPLTFGSGTKLEIKRLEGKPIPNPLLGLDSTGSGEDLKNVFPPEVAVFEPSEAEISHTQKATLVCLATGFYPDHVELSWWVNGKEVHSGVCTDPQPLKEQPALNDSRYCLSSRLRVSATFWQNPRNHFRCQVQFYGLSENDEWTQDRAKPVTQIVSAEAWGRADCGFTSESYQQGVLSATILYEILLGKATLYAVLVSALVLMAMVKRKDSRG

SEQ ID NO: 20148 - protein, 460 aa, Artificial Sequence
  Synthetic Polypeptide
MDWIWRILFLVGAATGAHSFEQVQLKESGPGLVQPSQTLSLTCTVSGLSLTSNGVSWIRQPPGKGLEWLGVIWSNGGTDYNSAIKSRLSFSRDTSKSQVFLKMNSLQTEDTAMYFCARPRYNSGYFFDYWGQGVMVTVSSTREQKLISEEDGSGIQNPDPAVYQLRDSKSSDKSVCLFTDFDSQTNVSQSKDSDVYITDKCVLDMRSMDFKSNSAVAWSNKSDFACANAFNNSIIPEDTFFPSPESSCDVKLVEKSFETDTNLNFQNLSVIGFRILLLKVAGFNLLMTLRLWSSRAKRSGSGVKQTLNFDLLKLAGDVESNPGPSRGHMAKPLSQEESTLIERATATINSIPISEDYSVASAALSSDGRIFTGVNVYHFTGGPCAELVVLGTAAAAAAGNLTCIVAIGNENRGILSPCGRCRQVLLDLHPGIKAIVKDSDGQPTAVGIRELLPSGYVWEG

SEQ ID NO: 20149 - protein, 294 aa, Artificial Sequence
  Synthetic Polypeptide
MDWIWRILFLVGAATGAHSFEQVQLKESGPGLVQPSQTLSLTCTVSGLSLTSNGVSWIRQPPGKGLEWLGVIWSNGGTDYNSAIKSRLSFSRDTSKSQVFLKMNSLQTEDTAMYFCARPRYNSGYFFDYWGQGVMVTVSSTREQKLISEEDGSGIQNPDPAVYQLRDSKSSDKSVCLFTDFDSQTNVSQSKDSDVYITDKCVLDMRSMDFKSNSAVAWSNKSDFACANAFNNSIIPEDTFFPSPESSCDVKLVEKSFETDTNLNFQNLSVIGFRILLLKVAGFNLLMTLRLWSS

SEQ ID NO: 20150 - protein, 640 aa, Artificial Sequence
  Synthetic Polypeptide
MALPVTALLLPLALLLHAARPDTVLTQSPALAVSPGERVTISCKASESVSTRMHWYRQKPGQQPKLLIYKTSNLASGVPARFSGSGSGTDFTLTIDPVEADDTATYFCQQSWNGPLTFGSGTKLEIKRGGGGSGGGGSGGGGSQVQLKESGPGLVQPSQTLSLTCTVSGLSLTSNGVSWIRQPPGKGLEWLGVIWSNGGTDYNSAIKSRLSFSRDTSKSQVFLKMNSLQTEDTAMYFCARPRYNSGYFFDYWGQGVMVTVSSTRGSGIQNPDPAVYQLRDSKSSDKSVCLFTDFDSQTNVSQSKDSDVYITDKTVLDMRSMDFKSNSAVAWSNKSDFACANAFNNSIIPEDTFFPSSDVPCDVKLVEKSFETDTNLNFQNLSVIGFRILLLKVAGFNLLMTLRLWSSRAKRSGSGVKQTLNFDLLKLAGDVESNPGPSRGHMTEYKPTVRLATRDDVPRAVRTLAAAFADYPATRHTVDPDRHIERVTELQELFLTRVGLDIGKVWVADDGAAVAVWTTPESVEAGAVFAEIGPRMAELSGSRLAAQQQMEGLLAPHRPKEPAWFLATVGVSPDHQGKGLGSAVVLPGVEAAERAGVPAFLETSAPRNLPFYERLGFTVTADVEVPEGPRTWCMTRKPGA

SEQ ID NO: 20151 - protein, 672 aa, Artificial Sequence
  Synthetic Polypeptide
MALPVTALLLPLALLLHAARPDTVLTQSPALAVSPGERVTISCKASESVSTRMHWYRQKPGQQPKLLIYKTSNLASGVPARFSGSGSGTDFTLTIDPVEADDTATYFCQQSWNGPLTFGSGTKLEIKRGGGGSGGGGSGGGGSQVQLKESGPGLVQPSQTLSLTCTVSGLSLTSNGVSWIRQPPGKGLEWLGVIWSNGGTDYNSAIKSRLSFSRDTSKSQVFLKMNSLQTEDTAMYFCARPRYNSGYFFDYWGQGVMVTVSSLEDLKNVFPPEVAVFEPSKAEIAHTQKATLVCLATGFYPDHVELSWWVNGKEVHSGVSTDPQPLKEQPALNDSRYCLSSRLRVSATFWQNPRNHFRCQVQFYGLSENDEWTQDRAKPVTQIVSAEAWGRADCGITSASYHQGVLSATILYEILLGKATLYAVLVSALVLMAMVKRKDSRGRAKRSGSGATNFSLLKQAGDVEENPGPTRGHMTEYKPTVRLATRDDVPRAVRTLAAAFADYPATRHTVDPDRHIERVTELQELFLTRVGLDIGKVWVADDGAAVAVWTTPESVEAGAVFAEIGPRMAELSGSRLAAQQQMEGLLAPHRPKEPAWFLATVGVSPDHQGKGLGSAVVLPGVEAAERAGVPAFLETSAPRNLPFYERLGFTVTADVEVPEGPRTWCMTRKPGA

SEQ ID NO: 20152 - protein, 695 aa, Artificial Sequence
  Synthetic Polypeptide
MALPVTALLLPLALLLHAARPDTVLTQSPALAVSPGERVTISCKASESVSTRMHWYRQKPGQQPKLLIYKTSNLASGVPARFSGSGSGTDFTLTIDPVEADDTATYFCQQSWNGPLTFGSGTKLEIKRGGGGSGGGGSGGGGSQVQLKESGPGLVQPSQTLSLTCTVSGLSLTSNGVSWIRQPPGKGLEWLGVIWSNGGTDYNSAIKSRLSFSRDTSKSQVFLKMNSLQTEDTAMYFCARPRYNSGYFFDYWGQGVMVTVSSTRGSGGGGSGGGGSGDGNEEMGGITQTPYKVSISGTTVILTCPQYPGSEILWQHNDKNIGGDEDDKNIGSDEDHLSLKEFSELEQSGYYVCYPRGSKPEDANFYLYLRARVCENCMEMDVMSVATIVIVDICITGGLLLLVYYWSKNRKAKAKPVTRGAGAGGRQRGQNKERPPPVPNPDYEPIRKGQRDLYSGLNQRRIRAKRSGSGVKQTLNFDLLKLAGDVESNPGPSRGHMTEYKPTVRLATRDDVPRAVRTLAAAFADYPATRHTVDPDRHIERVTELQELFLTRVGLDIGKVWVADDGAAVAVWTTPESVEAGAVFAEIGPRMAELSGSRLAAQQQMEGLLAPHRPKEPAWFLATVGVSPDHQGKGLGSAVVLPGVEAAERAGVPAFLETSAPRNLPFYERLGFTVTADVEVPEGPRTWCMTRKPGA

SEQ ID NO: 20153 - protein, 660 aa, Artificial Sequence
  Synthetic Polypeptide
MALPVTALLLPLALLLHAARPDTVLTQSPALAVSPGERVTISCKASESVSTRMHWYRQKPGQQPKLLIYKTSNLASGVPARFSGSGSGTDFTLTIDPVEADDTATYFCQQSWNGPLTFGSGTKLEIKRGGGGSGGGGSGGGGSQVQLKESGPGLVQPSQTLSLTCTVSGLSLTSNGVSWIRQPPGKGLEWLGVIWSNGGTDYNSAIKSRLSFSRDTSKSQVFLKMNSLQTEDTAMYFCARPRYNSGYFFDYWGQGVMVTVSSTRGSGGGGSGGGGSGFKIPIEELEDRVFVNCNTSITWVEGTVGTLLSDITRLDLGKRILDPRGIYRCNGTDIYKDKESTVQVHYRMCQSCVELDPATVAGIIVTDVIATLLLALGVFCFAGHETGRLSGAADTQALLRNDQVYQPLRDRDDAQYSHLGGNWARNKRAKRSGSGVKQTLNFDLLKLAGDVESNPGPSRGHMTEYKPTVRLATRDDVPRAVRTLAAAFADYPATRHTVDPDRHIERVTELQELFLTRVGLDIGKVWVADDGAAVAVWTTPESVEAGAVFAEIGPRMAELSGSRLAAQQQMEGLLAPHRPKEPAWFLATVGVSPDHQGKGLGSAVVLPGVEAAERAGVPAFLETSAPRNLPFYERLGFTVTADVEVPEGPRTWCMTRKPGA

SEQ ID NO: 20154 - protein, 670 aa, Artificial Sequence
  Synthetic Polypeptide
MALPVTALLLPLALLLHAARPDTVLTQSPALAVSPGERVTISCKASESVSTRMHWYRQKPGQQPKLLIYKTSNLASGVPARFSGSGSGTDFTLTIDPVEADDTATYFCQQSWNGPLTFGSGTKLEIKRGGGGSGGGGSGGGGSQVQLKESGPGLVQPSQTLSLTCTVSGLSLTSNGVSWIRQPPGKGLEWLGVIWSNGGTDYNSAIKSRLSFSRDTSKSQVFLKMNSLQTEDTAMYFCARPRYNSGYFFDYWGQGVMVTVSSTRGSGGGGSGGGGSGQSIKGNHLVKVYDYQEDGSVLLTCDAEAKNITWFKDGKMIGFLTEDKKKWNLGSNAKDPRGMYQCKGSQNKSKPLQVYYRMCQNCIELNAATISGFLFAEIVSIFVLAVGVYFIAGQDGVRQSRASDKQTLLPNDQLYQPLKDREDDQYSHLQGNQLRRNRAKRSGSGVKQTLNFDLLKLAGDVESNPGPSRGHMTEYKPTVRLATRDDVPRAVRTLAAAFADYPATRHTVDPDRHIERVTELQELFLTRVGLDIGKVWVADDGAAVAVWTTPESVEAGAVFAEIGPRMAELSGSRLAAQQQMEGLLAPHRPKEPAWFLATVGVSPDHQGKGLGSAVVLPGVEAAERAGVPAFLETSAPRNLPFYERLGFTVTADVEVPEGPRTWCMTRKPGA

SEQ ID NO: 20155 - protein, 653 aa, Artificial Sequence
  Synthetic Polypeptide
MALPVTALLLPLALLLHAARPDTVLTQSPALAVSPGERVTISCKASESVSTRMHWYRQKPGQQPKLLIYKTSNLASGVPARFSGSGSGTDFTLTIDPVEADDTATYFCQQSWNGPLTFGSGTKLEIKRGGGGSGGGGSGGGGSQVQLKESGPGLVQPSQTLSLTCTVSGLSLTSNGVSWIRQPPGKGLEWLGVIWSNGGTDYNSAIKSRLSFSRDTSKSQVFLKMNSLQTEDTAMYFCARPRYNSGYFFDYWGQGVMVTVSSTRGSGGGGSGGGGSGQSFGLLDPKLCYLLDGILFIYGVILTALFLRVKFSRSADAPAYQQGQNQLYNELNLGRREEYDVLDKRRGRDPEMGGKPQRRKNPQEGLYNELQKDKMAEAYSEIGMKGERRRGKGHDGLYQGLSTATKDTYDALHMQALPPRRAKRSGSGVKQTLNFDLLKLAGDVESNPGPSRGHMTEYKPTVRLATRDDVPRAVRTLAAAFADYPATRHTVDPDRHIERVTELQELFLTRVGLDIGKVWVADDGAAVAVWTTPESVEAGAVFAEIGPRMAELSGSRLAAQQQMEGLLAPHRPKEPAWFLATVGVSPDHQGKGLGSAVVLPGVEAAERAGVPAFLETSAPRNLPFYERLGFTVTADVEVPEGPRTWCMTRKPGA

SEQ ID NO: 20156 - protein, 754 aa, Artificial Sequence
  Synthetic Polypeptide
MALPVTALLLPLALLLHAARPEVQLVESGGGLVQPGGSLRLSCAASGFSFSDFWMSWVRQAPGKGLEWVATISQAGSEKDYVDSVKGRFTISRDNAKKSLYLQMNSLRAEDTAVYYCASGVYSFDYRGQGTLVTVSSGTGGGGSGGGGSGGGGSEFDTVLTQSPALAVSPGERVTISCKASESVSTRMHWYRQKPGQQPKLLIYKTSNLASGVPARFSGSGSGTDFTLTIDPVEADDTATYFCQQSWNGPLTFGSGTKLEIKRLEDLKNVFPPEVAVFEPSEAEISHTQKATLVCLATGFYPDHVELSWWVNGKEVHSGVCTDPQPLKEQPALNDSRYCLSSRLRVSATFWQNPRNHFRCQVQFYGLSENDEWTQDRAKPVTQIVSAEAWGRADCGFTSESYQQGVLSATILYEILLGKATLYAVLVSALVLMAMVKRKDSRGRAKRSGSGATNFSLLKQAGDVEENPGPTSMDWIWRILFLVGAATGAHSFEQVQLKESGPGLVQPSQTLSLTCTVSGLSLTSNGVSWIRQPPGKGLEWLGVIWSNGGTDYNSAIKSRLSFSRDTSKSQVFLKMNSLQTEDTAMYFCARPRYNSGYFFDYWGQGVMVTVSSTRIQNPDPAVYQLRDSKSSDKSVCLFTDFDSQTNVSQSKDSDVYITDKCVLDMRSMDFKSNSAVAWSNKSDFACANAFNNSIIPEDTFFPSPESSCDVKLVEKSFETDTNLNFQNLSVIGFRILLLKVAGFNLLMTLRLWSS

SEQ ID NO: 20157 - protein, 758 aa, Artificial Sequence
  Synthetic Polypeptide
MALPVTALLLPLALLLHAARPEVQLVESGGGLVQPGGSLRLSCAASGFSFSDFWMSWVRQAPGKGLEWVATISQAGSEKDYVDSVKGRFTISRDNAKKSLYLQMNSLRAEDTAVYYCASGVYSFDYRGQGTLVTVSSGTGGGGSGGGGSGGGGSEFDTVLTQSPALAVSPGERVTISCKASESVSTRMHWYRQKPGQQPKLLIYKTSNLASGVPARFSGSGSGTDFTLTIDPVEADDTATYFCQQSWNGPLTFGSGTKLEIKRLEIQNPDPAVYQLRDSKSSDKSVCLFTDFDSQTNVSQSKDSDVYITDKCVLDMRSMDFKSNSAVAWSNKSDFACANAFNNSIIPEDTFFPSPESSCDVKLVEKSFETDTNLNFQNLSVIGFRILLLKVAGFNLLMTLRLWSSRAKRSGSGVKQTLNFDLLKLAGDVESNPGPTSMDWIWRILFLVGAATGAHSFEQVQLKESGPGLVQPSQTLSLTCTVSGLSLTSNGVSWIRQPPGKGLEWLGVIWSNGGTDYNSAIKSRLSFSRDTSKSQVFLKMNSLQTEDTAMYFCARPRYNSGYFFDYWGQGVMVTVSSTREDLKNVFPPEVAVFEPSEAEISHTQKATLVCLATGFYPDHVELSWWVNGKEVHSGVCTDPQPLKEQPALNDSRYCLSSRLRVSATFWQNPRNHFRCQVQFYGLSENDEWTQDRAKPVTQIVSAEAWGRADCGFTSESYQQGVLSATILYEILLGKATLYAVLVSALVLMAMVKRKDSRG

SEQ ID NO: 20158 - protein, 950 aa, Artificial Sequence
  Synthetic Polypeptide
MALPVTALLLPLALLLHAARPEVQLVESGGGLVQPGGSLRLSCAASGFSFSDFWMSWVRQAPGKGLEWVATISQAGSEKDYVDSVKGRFTISRDNAKKSLYLQMNSLRAEDTAVYYCASGVYSFDYRGQGTLVTVSSGTGGGGSGGGGSGGGGSEFDTVLTQSPALAVSPGERVTISCKASESVSTRMHWYRQKPGQQPKLLIYKTSNLASGVPARFSGSGSGTDFTLTIDPVEADDTATYFCQQSWNGPLTFGSGTKLEIKRLEDLKNVFPPEVAVFEPSEAEISHTQKATLVCLATGFYPDHVELSWWVNGKEVHSGVSTDPQPLKEQPALNDSRYCLSSRLRVSATFWQNPRNHFRCQVQFYGLSENDEWTQDRAKPVTQIVSAEAWGRADCGSQSFGLLDPKLCYLLDGILFIYGVILTALFLRVKFSRSADAPAYQQGQNQLYNELNLGRREEYDVLDKRRGRDPEMGGKPQRRKNPQEGLYNELQKDKMAEAYSEIGMKGERRRGKGHDGLYQGLSTATKDTYDALHMQALPPRRAKRSGSGATNFSLLKQAGDVEENPGPTSMDWIWRILFLVGAATGAHSFEQVQLKESGPGLVQPSQTLSLTCTVSGLSLTSNGVSWIRQPPGKGLEWLGVIWSNGGTDYNSAIKSRLSFSRDTSKSQVFLKMNSLQTEDTAMYFCARPRYNSGYFFDYWGQGVMVTVSSTRIQNPDPAVYQLRDSKSSDKSVCLFTDFDSQTNVSQSKDSDVYITDKTVLDMRSMDFKSNSAVAWSNKSDFACANAFNNSIIPEDTFFPSPESSCGTQSFGLLDPKLCYLLDGILFIYGVILTALFLRVKFSRSADAPAYQQGQNQLYNELNLGRREEYDVLDKRRGRDPEMGGKPQRRKNPQEGLYNELQKDKMAEAYSEIGMKGERRRGKGHDGLYQGLSTATKDTYDALHMQALPPR

SEQ ID NO: 20159 - protein, 780 aa, Artificial Sequence
  Synthetic Polypeptide
MALPVTALLLPLALLLHAARPEVQLVESGGGLVQPGGSLRLSCAASGFSFSDFWMSWVRQAPGKGLEWVATISQAGSEKDYVDSVKGRFTISRDNAKKSLYLQMNSLRAEDTAVYYCASGVYSFDYRGQGTLVTVSSGTGGGGSGGGGSGGGGSEFDTVLTQSPALAVSPGERVTISCKASESVSTRMHWYRQKPGQQPKLLIYKTSNLASGVPARFSGSGSGTDFTLTIDPVEADDTATYFCQQSWNGPLTFGSGTKLEIKRLEGQPKANPTVTLFPPSSEELQANKATLVCLISDFYPGAVTVAWKADGSPVKAGVETTKPSKQSNNKYAASSYLSLTPEQWKSHRSYSCQVTHEGSTVEKTVAPTECSPIKTDVITMDPKDNCSKDANDTLLLQLTNTSAYYMYLLLLLKSVVYFAIITCCLLRRTAFCCNGEKSRAKRSGSGATNFSLLKQAGDVEENPGPTSMDWIWRILFLVGAATGAHSFEQVQLKESGPGLVQPSQTLSLTCTVSGLSLTSNGVSWIRQPPGKGLEWLGVIWSNGGTDYNSAIKSRLSFSRDTSKSQVFLKMNSLQTEDTAMYFCARPRYNSGYFFDYWGQGVMVTVSSTRASTKGPSVFPLAPSSKSTSGGTAALGCLVKDYFPEPVTVSWNSGALTSGVHTFPAVLQSSGLYSLSSVVTVPSSSLGTQTYICNVNHKPSNTKVDKRVEPKSCEVKTDSTDHVKPKETENTKQPSKSCHKPKAIVHTEKVNMMSLTVLGLRMLFAKTVAVNFLLTAKLFFL

SEQ ID NO: 20160 - protein, 761 aa, Artificial Sequence
  Synthetic Polypeptide
MALPVTALLLPLALLLHAARPEVQLVESGGGLVQPGGSLRLSCAASGFSFSDFWMSWVRQAPGKGLEWVATISQAGSEKDYVDSVKGRFTISRDNAKKSLYLQMNSLRAEDTAVYYCASGVYSFDYRGQGTLVTVSSGTGGGGSGGGGSGGGGSEFDTVLTQSPALAVSPGERVTISCKASESVSTRMHWYRQKPGQQPKLLIYKTSNLASGVPARFSGSGSGTDFTLTIDPVEADDTATYFCQQSWNGPLTFGSGTKLEIKRLEGQPKANPTVTLFPPSSEELQANKATLVCLISDFYPGAVTVAWKADGSPVKAGVETTKPSKQSNNKYAASSYLSLTPEQWKSHRSYSCQVTHEGSTVEKTVAPTECSGRADCGFTSESYQQGVLSATILYEILLGKATLYAVLVSALVLMAMVKRKDSRGRAKRSGSGVKQTLNFDLLKLAGDVESNPGPTSMDWIWRILFLVGAATGAHSFEQVQLKESGPGLVQPSQTLSLTCTVSGLSLTSNGVSWIRQPPGKGLEWLGVIWSNGGTDYNSAIKSRLSFSRDTSKSQVFLKMNSLQTEDTAMYFCARPRYNSGYFFDYWGQGVMVTVSSTRASTKGPSVFPLAPSSKSTSGGTAALGCLVKDYFPEPVTVSWNSGALTSGVHTFPAVLQSSGLYSLSSVVTVPSSSLGTQTYICNVNHKPSNTKVDKRVEPKSCIPEDTFFPSPESSCDVKLVEKSFETDTNLNFQNLSVIGFRILLLKVAGFNLLMTLRLWSS

SEQ ID NO: 20161 - protein, 895 aa, Artificial Sequence
  Synthetic Polypeptide
MALPVTALLLPLALLLHAARPEVQLVESGGGLVQPGGSLRLSCAASGFSFSDFWMSWVRQAPGKGLEWVATISQAGSEKDYVDSVKGRFTISRDNAKKSLYLQMNSLRAEDTAVYYCASGVYSFDYRGQGTLVTVSSGTGGGGSGGGGSGGGGSEFDTVLTQSPALAVSPGERVTISCKASESVSTRMHWYRQKPGQQPKLLIYKTSNLASGVPARFSGSGSGTDFTLTIDPVEADDTATYFCQQSWNGPLTFGSGTKLEIKRLEIQNPDPAVYQLRDSKSSDKSVCLFTDFDSQTNVSQSKDSDVYITDKCVLDMRSMDFKSNSAVAWSNKSDFACANAFNNSIIPEDTFFPSPESSCDVKLVEKSFETDTNLNFQNLSVIGFRILLLKVAGFNLLMTLRLWSSRAKRSGSGVKQTLNFDLLKLAGDVESNPGPTSMDWIWRILFLVGAATGAHSGPQLQLQESGPGLVKPSETLSLTCTVSGDSISSGDYYWGWIRQPPGKGLEWIGHIYYSGVTYYNPSLKSRVTISVDTSRNQFSLKLSSVTAADTAVYYCTREDSSNWRSRGQGTLVTVSSGSGGGGSGGGGSGGGGSFEQVQLKESGPGLVQPSQTLSLTCTVSGLSLTSNGVSWIRQPPGKGLEWLGVIWSNGGTDYNSAIKSRLSFSRDTSKSQVFLKMNSLQTEDTAMYFCARPRYNSGYFFDYWGQGVMVTVSSTREDLKNVFPPEVAVFEPSEAEISHTQKATLVCLATGFYPDHVELSWWVNGKEVHSGVCTDPQPLKEQPALNDSRYCLSSRLRVSATFWQNPRNHFRCQVQFYGLSENDEWTQDRAKPVTQIVSAEAWGRADCGFTSESYQQGVLSATILYEILLGKATLYAVLVSALVLMAMVKRKDSRG

SEQ ID NO: 20162 - protein, 1087 aa, Artificial Sequence
  Synthetic Polypeptide
MALPVTALLLPLALLLHAARPEVQLVESGGGLVQPGGSLRLSCAASGFSFSDFWMSWVRQAPGKGLEWVATISQAGSEKDYVDSVKGRFTISRDNAKKSLYLQMNSLRAEDTAVYYCASGVYSFDYRGQGTLVTVSSGTGGGGSGGGGSGGGGSEFDTVLTQSPALAVSPGERVTISCKASESVSTRMHWYRQKPGQQPKLLIYKTSNLASGVPARFSGSGSGTDFTLTIDPVEADDTATYFCQQSWNGPLTFGSGTKLEIKRLEDLKNVFPPEVAVFEPSEAEISHTQKATLVCLATGFYPDHVELSWWVNGKEVHSGVSTDPQPLKEQPALNDSRYCLSSRLRVSATFWQNPRNHFRCQVQFYGLSENDEWTQDRAKPVTQIVSAEAWGRADCGSQSFGLLDPKLCYLLDGILFIYGVILTALFLRVKFSRSADAPAYQQGQNQLYNELNLGRREEYDVLDKRRGRDPEMGGKPQRRKNPQEGLYNELQKDKMAEAYSEIGMKGERRRGKGHDGLYQGLSTATKDTYDALHMQALPPRRAKRSGSGATNFSLLKQAGDVEENPGPTSMDWIWRILFLVGAATGAHSGPQLQLQESGPGLVKPSETLSLTCTVSGDSISSGDYYWGWIRQPPGKGLEWIGHIYYSGVTYYNPSLKSRVTISVDTSRNQFSLKLSSVTAADTAVYYCTREDSSNWRSRGQGTLVTVSSGSGGGGSGGGGSGGGGSFEQVQLKESGPGLVQPSQTLSLTCTVSGLSLTSNGVSWIRQPPGKGLEWLGVIWSNGGTDYNSAIKSRLSFSRDTSKSQVFLKMNSLQTEDTAMYFCARPRYNSGYFFDYWGQGVMVTVSSTRIQNPDPAVYQLRDSKSSDKSVCLFTDFDSQTNVSQSKDSDVYITDKTVLDMRSMDFKSNSAVAWSNKSDFACANAFNNSIIPEDTFFPSPESSCGTQSFGLLDPKLCYLLDGILFIYGVILTALFLRVKFSRSADAPAYQQGQNQLYNELNLGRREEYDVLDKRRGRDPEMGGKPQRRKNPQEGLYNELQKDKMAEAYSEIGMKGERRRGKGHDGLYQGLSTATKDTYDALHMQALPPR

SEQ ID NO: 20163 - protein, 917 aa, Artificial Sequence
  Synthetic Polypeptide
MALPVTALLLPLALLLHAARPEVQLVESGGGLVQPGGSLRLSCAASGFSFSDFWMSWVRQAPGKGLEWVATISQAGSEKDYVDSVKGRFTISRDNAKKSLYLQMNSLRAEDTAVYYCASGVYSFDYRGQGTLVTVSSGTGGGGSGGGGSGGGGSEFDTVLTQSPALAVSPGERVTISCKASESVSTRMHWYRQKPGQQPKLLIYKTSNLASGVPARFSGSGSGTDFTLTIDPVEADDTATYFCQQSWNGPLTFGSGTKLEIKRLEGQPKANPTVTLFPPSSEELQANKATLVCLISDFYPGAVTVAWKADGSPVKAGVETTKPSKQSNNKYAASSYLSLTPEQWKSHRSYSCQVTHEGSTVEKTVAPTECSPIKTDVITMDPKDNCSKDANDTLLLQLTNTSAYYMYLLLLLKSVVYFAIITCCLLRRTAFCCNGEKSRAKRSGSGATNFSLLKQAGDVEENPGPTSMDWIWRILFLVGAATGAHSGPQLQLQESGPGLVKPSETLSLTCTVSGDSISSGDYYWGWIRQPPGKGLEWIGHIYYSGVTYYNPSLKSRVTISVDTSRNQFSLKLSSVTAADTAVYYCTREDSSNWRSRGQGTLVTVSSGSGGGGSGGGGSGGGGSFEQVQLKESGPGLVQPSQTLSLTCTVSGLSLTSNGVSWIRQPPGKGLEWLGVIWSNGGTDYNSAIKSRLSFSRDTSKSQVFLKMNSLQTEDTAMYFCARPRYNSGYFFDYWGQGVMVTVSSTRASTKGPSVFPLAPSSKSTSGGTAALGCLVKDYFPEPVTVSWNSGALTSGVHTFPAVLQSSGLYSLSSVVTVPSSSLGTQTYICNVNHKPSNTKVDKRVEPKSCEVKTDSTDHVKPKETENTKQPSKSCHKPKAIVHTEKVNMMSLTVLGLRMLFAKTVAVNFLLTAKLFFL

SEQ ID NO: 20164 - protein, 898 aa, Artificial Sequence
  Synthetic Polypeptide
MALPVTALLLPLALLLHAARPEVQLVESGGGLVQPGGSLRLSCAASGFSFSDFWMSWVRQAPGKGLEWVATISQAGSEKDYVDSVKGRFTISRDNAKKSLYLQMNSLRAEDTAVYYCASGVYSFDYRGQGTLVTVSSGTGGGGSGGGGSGGGGSEFDTVLTQSPALAVSPGERVTISCKASESVSTRMHWYRQKPGQQPKLLIYKTSNLASGVPARFSGSGSGTDFTLTIDPVEADDTATYFCQQSWNGPLTFGSGTKLEIKRLEGQPKANPTVTLFPPSSEELQANKATLVCLISDFYPGAVTVAWKADGSPVKAGVETTKPSKQSNNKYAASSYLSLTPEQWKSHRSYSCQVTHEGSTVEKTVAPTECSGRADCGFTSESYQQGVLSATILYEILLGKATLYAVLVSALVLMAMVKRKDSRGRAKRSGSGVKQTLNFDLLKLAGDVESNPGPTSMDWIWRILFLVGAATGAHSGPQLQLQESGPGLVKPSETLSLTCTVSGDSISSGDYYWGWIRQPPGKGLEWIGHIYYSGVTYYNPSLKSRVTISVDTSRNQFSLKLSSVTAADTAVYYCTREDSSNWRSRGQGTLVTVSSGSGGGGSGGGGSGGGGSFEQVQLKESGPGLVQPSQTLSLTCTVSGLSLTSNGVSWIRQPPGKGLEWLGVIWSNGGTDYNSAIKSRLSFSRDTSKSQVFLKMNSLQTEDTAMYFCARPRYNSGYFFDYWGQGVMVTVSSTRASTKGPSVFPLAPSSKSTSGGTAALGCLVKDYFPEPVTVSWNSGALTSGVHTFPAVLQSSGLYSLSSVVTVPSSSLGTQTYICNVNHKPSNTKVDKRVEPKSCIPEDTFFPSPESSCDVKLVEKSFETDTNLNFQNLSVIGFRILLLKVAGFNLLMTLRLWSS

SEQ ID NO: 20165 - protein, 755 aa, Artificial Sequence
  Synthetic Polypeptide
MALPVTALLLPLALLLHAARPEVQVLESGGGLVQPGGSLRLSCAASGFTFSNFAMSWVRQAPGKGLEWVSTISGSAGTTDYADSVKGRFTISRDNSKKTLYLQMNSLRVEDTAVYYCADGRGPFFDYRGQGTLVTVSSGTGGGGSGGGGSGGGGSEFDTVLTQSPALAVSPGERVTISCKASESVSTRMHWYRQKPGQQPKLLIYKTSNLASGVPARFSGSGSGTDFTLTIDPVEADDTATYFCQQSWNGPLTFGSGTKLEIKRLEDLKNVFPPEVAVFEPSEAEISHTQKATLVCLATGFYPDHVELSWWVNGKEVHSGVCTDPQPLKEQPALNDSRYCLSSRLRVSATFWQNPRNHFRCQVQFYGLSENDEWTQDRAKPVTQIVSAEAWGRADCGFTSESYQQGVLSATILYEILLGKATLYAVLVSALVLMAMVKRKDSRGRAKRSGSGATNFSLLKQAGDVEENPGPTSMDWIWRILFLVGAATGAHSFEQVQLKESGPGLVQPSQTLSLTCTVSGLSLTSNGVSWIRQPPGKGLEWLGVIWSNGGTDYNSAIKSRLSFSRDTSKSQVFLKMNSLQTEDTAMYFCARPRYNSGYFFDYWGQGVMVTVSSTRIQNPDPAVYQLRDSKSSDKSVCLFTDFDSQTNVSQSKDSDVYITDKCVLDMRSMDFKSNSAVAWSNKSDFACANAFNNSIIPEDTFFPSPESSCDVKLVEKSFETDTNLNFQNLSVIGFRILLLKVAGFNLLMTLRLWSS

SEQ ID NO: 20166 - protein, 756 aa, Artificial Sequence
  Synthetic Polypeptide
MALPVTALLLPLALLLHAARPDTVLTQSPALAVSPGERVTISCKASESVSTRMHWYRQKPGQQPKLLIYKTSNLASGVPARFSGSGSGTDFTLTIDPVEADDTATYFCQQSWNGPLTFGSGTKLEIKRLEDLKNVFPPEVAVFEPSEAEISHTQKATLVCLATGFYPDHVELSWWVNGKEVHSGVCTDPQPLKEQPALNDSRYCLSSRLRVSATFWQNPRNHFRCQVQFYGLSENDEWTQDRAKPVTQIVSAEAWGRADCGFTSESYQQGVLSATILYEILLGKATLYAVLVSALVLMAMVKRKDSRGRAKRSGSGATNFSLLKQAGDVEENPGPTSMDWIWRILFLVGAATGAHSGPEVQLVESGGGLVQAGGSLRLSCAASGRTFSMGWFRQAPGKEREFVAAITYSGGSPYYADSVKGRFTISRDNAKNTVYLQMNSLKPEDTAVYYCAANPTYGSDWNAENWGQGTQVTVSSGSGGGGSGGGGSGGGGSFEQVQLKESGPGLVQPSQTLSLTCTVSGLSLTSNGVSWIRQPPGKGLEWLGVIWSNGGTDYNSAIKSRLSFSRDTSKSQVFLKMNSLQTEDTAMYFCARPRYNSGYFFDYWGQGVMVTVSSTRIQNPDPAVYQLRDSKSSDKSVCLFTDFDSQTNVSQSKDSDVYITDKCVLDMRSMDFKSNSAVAWSNKSDFACANAFNNSIIPEDTFFPSPESSCDVKLVEKSFETDTNLNFQNLSVIGFRILLLKVAGFNLLMTLRLWSS

SEQ ID NO: 20167 - protein, 883 aa, Artificial Sequence
  Synthetic Polypeptide
MALPVTALLLPLALLLHAARPDTVLTQSPALAVSPGERVTISCKASESVSTRMHWYRQKPGQQPKLLIYKTSNLASGVPARFSGSGSGTDFTLTIDPVEADDTATYFCQQSWNGPLTFGSGTKLEIKRLEDLKNVFPPEVAVFEPSEAEISHTQKATLVCLATGFYPDHVELSWWVNGKEVHSGVCTDPQPLKEQPALNDSRYCLSSRLRVSATFWQNPRNHFRCQVQFYGLSENDEWTQDRAKPVTQIVSAEAWGRADCGFTSESYQQGVLSATILYEILLGKATLYAVLVSALVLMAMVKRKDSRGRAKRSGSGATNFSLLKQAGDVEENPGPTSMDWIWRILFLVGAATGAHSQLQLQESGPGLVKPSETLSLTCTVSGGSISSGDYYWGWIRQPPGKGLEWIGSISYSGSTYYNPSLKSRVTISVDTSRNQFSLKLSSVTAADTAVYYCTREDSSNWRSRGQGTLVTVSSSGGGGSGGGGSEVQLVESGGGLVQAGGSLRLSCAASGRTFSMGWFRQAPGKEREFVAAITYSGGSPYYADSVKGRFTISRDNAKNTVYLQMNSLKPEDTAVYYCAANPTYGSDWNAENWGQGTQVTVSSGSGGGGSGGGGSGGGGSFEQVQLKESGPGLVQPSQTLSLTCTVSGLSLTSNGVSWIRQPPGKGLEWLGVIWSNGGTDYNSAIKSRLSFSRDTSKSQVFLKMNSLQTEDTAMYFCARPRYNSGYFFDYWGQGVMVTVSSTRIQNPDPAVYQLRDSKSSDKSVCLFTDFDSQTNVSQSKDSDVYITDKCVLDMRSMDFKSNSAVAWSNKSDFACANAFNNSIIPEDTFFPSPESSCDVKLVEKSFETDTNLNFQNLSVIGFRILLLKVAGFNLLMTLRLWSS

SEQ ID NO: 20168 - protein, 892 aa, Artificial Sequence
  Synthetic Polypeptide
MALPVTALLLPLALLLHAARPEVQVLESGGGLVQPGGSLRLSCAASGFTFSNFAMSWVRQAPGKGLEWVSTISGSAGTTDYADSVKGRFTISRDNSKKTLYLQMNSLRVEDTAVYYCADGRGPFFDYRGQGTLVTVSSGTGGGGSGGGGSGGGGSEFDTVLTQSPALAVSPGERVTISCKASESVSTRMHWYRQKPGQQPKLLIYKTSNLASGVPARFSGSGSGTDFTLTIDPVEADDTATYFCQQSWNGPLTFGSGTKLEIKRLEDLKNVFPPEVAVFEPSEAEISHTQKATLVCLATGFYPDHVELSWWVNGKEVHSGVCTDPQPLKEQPALNDSRYCLSSRLRVSATFWQNPRNHFRCQVQFYGLSENDEWTQDRAKPVTQIVSAEAWGRADCGFTSESYQQGVLSATILYEILLGKATLYAVLVSALVLMAMVKRKDSRGRAKRSGSGATNFSLLKQAGDVEENPGPTSMDWIWRILFLVGAATGAHSGPEVQLVESGGGLVQAGGSLRLSCAASGRTFSMGWFRQAPGKEREFVAAITYSGGSPYYASSVRGRFTISRDNAKNTVYLQMNSLKPEDTAVYYCAANPTYGSDWNAENWGQGTQVTVSSGSGGGGSGGGGSGGGGSFEQVQLKESGPGLVQPSQTLSLTCTVSGLSLTSNGVSWIRQPPGKGLEWLGVIWSNGGTDYNSAIKSRLSFSRDTSKSQVFLKMNSLQTEDTAMYFCARPRYNSGYFFDYWGQGVMVTVSSTRIQNPDPAVYQLRDSKSSDKSVCLFTDFDSQTNVSQSKDSDVYITDKCVLDMRSMDFKSNSAVAWSNKSDFACANAFNNSIIPEDTFFPSPESSCDVKLVEKSFETDTNLNFQNLSVIGFRILLLKVAGFNLLMTLRLWSS

SEQ ID NO: 20169 - protein, 735 aa, Artificial Sequence
  Synthetic Polypeptide
MALPVTALLLPLALLLHAARPDLVMTQSPFSLAVSEGEMVTIKCKSSQSLLSSRHQKNFLAWYRQKPGQSPKLLIYHASTRQSGVPDRFIGSGSGTDFTLTISDVQAEDLADYYCLQHYTSPYTFGAGTKLELKRGGGGSGGGGSGGGGSQVQLKESGPGLVQPSQTLSLTCTVSGFSLTSYHVHWVRQPPGKGLEWMGVMWSDGDTLYNSALKSRLSISRDTSKSQVLLQMDSLQSEDTATYYCARLQVFGYPGIRDYVMDAWGQGASVTVSSTREQKLISEEDLAKPTTTPAPRPPTPAPTIASQPLSLRPEACRPAAGGAVHTRGLDFACDIYIWAPLAGTCGVLLLSLVITLYCKRGRKKLLYIFKQPFMRPVQTTQEEDGCSCRFPEEEEGGCELRVKFSRSADAPAYQQGQNQLYNELNLGRREEYDVLDKRRGRDPEMGGKPRRKNPQEGLYNELQKDKMAEAYSEIGMKGERRRGKGHDGLYQGLSTATKDTYDALHMQALPPRSSGSGEGRGSLLTCGDVEENPGPHMTEYKPTVRLATRDDVPRAVRTLAAAFADYPATRHTVDPDRHIERVTELQELFLTRVGLDIGKVWVADDGAAVAVWTTPESVEAGAVFAEIGPRMAELSGSRLAAQQQMEGLLAPHRPKEPAWFLATVGVSPDHQGKGLGSAVVLPGVEAAERAGVPAFLETSAPRNLPFYERLGFTVTADVEVPEGPRTWCMTRKPGA

SEQ ID NO: 20170 - protein, 729 aa, Artificial Sequence
  Synthetic Polypeptide
MALPVTALLLPLALLLHAARPDLVMTQSPFSLAVSEGEMVTIKCKSSQSLLSSRHQKNFLAWYRQKPGQSPKLLIYHASTRQSGVPDRFIGSGSGTDFTLTISDVQAEDLADYYCLQHYTSPYTFGAGTKLELKRGGGGSGGGGSGGGGSQVQLKESGPGLVQPSQTLSLTCTVSGFSLTSYHVHWVRQPPGKGLEWMGVMWSDGDTLYNSALKSRLSISRDTSKSQVLLQMDSLQSEDTATYYCARLQVFGYPGIRDYVMDAWGQGASVTVSSTREQKLISEEDLKIEVMYPPPYLDNEKSNGTIIHVKGKHLCPSPLFPGPSKPFWVLVVVGGVLACYSLLVTVAFIIFWVRSKRSRLLHSDYMNMTPRRPGPTRKHYQPYAPPRDFAAYRSRVKFSRSADAPAYQQGQNQLYNELNLGRREEYDVLDKRRGRDPEMGGKPRRKNPQEGLYNELQKDKMAEAYSEIGMKGERRRGKGHDGLYQGLSTATKDTYDALHMQALPPRSSGSGEGRGSLLTCGDVEENPGPHMTEYKPTVRLATRDDVPRAVRTLAAAFADYPATRHTVDPDRHIERVTELQELFLTRVGLDIGKVWVADDGAAVAVWTTPESVEAGAVFAEIGPRMAELSGSRLAAQQQMEGLLAPHRPKEPAWFLATVGVSPDHQGKGLGSAVVLPGVEAAERAGVPAFLETSAPRNLPFYERLGFTVTADVEVPEGPRTWCMTRKPGA

SEQ ID NO: 20171 - protein, 506 aa, Artificial Sequence
  Synthetic Polypeptide
MALPVTALLLPLALLLHAARPDLVMTQSPFSLAVSEGEMVTIKCKSSQSLLSSRHQKNFLAWYRQKPGQSPKLLIYHASTRQSGVPDRFIGSGSGTDFTLTISDVQAEDLADYYCLQHYTSPYTFGAGTKLELKRGGGGSGGGGSGGGGSQVQLKESGPGLVQPSQTLSLTCTVSGFSLTSYHVHWVRQPPGKGLEWMGVMWSDGDTLYNSALKSRLSISRDTSKSQVLLQMDSLQSEDTATYYCARLQVFGYPGIRDYVMDAWGQGASVTVSSTREQKLISEEDLKIEVMYPPPYLDNEKSNGTIIHVKGKHLCPSPLFPGPSKPFWVLVVVGGVLACYSLLVTVAFIIFWVRSKRSRLLHSDYMNMTPRRPGPTRKHYQPYAPPRDFAAYRSRVKFSRSADAPAYQQGQNQLYNELNLGRREEYDVLDKRRGRDPEMGGKPRRKNPQEGLYNELQKDKMAEAYSEIGMKGERRRGKGHDGLYQGLSTATKDTYDALHMQALPPR

SEQ ID NO: 20172 - protein, 512 aa, Artificial Sequence
  Synthetic Polypeptide
MALPVTALLLPLALLLHAARPDLVMTQSPFSLAVSEGEMVTIKCKSSQSLLSSRHQKNFLAWYRQKPGQSPKLLIYHASTRQSGVPDRFIGSGSGTDFTLTISDVQAEDLADYYCLQHYTSPYTFGAGTKLELKRGGGGSGGGGSGGGGSQVQLKESGPGLVQPSQTLSLTCTVSGFSLTSYHVHWVRQPPGKGLEWMGVMWSDGDTLYNSALKSRLSISRDTSKSQVLLQMDSLQSEDTATYYCARLQVFGYPGIRDYVMDAWGQGASVTVSSTREQKLISEEDLAKPTTTPAPRPPTPAPTIASQPLSLRPEACRPAAGGAVHTRGLDFACDIYIWAPLAGTCGVLLLSLVITLYCKRGRKKLLYIFKQPFMRPVQTTQEEDGCSCRFPEEEEGGCELRVKFSRSADAPAYQQGQNQLYNELNLGRREEYDVLDKRRGRDPEMGGKPRRKNPQEGLYNELQKDKMAEAYSEIGMKGERRRGKGHDGLYQGLSTATKDTYDALHMQALPPR

SEQ ID NO: 20173 - protein, 512 aa, Artificial Sequence
  Synthetic Polypeptide
MALPVTALLLPLALLLHAARPQVQLKESGPGLVQPSQTLSLTCTVSGFSLTSYHVHWVRQPPGKGLEWMGVMWSDGDTLYNSALKSRLSISRDTSKSQVLLQMDSLQSEDTATYYCARLQVFGYPGIRDYVMDAWGQGASVTVSSGGGGSGGGGSGGGGSDLVMTQSPFSLAVSEGEMVTIKCKSSQSLLSSRHQKNFLAWYRQKPGQSPKLLIYHASTRQSGVPDRFIGSGSGTDFTLTISDVQAEDLADYYCLQHYTSPYTFGAGTKLELKRTREQKLISEEDLAKPTTTPAPRPPTPAPTIASQPLSLRPEACRPAAGGAVHTRGLDFACDIYIWAPLAGTCGVLLLSLVITLYCKRGRKKLLYIFKQPFMRPVQTTQEEDGCSCRFPEEEEGGCELRVKFSRSADAPAYQQGQNQLYNELNLGRREEYDVLDKRRGRDPEMGGKPRRKNPQEGLYNELQKDKMAEAYSEIGMKGERRRGKGHDGLYQGLSTATKDTYDALHMQALPPR

SEQ ID NO: 20174 - protein, 925 aa, Artificial Sequence
  Synthetic Polypeptide
MALPVTALLLPLALLLHAARPDLVMTQSPFSLAVSEGEMVTIKCKSSQSLLSSRHQKNFLAWYRQKPGQSPKLLIYHASTRQSGVPDRFIGSGSGTDFTLTISDVQAEDLADYYCLQHYTSPYTFGAGTKLELKRGGGGSGGGGSGGGGSQVQLKESGPGLVQPSQTLSLTCTVSGFSLTSYHVHWVRQPPGKGLEWMGVMWSDGDTLYNSALKSRLSISRDTSKSQVLLQMDSLQSEDTATYYCARLQVFGYPGIRDYVMDAWGQGASVTVSSTREQKLISEEDLAKPTTTPAPRPPTPAPTIASQPLSLRPEACRPAAGGAVHTRGLDFACDIYIWAPLAGTCGVLLLSLVITLYCGRARVKFSRSADAPAYQQGQNQLYNELNLGRREEYDVLDKRRGRDPEMGGKPRRKNPQEGLYNELQKDKMAEAYSEIGMKGERRRGKGHDGLYQGLSTATKDTYDALHMQALPPRSRGSGATNFSLLKQAGDVEENPGPGIHMATYEVLCEVARKLGTDDREVVLFLLNVFIPQPTLAQLIGALRALKEEGRLTFPLLAECLFRAGRRDLLRDLLHLDPRFLERHLAGTMSYFSPYQLTVLHVDGELCARDIRSLIFLSKDTIGSRSTPQTFLHWVYCMENLDLLGPTDVDALMSMLRSLSRVDLQRQVQTLMGLHLSGPSHSQHYRHTPLETDFYDYKDDDDKTSGSGEGRGSLLTCGDVEENPGPHMTEYKPTVRLATRDDVPRAVRTLAAAFADYPATRHTVDPDRHIERVTELQELFLTRVGLDIGKVWVADDGAAVAVWTTPESVEAGAVFAEIGPRMAELSGSRLAAQQQMEGLLAPHRPKEPAWFLATVGVSPDHQGKGLGSAVVLPGVEAAERAGVPAFLETSAPRNLPFYERLGFTVTADVEVPEGPRTWCMTRKPGA

SEQ ID NO: 20175 - protein, 865 aa, Artificial Sequence
  Synthetic Polypeptide
MALPVTALLLPLALLLHAARPDLVMTQSPFSLAVSEGEMVTIKCKSSQSLLSSRHQKNFLAWYRQKPGQSPKLLIYHASTRQSGVPDRFIGSGSGTDFTLTISDVQAEDLADYYCLQHYTSPYTFGAGTKLELKRLEIQNPDPAVYQLRDSKSSDKSVCLFTDFDSQTNVSQSKDSDVYITDKCVLDMRSMDFKSNSAVAWSNKSDFACANAFNNSIIPEDTFFPSSDVPCDVKLVEKSFETDTNLNFQNLSVIGFRILLLKVAGFNLLMTLRLWSSRAKRSGSGVKQTLNFDLLKLAGDVESNPGPTSMDWIWRILFLVGAATGAHSFEQVQLKESGPGLVQPSQTLSLTCTVSGFSLTSYHVHWVRQPPGKGLEWMGVMWSDGDTLYNSALKSRLSISRDTSKSQVLLQMDSLQSEDTATYYCARLQVFGYPGIRDYVMDAWGQGASVTVSSTREDLKNVFPPEVAVFEPSKAEIAHTQKATLVCLATGFYPDHVELSWWVNGKEVHSGVCTDPQPLKEQPALNDSRYCLSSRLRVSATFWQNPRNHFRCQVQFYGLSENDEWTQDRAKPVTQIVSAEAWGRADCGITSASYHQGVLSATILYEILLGKATLYAVLVSALVLMAMVKRKDSRGRAKRSGSGATNFSLLKQAGDVEENPGPSRGHMTEYKPTVRLATRDDVPRAVRTLAAAFADYPATRHTVDPDRHIERVTELQELFLTRVGLDIGKVWVADDGAAVAVWTTPESVEAGAVFAEIGPRMAELSGSRLAAQQQMEGLLAPHRPKEPAWFLATVGVSPDHQGKGLGSAVVLPGVEAAERAGVPAFLETSAPRNLPFYERLGFTVTADVEVPEGPRTWCMTRKPGA

SEQ ID NO: 20176 - protein, 864 aa, Artificial Sequence
  Synthetic Polypeptide
MALPVTALLLPLALLLHAARPDLVMTQSPFSLAVSEGEMVTIKCKSSQSLLSSRHQKNFLAWYRQKPGQSPKLLIYHASTRQSGVPDRFIGSGSGTDFTLTISDVQAEDLADYYCLQHYTSPYTFGAGTKLELKRLEDLKNVFPPEVAVFEPSKAEIAHTQKATLVCLATGFYPDHVELSWWVNGKEVHSGVCTDPQPLKEQPALNDSRYCLSSRLRVSATFWQNPRNHFRCQVQFYGLSENDEWTQDRAKPVTQIVSAEAWGRADCGITSASYHQGVLSATILYEILLGKATLYAVLVSALVLMAMVKRKDSRGRAKRSGSGATNFSLLKQAGDVEENPGPTSMDWIWRILFLVGAATGAHSFEQVQLKESGPGLVQPSQTLSLTCTVSGFSLTSYHVHWVRQPPGKGLEWMGVMWSDGDTLYNSALKSRLSISRDTSKSQVLLQMDSLQSEDTATYYCARLQVFGYPGIRDYVMDAWGQGASVTVSSTRIQNPDPAVYQLRDSKSSDKSVCLFTDFDSQTNVSQSKDSDVYITDKCVLDMRSMDFKSNSAVAWSNKSDFACANAFNNSIIPEDTFFPSSDVPCDVKLVEKSFETDTNLNFQNLSVIGFRILLLKVAGFNLLMTLRLWSSRAKRSGSGVKQTLNFDLLKLAGDVESNPGPSRGHMTEYKPTVRLATRDDVPRAVRTLAAAFADYPATRHTVDPDRHIERVTELQELFLTRVGLDIGKVWVADDGAAVAVWTTPESVEAGAVFAEIGPRMAELSGSRLAAQQQMEGLLAPHRPKEPAWFLATVGVSPDHQGKGLGSAVVLPGVEAAERAGVPAFLETSAPRNLPFYERLGFTVTADVEVPEGPRTWCMTRKPGA

SEQ ID NO: 20177 - protein, 631 aa, Artificial Sequence
  Synthetic Polypeptide
MALPVTALLLPLALLLHAARPDLVMTQSPFSLAVSEGEMVTIKCKSSQSLLSSRHQKNFLAWYRQKPGQSPKLLIYHASTRQSGVPDRFIGSGSGTDFTLTISDVQAEDLADYYCLQHYTSPYTFGAGTKLELKRLEDLKNVFPPEVAVFEPSEAEISHTQKATLVCLATGFYPDHVELSWWVNGKEVHSGVCTDPQPLKEQPALNDSRYCLSSRLRVSATFWQNPRNHFRCQVQFYGLSENDEWTQDRAKPVTQIVSAEAWGRADCGFTSESYQQGVLSATILYEILLGKATLYAVLVSALVLMAMVKRKDSRGRAKRSGSGATNFSLLKQAGDVEENPGPTSMDWIWRILFLVGAATGAHSFEQVQLKESGPGLVQPSQTLSLTCTVSGFSLTSYHVHWVRQPPGKGLEWMGVMWSDGDTLYNSALKSRLSISRDTSKSQVLLQMDSLQSEDTATYYCARLQVFGYPGIRDYVMDAWGQGASVTVSSTRIQNPDPAVYQLRDSKSSDKSVCLFTDFDSQTNVSQSKDSDVYITDKCVLDMRSMDFKSNSAVAWSNKSDFACANAFNNSIIPEDTFFPSPESSCDVKLVEKSFETDTNLNFQNLSVIGFRILLLKVAGFNLLMTLRLWSS

SEQ ID NO: 20178 - protein, 856 aa, Artificial Sequence
  Synthetic Polypeptide
MALPVTALLLPLALLLHAARPDLVMTQSPFSLAVSEGEMVTIKCKSSQSLLSSRHQKNFLAWYRQKPGQSPKLLIYHASTRQSGVPDRFIGSGSGTDFTLTISDVQAEDLADYYCLQHYTSPYTFGAGTKLELKRLEDLKNVFPPEVAVFEPSEAEISHTQKATLVCLATGFYPDHVELSWWVNGKEVHSGVCTDPQPLKEQPALNDSRYCLSSRLRVSATFWQNPRNHFRCQVQFYGLSENDEWTQDRAKPVTQIVSAEAWGRADCGFTSESYQQGVLSATILYEILLGKATLYAVLVSALVLMAMVKRKDSRGRAKRSGSGATNFSLLKQAGDVEENPGPTSMDWIWRILFLVGAATGAHSFEQVQLKESGPGLVQPSQTLSLTCTVSGFSLTSYHVHWVRQPPGKGLEWMGVMWSDGDTLYNSALKSRLSISRDTSKSQVLLQMDSLQSEDTATYYCARLQVFGYPGIRDYVMDAWGQGASVTVSSTRIQNPDPAVYQLRDSKSSDKSVCLFTDFDSQTNVSQSKDSDVYITDKCVLDMRSMDFKSNSAVAWSNKSDFACANAFNNSIIPEDTFFPSPESSCDVKLVEKSFETDTNLNFQNLSVIGFRILLLKVAGFNLLMTLRLWSSRAKRSGSGVKQTLNFDLLKLAGDVESNPGPSRGGIHTMATYEVLCEVARKLGTDDREVVLFLLNVFIPQPTLAQLIGALRALKEEGRLTFPLLAECLFRAGRRDLLRDLLHLDPRFLERHLAGTMSYFSPYQLTVLHVDGELCARDIRSLIFLSKDTIGSRSTPQTFLHWVYCMENLDLLGPTDVDALMSMLRSLSRVDLQRQVQTLMGLHLSGPSHSQHYRHTP

SEQ ID NO: 20179 - protein, 635 aa, Artificial Sequence
  Synthetic Polypeptide
MALPVTALLLPLALLLHAARPDLVMTQSPFSLAVSEGEMVTIKCKSSQSLLSSRHQKNFLAWYRQKPGQSPKLLIYHASTRQSGVPDRFIGSGSGTDFTLTISDVQAEDLADYYCLQHYTSPYTFGAGTKLELKRLEIQNPDPAVYQLRDSKSSDKSVCLFTDFDSQTNVSQSKDSDVYITDKCVLDMRSMDFKSNSAVAWSNKSDFACANAFNNSIIPEDTFFPSPESSCDVKLVEKSFETDTNLNFQNLSVIGFRILLLKVAGFNLLMTLRLWSSRAKRSGSGVKQTLNFDLLKLAGDVESNPGPTSMDWIWRILFLVGAATGAHSFEQVQLKESGPGLVQPSQTLSLTCTVSGFSLTSYHVHWVRQPPGKGLEWMGVMWSDGDTLYNSALKSRLSISRDTSKSQVLLQMDSLQSEDTATYYCARLQVFGYPGIRDYVMDAWGQGASVTVSSTREDLKNVFPPEVAVFEPSEAEISHTQKATLVCLATGFYPDHVELSWWVNGKEVHSGVCTDPQPLKEQPALNDSRYCLSSRLRVSATFWQNPRNHFRCQVQFYGLSENDEWTQDRAKPVTQIVSAEAWGRADCGFTSESYQQGVLSATILYEILLGKATLYAVLVSALVLMAMVKRKDSRG

SEQ ID NO: 20180 - protein, 857 aa, Artificial Sequence
  Synthetic Polypeptide
MALPVTALLLPLALLLHAARPDLVMTQSPFSLAVSEGEMVTIKCKSSQSLLSSRHQKNFLAWYRQKPGQSPKLLIYHASTRQSGVPDRFIGSGSGTDFTLTISDVQAEDLADYYCLQHYTSPYTFGAGTKLELKRLEIQNPDPAVYQLRDSKSSDKSVCLFTDFDSQTNVSQSKDSDVYITDKCVLDMRSMDFKSNSAVAWSNKSDFACANAFNNSIIPEDTFFPSPESSCDVKLVEKSFETDTNLNFQNLSVIGFRILLLKVAGFNLLMTLRLWSSRAKRSGSGVKQTLNFDLLKLAGDVESNPGPTSMDWIWRILFLVGAATGAHSFEQVQLKESGPGLVQPSQTLSLTCTVSGFSLTSYHVHWVRQPPGKGLEWMGVMWSDGDTLYNSALKSRLSISRDTSKSQVLLQMDSLQSEDTATYYCARLQVFGYPGIRDYVMDAWGQGASVTVSSTREDLKNVFPPEVAVFEPSEAEISHTQKATLVCLATGFYPDHVELSWWVNGKEVHSGVCTDPQPLKEQPALNDSRYCLSSRLRVSATFWQNPRNHFRCQVQFYGLSENDEWTQDRAKPVTQIVSAEAWGRADCGFTSESYQQGVLSATILYEILLGKATLYAVLVSALVLMAMVKRKDSRGRAKRSGSGATNFSLLKQAGDVEENPGPSRGGIHTMATYEVLCEVARKLGTDDREVVLFLLNVFIPQPTLAQLIGALRALKEEGRLTFPLLAECLFRAGRRDLLRDLLHLDPRFLERHLAGTMSYFSPYQLTVLHVDGELCARDIRSLIFLSKDTIGSRSTPQTFLHWVYCMENLDLLGPTDVDALMSMLRSLSRVDLQRQVQTLMGLHLSGPSHSQHYRHTP

SEQ ID NO: 20181 - protein, 909 aa, Artificial Sequence
  Synthetic Polypeptide
MALPVTALLLPLALLLHAARPLEGKPIPNPLLGLDSTGSGEDLKNVFPPEVAVFEPSKAEIAHTQKATLVCLATGFYPDHVELSWWVNGKEVHSGVCTDPQPLKEQPALNDSRYCLSSRLRVSATFWQNPRNHFRCQVQFYGLSENDEWTQDRAKPVTQIVSAEAWGRADCGITSASYHQGVLSATILYEILLGKATLYAVLVSALVLMAMVKRKDSRGRAKRSGSGATNFSLLKQAGDVEENPGPTSMALPVTALLLPLALLLHAARPDLVMTQSPFSLAVSEGEMVTIKCKSSQSLLSSRHQKNFLAWYRQKPGQSPKLLIYHASTRQSGVPDRFIGSGSGTDFTLTISDVQAEDLADYYCLQHYTSPYTFGAGTKLELKRGGGGSGGGGSGGGGSQVQLKESGPGLVQPSQTLSLTCTVSGFSLTSYHVHWVRQPPGKGLEWMGVMWSDGDTLYNSALKSRLSISRDTSKSQVLLQMDSLQSEDTATYYCARLQVFGYPGIRDYVMDAWGQGASVTVSSTREQKLISEEDGSGIQNPDPAVYQLRDSKSSDKSVCLFTDFDSQTNVSQSKDSDVYITDKCVLDMRSMDFKSNSAVAWSNKSDFACANAFNNSIIPEDTFFPSSDVPCDVKLVEKSFETDTNLNFQNLSVIGFRILLLKVAGFNLLMTLRLWSSRAKRSGSGVKQTLNFDLLKLAGDVESNPGPSRGHMTEYKPTVRLATRDDVPRAVRTLAAAFADYPATRHTVDPDRHIERVTELQELFLTRVGLDIGKVWVADDGAAVAVWTTPESVEAGAVFAEIGPRMAELSGSRLAAQQQMEGLLAPHRPKEPAWFLATVGVSPDHQGKGLGSAVVLPGVEAAERAGVPAFLETSAPRNLPFYERLGFTVTADVEVPEGPRTWCMTRKPGA

SEQ ID NO: 20182 - protein, 910 aa, Artificial Sequence
  Synthetic Polypeptide
MALPVTALLLPLALLLHAARPLEQKLISEEDLGSGDRPDPAVYQLRDSKSSDKSVCLFTDFDSQTNVSQSKDSDVYITDKCVLDMRSMDFKSNSAVAWSNKSDFACANAFNNSIIPEDTFFPSPESSCDVKLVEKSFETDTNLNFQNLSVIGFRILLLKVAGFNLLMTLRLWSSSSRAKRSGSGVKQTLNFDLLKLAGDVESNPGPTSMALPVTALLLPLALLLHAARPDLVMTQSPFSLAVSEGEMVTIKCKSSQSLLSSRHQKNFLAWYRQKPGQSPKLLIYHASTRQSGVPDRFIGSGSGTDFTLTISDVQAEDLADYYCLQHYTSPYTFGAGTKLELKRGGGGSGGGGSGGGGSQVQLKESGPGLVQPSQTLSLTCTVSGFSLTSYHVHWVRQPPGKGLEWMGVMWSDGDTLYNSALKSRLSISRDTSKSQVLLQMDSLQSEDTATYYCARLQVFGYPGIRDYVMDAWGQGASVTVSSTRGKPIPNPLLGLDSTGSGEDLKNVFPPEVAVFEPSEAEISHTQKATLVCLATGFYPDHVELSWWVNGKEVHSGVCTDPQPLKEQPALNDSRYCLSSRLRVSATFWQNPRNHFRCQVQFYGLSENDEWTQDRAKPVTQIVSAEAWGRADCGFTSESYQQGVLSATILYEILLGKATLYAVLVSALVLMAMVKRKDSRGRAKRSGSGATNFSLLKQAGDVEENPGPSRGHMTEYKPTVRLATRDDVPRAVRTLAAAFADYPATRHTVDPDRHIERVTELQELFLTRVGLDIGKVWVADDGAAVAVWTTPESVEAGAVFAEIGPRMAELSGSRLAAQQQMEGLLAPHRPKEPAWFLATVGVSPDHQGKGLGSAVVLPGVEAAERAGVPAFLETSAPRNLPFYERLGFTVTADVEVPEGPRTWCMTRKPGA

SEQ ID NO: 20183 - protein, 864 aa, Artificial Sequence
  Synthetic Polypeptide
MALPVTALLLPLALLLHAARPDLVMTQSPFSLAVSEGEMVTIKCKSSQSLLSSRHQKNFLAWYRQKPGQSPKLLIYHASTRQSGVPDRFIGSGSGTDFTLTISDVQAEDLADYYCLQHYTSPYTFGAGTKLELKRLEDLKNVFPPEVAVFEPSEAEISHTQKATLVCLATGFYPDHVELSWWVNGKEVHSGVSTDPQPLKEQPALNDSRYCLSSRLRVSATFWQNPRNHFRCQVQFYGLSENDEWTQDRAKPVTQIVSAEAWGRADCGFTSESYQQGVLSATILYEILLGKATLYAVLVSALVLMAMVKRKDSRGRAKRSGSGATNFSLLKQAGDVEENPGPTSMDWIWRILFLVGAATGAHSFEQVQLKESGPGLVQPSQTLSLTCTVSGFSLTSYHVHWVRQPPGKGLEWMGVMWSDGDTLYNSALKSRLSISRDTSKSQVLLQMDSLQSEDTATYYCARLQVFGYPGIRDYVMDAWGQGASVTVSSTRIQNPDPAVYQLRDSKSSDKSVCLFTDFDSQTNVSQSKDSDVYITDKTVLDMRSMDFKSNSAVAWSNKSDFACANAFNNSIIPEDTFFPSPESSCDVKLVEKSFETDTNLNFQNLSVIGFRILLLKVAGFNLLMTLRLWSSRAKRSGSGVKQTLNFDLLKLAGDVESNPGPSRGHMTEYKPTVRLATRDDVPRAVRTLAAAFADYPATRHTVDPDRHIERVTELQELFLTRVGLDIGKVWVADDGAAVAVWTTPESVEAGAVFAEIGPRMAELSGSRLAAQQQMEGLLAPHRPKEPAWFLATVGVSPDHQGKGLGSAVVLPGVEAAERAGVPAFLETSAPRNLPFYERLGFTVTADVEVPEGPRTWCMTRKPGA

SEQ ID NO: 20184 - protein, 946 aa, Artificial Sequence
  Synthetic Polypeptide
MALPVTALLLPLALLLHAARPDLVMTQSPFSLAVSEGEMVTIKCKSSQSLLSSRHQKNFLAWYRQKPGQSPKLLIYHASTRQSGVPDRFIGSGSGTDFTLTISDVQAEDLADYYCLQHYTSPYTFGAGTKLELKRLEDLKNVFPPEVAVFEPSEAEISHTQKATLVCLATGFYPDHVELSWWVNGKEVHSGVSTDPQPLKEQPALNDSRYCLSSRLRVSATFWQNPRNHFRCQVQFYGLSENDEWTQDRAKPVTQIVSAEAWGRADCGFTSESYQQGVLSATILYEILLGKATLYAVLVSALVLMAMVKRKDSRGRAKRSGSGATNFSLLKQAGDVEENPGPTSMDWIWRILFLVGAATGAHSFEQVQLKESGPGLVQPSQTLSLTCTVSGFSLTSYHVHWVRQPPGKGLEWMGVMWSDGDTLYNSALKSRLSISRDTSKSQVLLQMDSLQSEDTATYYCARLQVFGYPGIRDYVMDAWGQGASVTVSSTREQKLISEEDGSGTPFPSLAPPIMLLVDGKQQMVVVCLVLDVAPPGLDSPIWFSAGNGSALDAFTYGPSPATDGTWTNLAHLSLPSEELASWEPLVCHTGPGAEGHSRSTQPMHLSGEASTARTCPQEPLRGTPGGALWLGVLRLLLFKLLLFDLLLTCSCLCDPAGPLPSPATTTRLRALGSHRLHPATETGGREATSSPRPQPRDRRWGDTPPGRKPGSPVRAKRSGSGVKQTLNFDLLKLAGDVESNPGPSRGHMTEYKPTVRLATRDDVPRAVRTLAAAFADYPATRHTVDPDRHIERVTELQELFLTRVGLDIGKVWVADDGAAVAVWTTPESVEAGAVFAEIGPRMAELSGSRLAAQQQMEGLLAPHRPKEPAWFLATVGVSPDHQGKGLGSAVVLPGVEAAERAGVPAFLETSAPRNLPFYERLGFTVTADVEVPEGPRTWCMTRKPGA

SEQ ID NO: 20185 - protein, 964 aa, Artificial Sequence
  Synthetic Polypeptide
MALPVTALLLPLALLLHAARPLEDLKNVFPPEVAVFEPSEAEISHTQKATLVCLATGFYPDHVELSWWVNGKEVHSGVSTDPQPLKEQPALNDSRYCLSSRLRVSATFWQNPRNHFRCQVQFYGLSENDEWTQDRAKPVTQIVSAEAWGRADCGFTSESYQQGVLSATILYEILLGKATLYAVLVSALVLMAMVKRKDSRGRAKRSGSGATNFSLLKQAGDVEENPGPTSMALPVTALLLPLALLLHAARPDLVMTQSPFSLAVSEGEMVTIKCKSSQSLLSSRHQKNFLAWYRQKPGQSPKLLIYHASTRQSGVPDRFIGSGSGTDFTLTISDVQAEDLADYYCLQHYTSPYTFGAGTKLELKRGGGGSGGGGSGGGGSQVQLKESGPGLVQPSQTLSLTCTVSGFSLTSYHVHWVRQPPGKGLEWMGVMWSDGDTLYNSALKSRLSISRDTSKSQVLLQMDSLQSEDTATYYCARLQVFGYPGIRDYVMDAWGQGASVTVSSTREQKLISEEDLGSGTPFPSLAPPIMLLVDGKQQMVVVCLVLDVAPPGLDSPIWFSAGNGSALDAFTYGPSPATDGTWTNLAHLSLPSEELASWEPLVCHTGPGAEGHSRSTQPMHLSGEASTARTCPQEPLRGTPGGALWLGVLRLLLFKLLLFDLLLTCSCLCDPAGPLPSPATTTRLRALGSHRLHPATETGGREATSSPRPQPRDRRWGDTPPGRKPGSPVRAKRSGSGVKQTLNFDLLKLAGDVESNPGPSRSRGHMTEYKPTVRLATRDDVPRAVRTLAAAFADYPATRHTVDPDRHIERVTELQELFLTRVGLDIGKVWVADDGAAVAVWTTPESVEAGAVFAEIGPRMAELSGSRLAAQQQMEGLLAPHRPKEPAWFLATVGVSPDHQGKGLGSAVVLPGVEAAERAGVPAFLETSAPRNLPFYERLGFTVTADVEVPEGPRTWCMTRKPGA

SEQ ID NO: 20186 - protein, 901 aa, Artificial Sequence
  Synthetic Polypeptide
MALPVTALLLPLALLLHAARPDLVMTQSPFSLAVSEGEMVTIKCKSSQSLLSSRHQKNFLAWYRQKPGQSPKLLIYHASTRQSGVPDRFIGSGSGTDFTLTISDVQAEDLADYYCLQHYTSPYTFGAGTKLELKRLEGKPIPNPLLGLDSTGSGDKQLDADVSPKPTIFLPSIAETKLQKAGTYLCLLEKFFPDVIKIHWQEKKSNTILGSQEGNTMKTNDTYMKFSWLTVPEKSLDKEHRCIVRHENNKNGVDQEIIFPPIKTDVITMDPKDNCSKDANDTLLLQLTNTSAYYMYLLLLLKSVVYFAIITCCLLRRTAFCCNGEKSRAKRSGSGATNFSLLKQAGDVEENPGPTSMDWIWRILFLVGAATGAHSFEQVQLKESGPGLVQPSQTLSLTCTVSGFSLTSYHVHWVRQPPGKGLEWMGVMWSDGDTLYNSALKSRLSISRDTSKSQVLLQMDSLQSEDTATYYCARLQVFGYPGIRDYVMDAWGQGASVTVSSTREQKLISEEDGSGSQPHTKPSVFVMKNGTNVACLVKEFYPKDIRINLVSSKKITEFDPAIVISPSGKYNAVKLGKYEDSNSVTCSVQHDNKTVHSTDFEVKTDSTDHVKPKETENTKQPSKSCHKPKAIVHTEKVNMMSLTVLGLRMLFAKTVAVNFLLTAKLFFLRAKRSGSGVKQTLNFDLLKLAGDVESNPGPSRGHMTEYKPTVRLATRDDVPRAVRTLAAAFADYPATRHTVDPDRHIERVTELQELFLTRVGLDIGKVWVADDGAAVAVWTTPESVEAGAVFAEIGPRMAELSGSRLAAQQQMEGLLAPHRPKEPAWFLATVGVSPDHQGKGLGSAVVLPGVEAAERAGVPAFLETSAPRNLPFYERLGFTVTADVEVPEGPRTWCMTRKPGA

SEQ ID NO: 20187 - protein, 639 aa, Artificial Sequence
  Synthetic Polypeptide
MALPVTALLLPLALLLHAARPDLVMTQSPFSLAVSEGEMVTIKCKSSQSLLSSRHQKNFLAWYRQKPGQSPKLLIYHASTRQSGVPDRFIGSGSGTDFTLTISDVQAEDLADYYCLQHYTSPYTFGAGTKLELKRLESQPHTKPSVFVMKNGTNVACLVKEFYPKDIRINLVSSKKITEFDPAIVISPSGKYNAVKLGKYEDSNSVTCSVQHDNKTVHSTDFEVKTDSTDHVKPKETENTKQPSKSCHKPKAIVHTEKVNMMSLTVLGLRMLFAKTVAVNFLLTAKLFFLRAKRSGSGATNFSLLKQAGDVEENPGPTSMDWIWRILFLVGAATGAHSFEQVQLKESGPGLVQPSQTLSLTCTVSGFSLTSYHVHWVRQPPGKGLEWMGVMWSDGDTLYNSALKSRLSISRDTSKSQVLLQMDSLQSEDTATYYCARLQVFGYPGIRDYVMDAWGQGASVTVSSTRDKQLDADVSPKPTIFLPSIAETKLQKAGTYLCLLEKFFPDVIKIHWQEKKSNTILGSQEGNTMKTNDTYMKFSWLTVPEKSLDKEHRCIVRHENNKNGVDQEIIFPPIKTDVITMDPKDNCSKDANDTLLLQLTNTSAYYMYLLLLLKSVVYFAIITCCLLRRTAFCCNGEKS

SEQ ID NO: 20188 - protein, 916 aa, Artificial Sequence
  Synthetic Polypeptide
MALPVTALLLPLALLLHAARPLEGKPIPNPLLGLDSTGSGDKQLDADVSPKPTIFLPSIAETKLQKAGTYLCLLEKFFPDVIKIHWQEKKSNTILGSQEGNTMKTNDTYMKFSWLTVPEKSLDKEHRCIVRHENNKNGVDQEIIFPPIKTDVITMDPKDNCSKDANDTLLLQLTNTSAYYMYLLLLLKSVVYFAIITCCLLRRTAFCCNGEKSRAKRSGSGATNFSLLKQAGDVEENPGPTSMALPVTALLLPLALLLHAARPDLVMTQSPFSLAVSEGEMVTIKCKSSQSLLSSRHQKNFLAWYRQKPGQSPKLLIYHASTRQSGVPDRFIGSGSGTDFTLTISDVQAEDLADYYCLQHYTSPYTFGAGTKLELKRGGGGSGGGGSGGGGSQVQLKESGPGLVQPSQTLSLTCTVSGFSLTSYHVHWVRQPPGKGLEWMGVMWSDGDTLYNSALKSRLSISRDTSKSQVLLQMDSLQSEDTATYYCARLQVFGYPGIRDYVMDAWGQGASVTVSSTREQKLISEEDGSGSQPHTKPSVFVMKNGTNVACLVKEFYPKDIRINLVSSKKITEFDPAIVISPSGKYNAVKLGKYEDSNSVTCSVQHDNKTVHSTDFEVKTDSTDHVKPKETENTKQPSKSCHKPKAIVHTEKVNMMSLTVLGLRMLFAKTVAVNFLLTAKLFFLRAKRSGSGVKQTLNFDLLKLAGDVESNPGPSRGHMTEYKPTVRLATRDDVPRAVRTLAAAFADYPATRHTVDPDRHIERVTELQELFLTRVGLDIGKVWVADDGAAVAVWTTPESVEAGAVFAEIGPRMAELSGSRLAAQQQMEGLLAPHRPKEPAWFLATVGVSPDHQGKGLGSAVVLPGVEAAERAGVPAFLETSAPRNLPFYERLGFTVTADVEVPEGPRTWCMTRKPGA

SEQ ID NO: 20189 - protein, 1041 aa, Artificial Sequence
  Synthetic Polypeptide
MALPVTALLLPLALLLHAARPDLVMTQSPFSLAVSEGEMVTIKCKSSQSLLSSRHQKNFLAWYRQKPGQSPKLLIYHASTRQSGVPDRFIGSGSGTDFTLTISDVQAEDLADYYCLQHYTSPYTFGAGTKLELKRGQPKANPTVTLFPPSSEELQANKATLVCLISDFYPGAVTVAWKADGSPVKAGVETTKPSKQSNNKYAASSYLSLTPEQWKSHRSYSCQVTHEGSTVEKTVAPTECSGSQSFGLLDPKLCYLLDGILFIYGVILTALFLRVKFSRSADAPAYQQGQNQLYNELNLGRREEYDVLDKRRGRDPEMGGKPQRRKNPQEGLYNELQKDKMAEAYSEIGMKGERRRGKGHDGLYQGLSTATKDTYDALHMQALPPRRAKRSGSGATNFSLLKQAGDVEENPGPTSMDWIWRILFLVGAATGAHSFEQVQLKESGPGLVQPSQTLSLTCTVSGFSLTSYHVHWVRQPPGKGLEWMGVMWSDGDTLYNSALKSRLSISRDTSKSQVLLQMDSLQSEDTATYYCARLQVFGYPGIRDYVMDAWGQGASVTVSSASTKGPSVFPLAPSSKSTSGGTAALGCLVKDYFPEPVTVSWNSGALTSGVHTFPAVLQSSGLYSLSSVVTVPSSSLGTQTYICNVNHKPSNTKVDKRVEPKSCGTQSFGLLDPKLCYLLDGILFIYGVILTALFLRVKFSRSADAPAYQQGQNQLYNELNLGRREEYDVLDKRRGRDPEMGGKPQRRKNPQEGLYNELQKDKMAEAYSEIGMKGERRRGKGHDGLYQGLSTATKDTYDALHMQALPPRRAKRSGSGVKQTLNFDLLKLAGDVESNPGPSRGHMTEYKPTVRLATRDDVPRAVRTLAAAFADYPATRHTVDPDRHIERVTELQELFLTRVGLDIGKVWVADDGAAVAVWTTPESVEAGAVFAEIGPRMAELSGSRLAAQQQMEGLLAPHRPKEPAWFLATVGVSPDHQGKGLGSAVVLPGVEAAERAGVPAFLETSAPRNLPFYERLGFTVTADVEVPEGPRTWCMTRKPGA

SEQ ID NO: 20190 - protein, 827 aa, Artificial Sequence
  Synthetic Polypeptide
MALPVTALLLPLALLLHAARPDLVMTQSPFSLAVSEGEMVTIKCKSSQSLLSSRHQKNFLAWYRQKPGQSPKLLIYHASTRQSGVPDRFIGSGSGTDFTLTISDVQAEDLADYYCLQHYTSPYTFGAGTKLELKRLEDLKNVFPPEVAVFEPSEAEISHTQKATLVCLATGFYPDHVELSWWVNGKEVHSGVSTDPQPLKEQPALNDSRYCLSSRLRVSATFWQNPRNHFRCQVQFYGLSENDEWTQDRAKPVTQIVSAEAWGRADCGSQSFGLLDPKLCYLLDGILFIYGVILTALFLRVKFSRSADAPAYQQGQNQLYNELNLGRREEYDVLDKRRGRDPEMGGKPQRRKNPQEGLYNELQKDKMAEAYSEIGMKGERRRGKGHDGLYQGLSTATKDTYDALHMQALPPRRAKRSGSGATNFSLLKQAGDVEENPGPTSMDWIWRILFLVGAATGAHSFEQVQLKESGPGLVQPSQTLSLTCTVSGFSLTSYHVHWVRQPPGKGLEWMGVMWSDGDTLYNSALKSRLSISRDTSKSQVLLQMDSLQSEDTATYYCARLQVFGYPGIRDYVMDAWGQGASVTVSSTRIQNPDPAVYQLRDSKSSDKSVCLFTDFDSQTNVSQSKDSDVYITDKTVLDMRSMDFKSNSAVAWSNKSDFACANAFNNSIIPEDTFFPSPESSCGTQSFGLLDPKLCYLLDGILFIYGVILTALFLRVKFSRSADAPAYQQGQNQLYNELNLGRREEYDVLDKRRGRDPEMGGKPQRRKNPQEGLYNELQKDKMAEAYSEIGMKGERRRGKGHDGLYQGLSTATKDTYDALHMQALPPR

SEQ ID NO: 20191 - protein, 827 aa, Artificial Sequence
  Synthetic Polypeptide
MALPVTALLLPLALLLHAARPDLVMTQSPFSLAVSEGEMVTIKCKSSQSLLSSRHQKNFLAWYRQKPGQSPKLLIYHASTRQSGVPDRFIGSGSGTDFTLTISDVQAEDLADYYCLQHYTSPYTFGAGTKLELKRLEDLKNVFPPEVAVFEPSKAEIAHTQKATLVCLATGFYPDHVELSWWVNGKEVHSGVCTDPQPLKEQPALNDSRYCLSSRLRVSATFWQNPRNHFRCQVQFYGLSENDEWTQDRAKPVTQIVSAEAWGRADCGSQSFGLLDPKLCYLLDGILFIYGVILTALFLRVKFSRSADAPAYQQGQNQLYNELNLGRREEYDVLDKRRGRDPEMGGKPQRRKNPQEGLYNELQKDKMAEAYSEIGMKGERRRGKGHDGLYQGLSTATKDTYDALHMQALPPRRAKRSGSGATNFSLLKQAGDVEENPGPTSMDWIWRILFLVGAATGAHSFEQVQLKESGPGLVQPSQTLSLTCTVSGFSLTSYHVHWVRQPPGKGLEWMGVMWSDGDTLYNSALKSRLSISRDTSKSQVLLQMDSLQSEDTATYYCARLQVFGYPGIRDYVMDAWGQGASVTVSSTRIQNPDPAVYQLRDSKSSDKSVCLFTDFDSQTNVSQSKDSDVYITDKCVLDMRSMDFKSNSAVAWSNKSDFACANAFNNSIIPEDTFFPSSDVPCGTQSFGLLDPKLCYLLDGILFIYGVILTALFLRVKFSRSADAPAYQQGQNQLYNELNLGRREEYDVLDKRRGRDPEMGGKPQRRKNPQEGLYNELQKDKMAEAYSEIGMKGERRRGKGHDGLYQGLSTATKDTYDALHMQALPPR

SEQ ID NO: 20192 - protein, 898 aa, Artificial Sequence
  Synthetic Polypeptide
MALPVTALLLPLALLLHAARPDLVMTQSPFSLAVSEGEMVTIKCKSSQSLLSSRHQKNFLAWYRQKPGQSPKLLIYHASTRQSGVPDRFIGSGSGTDFTLTISDVQAEDLADYYCLQHYTSPYTFGAGTKLELKRLEGKPIPNPLLGLDSTGSGEDLKNVFPPEVAVFEPSEAEISHTQKATLVCLATGFYPDHVELSWWVNGKEVHSGVSTDPQPLKEQPALNDSRYCLSSRLRVSATFWQNPRNHFRCQVQFYGLSENDEWTQDRAKPVTQIVSAEAWGRADCGSQSFGLLDPKLCYLLDGILFIYGVILTALFLRVKFSRSADAPAYQQGQNQLYNELNLGRREEYDVLDKRRGRDPEMGGKPQRRKNPQEGLYNELQKDKMAEAYSEIGMKGERRRGKGHDGLYQGLSTATKDTYDALHMQALPPRRAKRSGSGATNFSLLKQAGDVEENPGPTSMDWIWRILFLVGAATGAHSFEQVQLKESGPGLVQPSQTLSLTCTVSGFSLTSYHVHWVRQPPGKGLEWMGVMWSDGDTLYNSALKSRLSISRDTSKSQVLLQMDSLQSEDTATYYCARLQVFGYPGIRDYVMDAWGQGASVTVSSTREQKLISEEDGSGIQNPDPAVYQLRDSKSSDKSVCLFTDFDSQTNVSQSKDSDVYITDKTVLDMRSMDFKSNSAVAWSNKSDFACANAFNNSIIPEDTFFPSPESSCGTQSFGLLDPKLCYLLDGILFIYGVILTALFLRSKRSRLLHSDYMNMTPRRPGPTRKHYQPYAPPRDFAAYRSRVKFSRSADAPAYQQGQNQLYNELNLGRREEYDVLDKRRGRDPEMGGKPQRRKNPQEGLYNELQKDKMAEAYSEIGMKGERRRGKGHDGLYQGLSTATKDTYDALHMQALPPR

SEQ ID NO: 20193 - protein, 939 aa, Artificial Sequence
  Synthetic Polypeptide
MALPVTALLLPLALLLHAARPDLVMTQSPFSLAVSEGEMVTIKCKSSQSLLSSRHQKNFLAWYRQKPGQSPKLLIYHASTRQSGVPDRFIGSGSGTDFTLTISDVQAEDLADYYCLQHYTSPYTFGAGTKLELKRLEGKPIPNPLLGLDSTGSGEDLKNVFPPEVAVFEPSEAEISHTQKATLVCLATGFYPDHVELSWWVNGKEVHSGVSTDPQPLKEQPALNDSRYCLSSRLRVSATFWQNPRNHFRCQVQFYGLSENDEWTQDRAKPVTQIVSAEAWGRADCGSQSFGLLDPKLCYLLDGILFIYGVILTALFLRSKRSRLLHSDYMNMTPRRPGPTRKHYQPYAPPRDFAAYRSRVKFSRSADAPAYQQGQNQLYNELNLGRREEYDVLDKRRGRDPEMGGKPQRRKNPQEGLYNELQKDKMAEAYSEIGMKGERRRGKGHDGLYQGLSTATKDTYDALHMQALPPRRAKRSGSGATNFSLLKQAGDVEENPGPTSMDWIWRILFLVGAATGAHSFEQVQLKESGPGLVQPSQTLSLTCTVSGFSLTSYHVHWVRQPPGKGLEWMGVMWSDGDTLYNSALKSRLSISRDTSKSQVLLQMDSLQSEDTATYYCARLQVFGYPGIRDYVMDAWGQGASVTVSSTREQKLISEEDGSGIQNPDPAVYQLRDSKSSDKSVCLFTDFDSQTNVSQSKDSDVYITDKTVLDMRSMDFKSNSAVAWSNKSDFACANAFNNSIIPEDTFFPSPESSCGTQSFGLLDPKLCYLLDGILFIYGVILTALFLRSKRSRLLHSDYMNMTPRRPGPTRKHYQPYAPPRDFAAYRSRVKFSRSADAPAYQQGQNQLYNELNLGRREEYDVLDKRRGRDPEMGGKPQRRKNPQEGLYNELQKDKMAEAYSEIGMKGERRRGKGHDGLYQGLSTATKDTYDALHMQALPPR

SEQ ID NO: 20194 - protein, 900 aa, Artificial Sequence
  Synthetic Polypeptide
MALPVTALLLPLALLLHAARPDLVMTQSPFSLAVSEGEMVTIKCKSSQSLLSSRHQKNFLAWYRQKPGQSPKLLIYHASTRQSGVPDRFIGSGSGTDFTLTISDVQAEDLADYYCLQHYTSPYTFGAGTKLELKRLEGKPIPNPLLGLDSTGSGEDLKNVFPPEVAVFEPSEAEISHTQKATLVCLATGFYPDHVELSWWVNGKEVHSGVSTDPQPLKEQPALNDSRYCLSSRLRVSATFWQNPRNHFRCQVQFYGLSENDEWTQDRAKPVTQIVSAEAWGRADCGSQSFGLLDPKLCYLLDGILFIYGVILTALFLRVKFSRSADAPAYQQGQNQLYNELNLGRREEYDVLDKRRGRDPEMGGKPQRRKNPQEGLYNELQKDKMAEAYSEIGMKGERRRGKGHDGLYQGLSTATKDTYDALHMQALPPRRAKRSGSGATNFSLLKQAGDVEENPGPTSMDWIWRILFLVGAATGAHSFEQVQLKESGPGLVQPSQTLSLTCTVSGFSLTSYHVHWVRQPPGKGLEWMGVMWSDGDTLYNSALKSRLSISRDTSKSQVLLQMDSLQSEDTATYYCARLQVFGYPGIRDYVMDAWGQGASVTVSSTREQKLISEEDLGSGIQNPDPAVYQLRDSKSSDKSVCLFTDFDSQTNVSQSKDSDVYITDKTVLDMRSMDFKSNSAVAWSNKSDFACANAFNNSIIPEDTFFPSPESSCGTQSFGLLDPKLCYLLDGILFIYGVILTALFLKRGRKKLLYIFKQPFMRPVQTTQEEDGCSCRFPEEEEGGCELRVKFSRSADAPAYQQGQNQLYNELNLGRREEYDVLDKRRGRDPEMGGKPQRRKNPQEGLYNELQKDKMAEAYSEIGMKGERRRGKGHDGLYQGLSTATKDTYDALHMQALPPR

SEQ ID NO: 20195 - protein, 942 aa, Artificial Sequence
  Synthetic Polypeptide
MALPVTALLLPLALLLHAARPDLVMTQSPFSLAVSEGEMVTIKCKSSQSLLSSRHQKNFLAWYRQKPGQSPKLLIYHASTRQSGVPDRFIGSGSGTDFTLTISDVQAEDLADYYCLQHYTSPYTFGAGTKLELKRLEGKPIPNPLLGLDSTGSGEDLKNVFPPEVAVFEPSEAEISHTQKATLVCLATGFYPDHVELSWWVNGKEVHSGVSTDPQPLKEQPALNDSRYCLSSRLRVSATFWQNPRNHFRCQVQFYGLSENDEWTQDRAKPVTQIVSAEAWGRADCGSQSFGLLDPKLCYLLDGILFIYGVILTALFLKRGRKKLLYIFKQPFMRPVQTTQEEDGCSCRFPEEEEGGCELRVKFSRSADAPAYQQGQNQLYNELNLGRREEYDVLDKRRGRDPEMGGKPQRRKNPQEGLYNELQKDKMAEAYSEIGMKGERRRGKGHDGLYQGLSTATKDTYDALHMQALPPRRAKRSGSGATNFSLLKQAGDVEENPGPTSMDWIWRILFLVGAATGAHSFEQVQLKESGPGLVQPSQTLSLTCTVSGFSLTSYHVHWVRQPPGKGLEWMGVMWSDGDTLYNSALKSRLSISRDTSKSQVLLQMDSLQSEDTATYYCARLQVFGYPGIRDYVMDAWGQGASVTVSSTREQKLISEEDLGSGIQNPDPAVYQLRDSKSSDKSVCLFTDFDSQTNVSQSKDSDVYITDKTVLDMRSMDFKSNSAVAWSNKSDFACANAFNNSIIPEDTFFPSPESSCGTQSFGLLDPKLCYLLDGILFIYGVILTALFLKRGRKKLLYIFKQPFMRPVQTTQEEDGCSCRFPEEEEGGCELRVKFSRSADAPAYQQGQNQLYNELNLGRREEYDVLDKRRGRDPEMGGKPQRRKNPQEGLYNELQKDKMAEAYSEIGMKGERRRGKGHDGLYQGLSTATKDTYDALHMQALPPR

SEQ ID NO: 20196 - protein, 832 aa, Artificial Sequence
  Synthetic Polypeptide
MALPVTALLLPLALLLHAARPDLVMTQSPFSLAVSEGEMVTIKCKSSQSLLSSRHQKNFLAWYRQKPGQSPKLLIYHASTRQSGVPDRFIGSGSGTDFTLTISDVQAEDLADYYCLQHYTSPYTFGAGTKLELKRLEQSFGLLDPKLCYLLDGILFIYGVILTALFLRVKFSRSADAPAYQQGQNQLYNELNLGRREEYDVLDKRRGRDPEMGGKPQRRKNPQEGLYNELQKDKMAEAYSEIGMKGERRRGKGHDGLYQGLSTATKDTYDALHMQALPPRRAKRSGSGATNFSLLKQAGDVEENPGPTSMDWIWRILFLVGAATGAHSFEQVQLKESGPGLVQPSQTLSLTCTVSGFSLTSYHVHWVRQPPGKGLEWMGVMWSDGDTLYNSALKSRLSISRDTSKSQVLLQMDSLQSEDTATYYCARLQVFGYPGIRDYVMDAWGQGASVTVSSTRQSFGLLDPKLCYLLDGILFIYGVILTALFLRVKFSRSADAPAYQQGQNQLYNELNLGRREEYDVLDKRRGRDPEMGGKPQRRKNPQEGLYNELQKDKMAEAYSEIGMKGERRRGKGHDGLYQGLSTATKDTYDALHMQALPPRRAKRSGSGVKQTLNFDLLKLAGDVESNPGPSRGHMTEYKPTVRLATRDDVPRAVRTLAAAFADYPATRHTVDPDRHIERVTELQELFLTRVGLDIGKVWVADDGAAVAVWTTPESVEAGAVFAEIGPRMAELSGSRLAAQQQMEGLLAPHRPKEPAWFLATVGVSPDHQGKGLGSAVVLPGVEAAERAGVPAFLETSAPRNLPFYERLGFTVTADVEVPEGPRTWCMTRKPGA

SEQ ID NO: 20197 - protein, 657 aa, Artificial Sequence
  Synthetic Polypeptide
MALPVTALLLPLALLLHAARPDLVMTQSPFSLAVSEGEMVTIKCKSSQSLLSSRHQKNFLAWYRQKPGQSPKLLIYHASTRQSGVPDRFIGSGSGTDFTLTISDVQAEDLADYYCLQHYTSPYTFGAGTKLELKRLEGQPKANPTVTLFPPSSEELQANKATLVCLISDFYPGAVTVAWKADGSPVKAGVETTKPSKQSNNKYAASSYLSLTPEQWKSHRSYSCQVTHEGSTVEKTVAPTECSPIKTDVITMDPKDNCSKDANDTLLLQLTNTSAYYMYLLLLLKSVVYFAIITCCLLRRTAFCCNGEKSRAKRSGSGATNFSLLKQAGDVEENPGPTSMDWIWRILFLVGAATGAHSFEQVQLKESGPGLVQPSQTLSLTCTVSGFSLTSYHVHWVRQPPGKGLEWMGVMWSDGDTLYNSALKSRLSISRDTSKSQVLLQMDSLQSEDTATYYCARLQVFGYPGIRDYVMDAWGQGASVTVSSTRASTKGPSVFPLAPSSKSTSGGTAALGCLVKDYFPEPVTVSWNSGALTSGVHTFPAVLQSSGLYSLSSVVTVPSSSLGTQTYICNVNHKPSNTKVDKRVEPKSCEVKTDSTDHVKPKETENTKQPSKSCHKPKAIVHTEKVNMMSLTVLGLRMLFAKTVAVNFLLTAKLFFL

SEQ ID NO: 20198 - protein, 635 aa, Artificial Sequence
  Synthetic Polypeptide
MALPVTALLLPLALLLHAARPDLVMTQSPFSLAVSEGEMVTIKCKSSQSLLSSRHQKNFLAWYRQKPGQSPKLLIYHASTRQSGVPDRFIGSGSGTDFTLTISDVQAEDLADYYCLQHYTSPYTFGAGTKLELKRLEGQPKANPTVTLFPPSSEELQANKATLVCLISDFYPGAVTVAWKADGSPVKAGVETTKPSKQSNNKYAASSYLSLTPEQWKSHRSYSCQVTHEGSTVEKTVAPTECSGRADCGITSASYHQGVLSATILYEILLGKATLYAVLVSALVLMAMVKRKDSRGRAKRSGSGATNFSLLKQAGDVEENPGPTSMDWIWRILFLVGAATGAHSFEQVQLKESGPGLVQPSQTLSLTCTVSGFSLTSYHVHWVRQPPGKGLEWMGVMWSDGDTLYNSALKSRLSISRDTSKSQVLLQMDSLQSEDTATYYCARLQVFGYPGIRDYVMDAWGQGASVTVSSTRASTKGPSVFPLAPSSKSTSGGTAALGCLVKDYFPEPVTVSWNSGALTSGVHTFPAVLQSSGLYSLSSVVTVPSSSLGTQTYICNVNHKPSNTKVDKRVEPKSCIPEDTFFPSSDVPCDVKLVEKSFETDTNLNFQNLSVIGFRILLLKVAGFNLLMTLRLWSS

SEQ ID NO: 20199 - protein, 635 aa, Artificial Sequence
  Synthetic Polypeptide
MALPVTALLLPLALLLHAARPDLVMTQSPFSLAVSEGEMVTIKCKSSQSLLSSRHQKNFLAWYRQKPGQSPKLLIYHASTRQSGVPDRFIGSGSGTDFTLTISDVQAEDLADYYCLQHYTSPYTFGAGTKLELKRLEGQPKANPTVTLFPPSSEELQANKATLVCLISDFYPGAVTVAWKADGSPVKAGVETTKPSKQSNNKYAASSYLSLTPEQWKSHRSYSCQVTHEGSTVEKTVAPTECSGRADCGFTSESYQQGVLSATILYEILLGKATLYAVLVSALVLMAMVKRKDSRGRAKRSGSGATNFSLLKQAGDVEENPGPTSMDWIWRILFLVGAATGAHSFEQVQLKESGPGLVQPSQTLSLTCTVSGFSLTSYHVHWVRQPPGKGLEWMGVMWSDGDTLYNSALKSRLSISRDTSKSQVLLQMDSLQSEDTATYYCARLQVFGYPGIRDYVMDAWGQGASVTVSSTRASTKGPSVFPLAPSSKSTSGGTAALGCLVKDYFPEPVTVSWNSGALTSGVHTFPAVLQSSGLYSLSSVVTVPSSSLGTQTYICNVNHKPSNTKVDKRVEPKSCIPEDTFFPSPESSCDVKLVEKSFETDTNLNFQNLSVIGFRILLLKVAGFNLLMTLRLWSS

SEQ ID NO: 20200 - protein, 461 aa, Artificial Sequence
  Synthetic Polypeptide
MALPVTALLLPLALLLHAARPDLVMTQSPFSLAVSEGEMVTIKCKSSQSLLSSRHQKNFLAWYRQKPGQSPKLLIYHASTRQSGVPDRFIGSGSGTDFTLTISDVQAEDLADYYCLQHYTSPYTFGAGTKLELKRGGGGSGGGGSGGGGSQVQLKESGPGLVQPSQTLSLTCTVSGFSLTSYHVHWVRQPPGKGLEWMGVMWSDGDTLYNSALKSRLSISRDTSKSQVLLQMDSLQSEDTATYYCARLQVFGYPGIRDYVMDAWGQGASVTVSSTRDGNEEMGGITQTPYKVSISGTTVILTCPQYPGSEILWQHNDKNIGGDEDDKNIGSDEDHLSLKEFSELEQSGYYVCYPRGSKPEDANFYLYLRARVCENCMEMDVMSVATIVIVDICITGGLLLLVYYWSKNRKAKAKPVTRGAGAGGRQRGQNKERPPPVPNPDYEPIRKGQRDLYSGLNQRRI

SEQ ID NO: 20201 - protein, 426 aa, Artificial Sequence
  Synthetic Polypeptide
MALPVTALLLPLALLLHAARPDLVMTQSPFSLAVSEGEMVTIKCKSSQSLLSSRHQKNFLAWYRQKPGQSPKLLIYHASTRQSGVPDRFIGSGSGTDFTLTISDVQAEDLADYYCLQHYTSPYTFGAGTKLELKRGGGGSGGGGSGGGGSQVQLKESGPGLVQPSQTLSLTCTVSGFSLTSYHVHWVRQPPGKGLEWMGVMWSDGDTLYNSALKSRLSISRDTSKSQVLLQMDSLQSEDTATYYCARLQVFGYPGIRDYVMDAWGQGASVTVSSTRFKIPIEELEDRVFVNCNTSITWVEGTVGTLLSDITRLDLGKRILDPRGIYRCNGTDIYKDKESTVQVHYRMCQSCVELDPATVAGIIVTDVIATLLLALGVFCFAGHETGRLSGAADTQALLRNDQVYQPLRDRDDAQYSHLGGNWARNK

SEQ ID NO: 20202 - protein, 436 aa, Artificial Sequence
  Synthetic Polypeptide
MALPVTALLLPLALLLHAARPDLVMTQSPFSLAVSEGEMVTIKCKSSQSLLSSRHQKNFLAWYRQKPGQSPKLLIYHASTRQSGVPDRFIGSGSGTDFTLTISDVQAEDLADYYCLQHYTSPYTFGAGTKLELKRGGGGSGGGGSGGGGSQVQLKESGPGLVQPSQTLSLTCTVSGFSLTSYHVHWVRQPPGKGLEWMGVMWSDGDTLYNSALKSRLSISRDTSKSQVLLQMDSLQSEDTATYYCARLQVFGYPGIRDYVMDAWGQGASVTVSSTRQSIKGNHLVKVYDYQEDGSVLLTCDAEAKNITWFKDGKMIGFLTEDKKKWNLGSNAKDPRGMYQCKGSQNKSKPLQVYYRMCQNCIELNAATISGFLFAEIVSIFVLAVGVYFIAGQDGVRQSRASDKQTLLPNDQLYQPLKDREDDQYSHLQGNQLRRN

SEQ ID NO: 20203 - protein, 419 aa, Artificial Sequence
  Synthetic Polypeptide
MALPVTALLLPLALLLHAARPDLVMTQSPFSLAVSEGEMVTIKCKSSQSLLSSRHQKNFLAWYRQKPGQSPKLLIYHASTRQSGVPDRFIGSGSGTDFTLTISDVQAEDLADYYCLQHYTSPYTFGAGTKLELKRGGGGSGGGGSGGGGSQVQLKESGPGLVQPSQTLSLTCTVSGFSLTSYHVHWVRQPPGKGLEWMGVMWSDGDTLYNSALKSRLSISRDTSKSQVLLQMDSLQSEDTATYYCARLQVFGYPGIRDYVMDAWGQGASVTVSSTRQSFGLLDPKLCYLLDGILFIYGVILTALFLRVKFSRSADAPAYQQGQNQLYNELNLGRREEYDVLDKRRGRDPEMGGKPQRRKNPQEGLYNELQKDKMAEAYSEIGMKGERRRGKGHDGLYQGLSTATKDTYDALHMQALPPR

SEQ ID NO: 20204 - protein, 461 aa, Artificial Sequence
  Synthetic Polypeptide
MALPVTALLLPLALLLHAARPQVQLKESGPGLVQPSQTLSLTCTVSGFSLTSYHVHWVRQPPGKGLEWMGVMWSDGDTLYNSALKSRLSISRDTSKSQVLLQMDSLQSEDTATYYCARLQVFGYPGIRDYVMDAWGQGASVTVSSGGGGSGGGGSGGGGSDLVMTQSPFSLAVSEGEMVTIKCKSSQSLLSSRHQKNFLAWYRQKPGQSPKLLIYHASTRQSGVPDRFIGSGSGTDFTLTISDVQAEDLADYYCLQHYTSPYTFGAGTKLELKRTRDGNEEMGGITQTPYKVSISGTTVILTCPQYPGSEILWQHNDKNIGGDEDDKNIGSDEDHLSLKEFSELEQSGYYVCYPRGSKPEDANFYLYLRARVCENCMEMDVMSVATIVIVDICITGGLLLLVYYWSKNRKAKAKPVTRGAGAGGRQRGQNKERPPPVPNPDYEPIRKGQRDLYSGLNQRRI

SEQ ID NO: 20205 - protein, 426 aa, Artificial Sequence
  Synthetic Polypeptide
MALPVTALLLPLALLLHAARPQVQLKESGPGLVQPSQTLSLTCTVSGFSLTSYHVHWVRQPPGKGLEWMGVMWSDGDTLYNSALKSRLSISRDTSKSQVLLQMDSLQSEDTATYYCARLQVFGYPGIRDYVMDAWGQGASVTVSSGGGGSGGGGSGGGGSDLVMTQSPFSLAVSEGEMVTIKCKSSQSLLSSRHQKNFLAWYRQKPGQSPKLLIYHASTRQSGVPDRFIGSGSGTDFTLTISDVQAEDLADYYCLQHYTSPYTFGAGTKLELKRTRFKIPIEELEDRVFVNCNTSITWVEGTVGTLLSDITRLDLGKRILDPRGIYRCNGTDIYKDKESTVQVHYRMCQSCVELDPATVAGIIVTDVIATLLLALGVFCFAGHETGRLSGAADTQALLRNDQVYQPLRDRDDAQYSHLGGNWARNK

SEQ ID NO: 20206 - protein, 436 aa, Artificial Sequence
  Synthetic Polypeptide
MALPVTALLLPLALLLHAARPQVQLKESGPGLVQPSQTLSLTCTVSGFSLTSYHVHWVRQPPGKGLEWMGVMWSDGDTLYNSALKSRLSISRDTSKSQVLLQMDSLQSEDTATYYCARLQVFGYPGIRDYVMDAWGQGASVTVSSGGGGSGGGGSGGGGSDLVMTQSPFSLAVSEGEMVTIKCKSSQSLLSSRHQKNFLAWYRQKPGQSPKLLIYHASTRQSGVPDRFIGSGSGTDFTLTISDVQAEDLADYYCLQHYTSPYTFGAGTKLELKRTRQSIKGNHLVKVYDYQEDGSVLLTCDAEAKNITWFKDGKMIGFLTEDKKKWNLGSNAKDPRGMYQCKGSQNKSKPLQVYYRMCQNCIELNAATISGFLFAEIVSIFVLAVGVYFIAGQDGVRQSRASDKQTLLPNDQLYQPLKDREDDQYSHLQGNQLRRN

SEQ ID NO: 20207 - protein, 419 aa, Artificial Sequence
  Synthetic Polypeptide
MALPVTALLLPLALLLHAARPQVQLKESGPGLVQPSQTLSLTCTVSGFSLTSYHVHWVRQPPGKGLEWMGVMWSDGDTLYNSALKSRLSISRDTSKSQVLLQMDSLQSEDTATYYCARLQVFGYPGIRDYVMDAWGQGASVTVSSGGGGSGGGGSGGGGSDLVMTQSPFSLAVSEGEMVTIKCKSSQSLLSSRHQKNFLAWYRQKPGQSPKLLIYHASTRQSGVPDRFIGSGSGTDFTLTISDVQAEDLADYYCLQHYTSPYTFGAGTKLELKRTRQSFGLLDPKLCYLLDGILFIYGVILTALFLRVKFSRSADAPAYQQGQNQLYNELNLGRREEYDVLDKRRGRDPEMGGKPQRRKNPQEGLYNELQKDKMAEAYSEIGMKGERRRGKGHDGLYQGLSTATKDTYDALHMQALPPR

SEQ ID NO: 20208 - protein, 652 aa, Artificial Sequence
  Synthetic Polypeptide
MALPVTALLLPLALLLHAARPDLVMTQSPFSLAVSEGEMVTIKCKSSQSLLSSRHQKNFLAWYRQKPGQSPKLLIYHASTRQSGVPDRFIGSGSGTDFTLTISDVQAEDLADYYCLQHYTSPYTFGAGTKLELKRGGGGSGGGGSGGGGSQVQLKESGPGLVQPSQTLSLTCTVSGFSLTSYHVHWVRQPPGKGLEWMGVMWSDGDTLYNSALKSRLSISRDTSKSQVLLQMDSLQSEDTATYYCARLQVFGYPGIRDYVMDAWGQGASVTVSSTRGSGIQNPDPAVYQLRDSKSSDKSVCLFTDFDSQTNVSQSKDSDVYITDKTVLDMRSMDFKSNSAVAWSNKSDFACANAFNNSIIPEDTFFPSPESSCDVKLVEKSFETDTNLNFQNLSVIGFRILLLKVAGFNLLMTLRLWSSRAKRSGSGVKQTLNFDLLKLAGDVESNPGPSRGHMTEYKPTVRLATRDDVPRAVRTLAAAFADYPATRHTVDPDRHIERVTELQELFLTRVGLDIGKVWVADDGAAVAVWTTPESVEAGAVFAEIGPRMAELSGSRLAAQQQMEGLLAPHRPKEPAWFLATVGVSPDHQGKGLGSAVVLPGVEAAERAGVPAFLETSAPRNLPFYERLGFTVTADVEVPEGPRTWCMTRKPGA

SEQ ID NO: 20209 - protein, 684 aa, Artificial Sequence
  Synthetic Polypeptide
MALPVTALLLPLALLLHAARPDLVMTQSPFSLAVSEGEMVTIKCKSSQSLLSSRHQKNFLAWYRQKPGQSPKLLIYHASTRQSGVPDRFIGSGSGTDFTLTISDVQAEDLADYYCLQHYTSPYTFGAGTKLELKRGGGGSGGGGSGGGGSQVQLKESGPGLVQPSQTLSLTCTVSGFSLTSYHVHWVRQPPGKGLEWMGVMWSDGDTLYNSALKSRLSISRDTSKSQVLLQMDSLQSEDTATYYCARLQVFGYPGIRDYVMDAWGQGASVTVSSLEDLKNVFPPEVAVFEPSEAEISHTQKATLVCLATGFYPDHVELSWWVNGKEVHSGVSTDPQPLKEQPALNDSRYCLSSRLRVSATFWQNPRNHFRCQVQFYGLSENDEWTQDRAKPVTQIVSAEAWGRADCGFTSESYQQGVLSATILYEILLGKATLYAVLVSALVLMAMVKRKDSRGRAKRSGSGATNFSLLKQAGDVEENPGPTRGHMTEYKPTVRLATRDDVPRAVRTLAAAFADYPATRHTVDPDRHIERVTELQELFLTRVGLDIGKVWVADDGAAVAVWTTPESVEAGAVFAEIGPRMAELSGSRLAAQQQMEGLLAPHRPKEPAWFLATVGVSPDHQGKGLGSAVVLPGVEAAERAGVPAFLETSAPRNLPFYERLGFTVTADVEVPEGPRTWCMTRKPGA

SEQ ID NO: 20210 - protein, 734 aa, Artificial Sequence
  Synthetic Polypeptide
MALPVTALLLPLALLLHAARPDLVMTQSPFSLAVSEGEMVTIKCKSSQSLLSSRHQKNFLAWYRQKPGQSPKLLIYHASTRQSGVPDRFIGSGSGTDFTLTISDVQAEDLADYYCLQHYTSPYTFGAGTKLELKRGGGGSGGGGSGGGGSQVQLKESGPGLVQPSQTLSLTCTVSGFSLTSYHVHWVRQPPGKGLEWMGVMWSDGDTLYNSALKSRLSISRDTSKSQVLLQMDSLQSEDTATYYCARLQVFGYPGIRDYVMDAWGQGASVTVSSTREQKLISEEDLGSGTPFPSLAPPIMLLVDGKQQMVVVCLVLDVAPPGLDSPIWFSAGNGSALDAFTYGPSPATDGTWTNLAHLSLPSEELASWEPLVCHTGPGAEGHSRSTQPMHLSGEASTARTCPQEPLRGTPGGALWLGVLRLLLFKLLLFDLLLTCSCLCDPAGPLPSPATTTRLRALGSHRLHPATETGGREATSSPRPQPRDRRWGDTPPGRKPGSPVRAKRSGSGVKQTLNFDLLKLAGDVESNPGPSRSRGHMTEYKPTVRLATRDDVPRAVRTLAAAFADYPATRHTVDPDRHIERVTELQELFLTRVGLDIGKVWVADDGAAVAVWTTPESVEAGAVFAEIGPRMAELSGSRLAAQQQMEGLLAPHRPKEPAWFLATVGVSPDHQGKGLGSAVVLPGVEAAERAGVPAFLETSAPRNLPFYERLGFTVTADVEVPEGPRTWCMTRKPGA

SEQ ID NO: 20211 - protein, 545 aa, Artificial Sequence
  Synthetic Polypeptide
MALPVTALLLPLALLLHAARPDLVMTQSPFSLAVSEGEMVTIKCKSSQSLLSSRHQKNFLAWYRQKPGQSPKLLIYHASTRQSGVPDRFIGSGSGTDFTLTISDVQAEDLADYYCLQHYTSPYTFGAGTKLELKRLEDLKNVFPPEVAVFEPSEAEISHTQKATLVCLATGFYPDHVELSWWVNGKEVHSGVSTDPQPLKEQPALNDSRYCLSSRLRVSATFWQNPRNHFRCQVQFYGLSENDEWTQDRAKPVTQIVSAEAWGRADCGFTSESYQQGVLSATILYEILLGKATLYAVLVSALVLMAMVKRKDSRGRAKRSGSGATNFSLLKQAGDVEENPGPTRGHMTEYKPTVRLATRDDVPRAVRTLAAAFADYPATRHTVDPDRHIERVTELQELFLTRVGLDIGKVWVADDGAAVAVWTTPESVEAGAVFAEIGPRMAELSGSRLAAQQQMEGLLAPHRPKEPAWFLATVGVSPDHQGKGLGSAVVLPGVEAAERAGVPAFLETSAPRNLPFYERLGFTVTADVEVPEGPRTWCMTRKPGA

SEQ ID NO: 20212 - protein, 315 aa, Artificial Sequence
  Synthetic Polypeptide
MALPVTALLLPLALLLHAARPDLVMTQSPFSLAVSEGEMVTIKCKSSQSLLSSRHQKNFLAWYRQKPGQSPKLLIYHASTRQSGVPDRFIGSGSGTDFTLTISDVQAEDLADYYCLQHYTSPYTFGAGTKLELKRLEDLKNVFPPEVAVFEPSEAEISHTQKATLVCLATGFYPDHVELSWWVNGKEVHSGVSTDPQPLKEQPALNDSRYCLSSRLRVSATFWQNPRNHFRCQVQFYGLSENDEWTQDRAKPVTQIVSAEAWGRADCGFTSESYQQGVLSATILYEILLGKATLYAVLVSALVLMAMVKRKDSRG

SEQ ID NO: 20213 - protein, 453 aa, Artificial Sequence
  Synthetic Polypeptide
MDWIWRILFLVGAATGAHSFEQVQLKESGPGLVQPSQTLSLTCTVSGFSLTSYHVHWVRQPPGKGLEWMGVMWSDGDTLYNSALKSRLSISRDTSKSQVLLQMDSLQSEDTATYYCARLQVFGYPGIRDYVMDAWGQGASVTVSSTRIQNPDPAVYQLRDSKSSDKSVCLFTDFDSQTNVSQSKDSDVYITDKTVLDMRSMDFKSNSAVAWSNKSDFACANAFNNSIIPEDTFFPSPESSCDVKLVEKSFETDTNLNFQNLSVIGFRILLLKVAGFNLLMTLRLWSSRAKRSGSGVKQTLNFDLLKLAGDVESNPGPSRGHMAKPLSQEESTLIERATATINSIPISEDYSVASAALSSDGRIFTGVNVYHFTGGPCAELVVLGTAAAAAAGNLTCIVAIGNENRGILSPCGRCRQVLLDLHPGIKAIVKDSDGQPTAVGIRELLPSGYVWEG

SEQ ID NO: 20214 - protein, 287 aa, Artificial Sequence
  Synthetic Polypeptide
MDWIWRILFLVGAATGAHSFEQVQLKESGPGLVQPSQTLSLTCTVSGFSLTSYHVHWVRQPPGKGLEWMGVMWSDGDTLYNSALKSRLSISRDTSKSQVLLQMDSLQSEDTATYYCARLQVFGYPGIRDYVMDAWGQGASVTVSSTRIQNPDPAVYQLRDSKSSDKSVCLFTDFDSQTNVSQSKDSDVYITDKTVLDMRSMDFKSNSAVAWSNKSDFACANAFNNSIIPEDTFFPSPESSCDVKLVEKSFETDTNLNFQNLSVIGFRILLLKVAGFNLLMTLRLWSS

SEQ ID NO: 20215 - protein, 563 aa, Artificial Sequence
  Synthetic Polypeptide
MALPVTALLLPLALLLHAARPDLVMTQSPFSLAVSEGEMVTIKCKSSQSLLSSRHQKNFLAWYRQKPGQSPKLLIYHASTRQSGVPDRFIGSGSGTDFTLTISDVQAEDLADYYCLQHYTSPYTFGAGTKLELKRLEGKPIPNPLLGLDSTGSGEDLKNVFPPEVAVFEPSEAEISHTQKATLVCLATGFYPDHVELSWWVNGKEVHSGVCTDPQPLKEQPALNDSRYCLSSRLRVSATFWQNPRNHFRCQVQFYGLSENDEWTQDRAKPVTQIVSAEAWGRADCGFTSESYQQGVLSATILYEILLGKATLYAVLVSALVLMAMVKRKDSRGRAKRSGSGATNFSLLKQAGDVEENPGPTRGHMTEYKPTVRLATRDDVPRAVRTLAAAFADYPATRHTVDPDRHIERVTELQELFLTRVGLDIGKVWVADDGAAVAVWTTPESVEAGAVFAEIGPRMAELSGSRLAAQQQMEGLLAPHRPKEPAWFLATVGVSPDHQGKGLGSAVVLPGVEAAERAGVPAFLETSAPRNLPFYERLGFTVTADVEVPEGPRTWCMTRKPGA

SEQ ID NO: 20216 - protein, 333 aa, Artificial Sequence
  Synthetic Polypeptide
MALPVTALLLPLALLLHAARPDLVMTQSPFSLAVSEGEMVTIKCKSSQSLLSSRHQKNFLAWYRQKPGQSPKLLIYHASTRQSGVPDRFIGSGSGTDFTLTISDVQAEDLADYYCLQHYTSPYTFGAGTKLELKRLEGKPIPNPLLGLDSTGSGEDLKNVFPPEVAVFEPSEAEISHTQKATLVCLATGFYPDHVELSWWVNGKEVHSGVCTDPQPLKEQPALNDSRYCLSSRLRVSATFWQNPRNHFRCQVQFYGLSENDEWTQDRAKPVTQIVSAEAWGRADCGFTSESYQQGVLSATILYEILLGKATLYAVLVSALVLMAMVKRKDSRG

SEQ ID NO: 20217 - protein, 465 aa, Artificial Sequence
  Synthetic Polypeptide
MDWIWRILFLVGAATGAHSFEQVQLKESGPGLVQPSQTLSLTCTVSGFSLTSYHVHWVRQPPGKGLEWMGVMWSDGDTLYNSALKSRLSISRDTSKSQVLLQMDSLQSEDTATYYCARLQVFGYPGIRDYVMDAWGQGASVTVSSTREQKLISEEDGSGIQNPDPAVYQLRDSKSSDKSVCLFTDFDSQTNVSQSKDSDVYITDKCVLDMRSMDFKSNSAVAWSNKSDFACANAFNNSIIPEDTFFPSPESSCDVKLVEKSFETDTNLNFQNLSVIGFRILLLKVAGFNLLMTLRLWSSRAKRSGSGVKQTLNFDLLKLAGDVESNPGPSRGHMAKPLSQEESTLIERATATINSIPISEDYSVASAALSSDGRIFTGVNVYHFTGGPCAELVVLGTAAAAAAGNLTCIVAIGNENRGILSPCGRCRQVLLDLHPGIKAIVKDSDGQPTAVGIRELLPSGYVWEG

SEQ ID NO: 20218 - protein, 299 aa, Artificial Sequence
  Synthetic Polypeptide
MDWIWRILFLVGAATGAHSFEQVQLKESGPGLVQPSQTLSLTCTVSGFSLTSYHVHWVRQPPGKGLEWMGVMWSDGDTLYNSALKSRLSISRDTSKSQVLLQMDSLQSEDTATYYCARLQVFGYPGIRDYVMDAWGQGASVTVSSTREQKLISEEDGSGIQNPDPAVYQLRDSKSSDKSVCLFTDFDSQTNVSQSKDSDVYITDKCVLDMRSMDFKSNSAVAWSNKSDFACANAFNNSIIPEDTFFPSPESSCDVKLVEKSFETDTNLNFQNLSVIGFRILLLKVAGFNLLMTLRLWSS

SEQ ID NO: 20219 - protein, 652 aa, Artificial Sequence
  Synthetic Polypeptide
MALPVTALLLPLALLLHAARPDLVMTQSPFSLAVSEGEMVTIKCKSSQSLLSSRHQKNFLAWYRQKPGQSPKLLIYHASTRQSGVPDRFIGSGSGTDFTLTISDVQAEDLADYYCLQHYTSPYTFGAGTKLELKRGGGGSGGGGSGGGGSQVQLKESGPGLVQPSQTLSLTCTVSGFSLTSYHVHWVRQPPGKGLEWMGVMWSDGDTLYNSALKSRLSISRDTSKSQVLLQMDSLQSEDTATYYCARLQVFGYPGIRDYVMDAWGQGASVTVSSTRGSGIQNPDPAVYQLRDSKSSDKSVCLFTDFDSQTNVSQSKDSDVYITDKTVLDMRSMDFKSNSAVAWSNKSDFACANAFNNSIIPEDTFFPSSDVPCDVKLVEKSFETDTNLNFQNLSVIGFRILLLKVAGFNLLMTLRLWSSRAKRSGSGVKQTLNFDLLKLAGDVESNPGPSRGHMTEYKPTVRLATRDDVPRAVRTLAAAFADYPATRHTVDPDRHIERVTELQELFLTRVGLDIGKVWVADDGAAVAVWTTPESVEAGAVFAEIGPRMAELSGSRLAAQQQMEGLLAPHRPKEPAWFLATVGVSPDHQGKGLGSAVVLPGVEAAERAGVPAFLETSAPRNLPFYERLGFTVTADVEVPEGPRTWCMTRKPGA

SEQ ID NO: 20220 - protein, 684 aa, Artificial Sequence
  Synthetic Polypeptide
MALPVTALLLPLALLLHAARPDLVMTQSPFSLAVSEGEMVTIKCKSSQSLLSSRHQKNFLAWYRQKPGQSPKLLIYHASTRQSGVPDRFIGSGSGTDFTLTISDVQAEDLADYYCLQHYTSPYTFGAGTKLELKRGGGGSGGGGSGGGGSQVQLKESGPGLVQPSQTLSLTCTVSGFSLTSYHVHWVRQPPGKGLEWMGVMWSDGDTLYNSALKSRLSISRDTSKSQVLLQMDSLQSEDTATYYCARLQVFGYPGIRDYVMDAWGQGASVTVSSLEDLKNVFPPEVAVFEPSKAEIAHTQKATLVCLATGFYPDHVELSWWVNGKEVHSGVSTDPQPLKEQPALNDSRYCLSSRLRVSATFWQNPRNHFRCQVQFYGLSENDEWTQDRAKPVTQIVSAEAWGRADCGITSASYHQGVLSATILYEILLGKATLYAVLVSALVLMAMVKRKDSRGRAKRSGSGATNFSLLKQAGDVEENPGPTRGHMTEYKPTVRLATRDDVPRAVRTLAAAFADYPATRHTVDPDRHIERVTELQELFLTRVGLDIGKVWVADDGAAVAVWTTPESVEAGAVFAEIGPRMAELSGSRLAAQQQMEGLLAPHRPKEPAWFLATVGVSPDHQGKGLGSAVVLPGVEAAERAGVPAFLETSAPRNLPFYERLGFTVTADVEVPEGPRTWCMTRKPGA

SEQ ID NO: 20221 - protein, 707 aa, Artificial Sequence
  Synthetic Polypeptide
MALPVTALLLPLALLLHAARPDLVMTQSPFSLAVSEGEMVTIKCKSSQSLLSSRHQKNFLAWYRQKPGQSPKLLIYHASTRQSGVPDRFIGSGSGTDFTLTISDVQAEDLADYYCLQHYTSPYTFGAGTKLELKRGGGGSGGGGSGGGGSQVQLKESGPGLVQPSQTLSLTCTVSGFSLTSYHVHWVRQPPGKGLEWMGVMWSDGDTLYNSALKSRLSISRDTSKSQVLLQMDSLQSEDTATYYCARLQVFGYPGIRDYVMDAWGQGASVTVSSTRGSGGGGSGGGGSGDGNEEMGGITQTPYKVSISGTTVILTCPQYPGSEILWQHNDKNIGGDEDDKNIGSDEDHLSLKEFSELEQSGYYVCYPRGSKPEDANFYLYLRARVCENCMEMDVMSVATIVIVDICITGGLLLLVYYWSKNRKAKAKPVTRGAGAGGRQRGQNKERPPPVPNPDYEPIRKGQRDLYSGLNQRRIRAKRSGSGVKQTLNFDLLKLAGDVESNPGPSRGHMTEYKPTVRLATRDDVPRAVRTLAAAFADYPATRHTVDPDRHIERVTELQELFLTRVGLDIGKVWVADDGAAVAVWTTPESVEAGAVFAEIGPRMAELSGSRLAAQQQMEGLLAPHRPKEPAWFLATVGVSPDHQGKGLGSAVVLPGVEAAERAGVPAFLETSAPRNLPFYERLGFTVTADVEVPEGPRTWCMTRKPGA

SEQ ID NO: 20222 - protein, 672 aa, Artificial Sequence
  Synthetic Polypeptide
MALPVTALLLPLALLLHAARPDLVMTQSPFSLAVSEGEMVTIKCKSSQSLLSSRHQKNFLAWYRQKPGQSPKLLIYHASTRQSGVPDRFIGSGSGTDFTLTISDVQAEDLADYYCLQHYTSPYTFGAGTKLELKRGGGGSGGGGSGGGGSQVQLKESGPGLVQPSQTLSLTCTVSGFSLTSYHVHWVRQPPGKGLEWMGVMWSDGDTLYNSALKSRLSISRDTSKSQVLLQMDSLQSEDTATYYCARLQVFGYPGIRDYVMDAWGQGASVTVSSTRGSGGGGSGGGGSGFKIPIEELEDRVFVNCNTSITWVEGTVGTLLSDITRLDLGKRILDPRGIYRCNGTDIYKDKESTVQVHYRMCQSCVELDPATVAGIIVTDVIATLLLALGVFCFAGHETGRLSGAADTQALLRNDQVYQPLRDRDDAQYSHLGGNWARNKRAKRSGSGVKQTLNFDLLKLAGDVESNPGPSRGHMTEYKPTVRLATRDDVPRAVRTLAAAFADYPATRHTVDPDRHIERVTELQELFLTRVGLDIGKVWVADDGAAVAVWTTPESVEAGAVFAEIGPRMAELSGSRLAAQQQMEGLLAPHRPKEPAWFLATVGVSPDHQGKGLGSAVVLPGVEAAERAGVPAFLETSAPRNLPFYERLGFTVTADVEVPEGPRTWCMTRKPGA

SEQ ID NO: 20223 - protein, 682 aa, Artificial Sequence
  Synthetic Polypeptide
MALPVTALLLPLALLLHAARPDLVMTQSPFSLAVSEGEMVTIKCKSSQSLLSSRHQKNFLAWYRQKPGQSPKLLIYHASTRQSGVPDRFIGSGSGTDFTLTISDVQAEDLADYYCLQHYTSPYTFGAGTKLELKRGGGGSGGGGSGGGGSQVQLKESGPGLVQPSQTLSLTCTVSGFSLTSYHVHWVRQPPGKGLEWMGVMWSDGDTLYNSALKSRLSISRDTSKSQVLLQMDSLQSEDTATYYCARLQVFGYPGIRDYVMDAWGQGASVTVSSTRGSGGGGSGGGGSGQSIKGNHLVKVYDYQEDGSVLLTCDAEAKNITWFKDGKMIGFLTEDKKKWNLGSNAKDPRGMYQCKGSQNKSKPLQVYYRMCQNCIELNAATISGFLFAEIVSIFVLAVGVYFIAGQDGVRQSRASDKQTLLPNDQLYQPLKDREDDQYSHLQGNQLRRNRAKRSGSGVKQTLNFDLLKLAGDVESNPGPSRGHMTEYKPTVRLATRDDVPRAVRTLAAAFADYPATRHTVDPDRHIERVTELQELFLTRVGLDIGKVWVADDGAAVAVWTTPESVEAGAVFAEIGPRMAELSGSRLAAQQQMEGLLAPHRPKEPAWFLATVGVSPDHQGKGLGSAVVLPGVEAAERAGVPAFLETSAPRNLPFYERLGFTVTADVEVPEGPRTWCMTRKPGA

SEQ ID NO: 20224 - protein, 665 aa, Artificial Sequence
  Synthetic Polypeptide
MALPVTALLLPLALLLHAARPDLVMTQSPFSLAVSEGEMVTIKCKSSQSLLSSRHQKNFLAWYRQKPGQSPKLLIYHASTRQSGVPDRFIGSGSGTDFTLTISDVQAEDLADYYCLQHYTSPYTFGAGTKLELKRGGGGSGGGGSGGGGSQVQLKESGPGLVQPSQTLSLTCTVSGFSLTSYHVHWVRQPPGKGLEWMGVMWSDGDTLYNSALKSRLSISRDTSKSQVLLQMDSLQSEDTATYYCARLQVFGYPGIRDYVMDAWGQGASVTVSSTRGSGGGGSGGGGSGQSFGLLDPKLCYLLDGILFIYGVILTALFLRVKFSRSADAPAYQQGQNQLYNELNLGRREEYDVLDKRRGRDPEMGGKPQRRKNPQEGLYNELQKDKMAEAYSEIGMKGERRRGKGHDGLYQGLSTATKDTYDALHMQALPPRRAKRSGSGVKQTLNFDLLKLAGDVESNPGPSRGHMTEYKPTVRLATRDDVPRAVRTLAAAFADYPATRHTVDPDRHIERVTELQELFLTRVGLDIGKVWVADDGAAVAVWTTPESVEAGAVFAEIGPRMAELSGSRLAAQQQMEGLLAPHRPKEPAWFLATVGVSPDHQGKGLGSAVVLPGVEAAERAGVPAFLETSAPRNLPFYERLGFTVTADVEVPEGPRTWCMTRKPGA

SEQ ID NO: 20225 - protein, 766 aa, Artificial Sequence
  Synthetic Polypeptide
MALPVTALLLPLALLLHAARPEVQLVESGGGLVQPGGSLRLSCAASGFSFSDFWMSWVRQAPGKGLEWVATISQAGSEKDYVDSVKGRFTISRDNAKKSLYLQMNSLRAEDTAVYYCASGVYSFDYRGQGTLVTVSSGTGGGGSGGGGSGGGGSEFDLVMTQSPFSLAVSEGEMVTIKCKSSQSLLSSRHQKNFLAWYRQKPGQSPKLLIYHASTRQSGVPDRFIGSGSGTDFTLTISDVQAEDLADYYCLQHYTSPYTFGAGTKLELKRLEDLKNVFPPEVAVFEPSEAEISHTQKATLVCLATGFYPDHVELSWWVNGKEVHSGVCTDPQPLKEQPALNDSRYCLSSRLRVSATFWQNPRNHFRCQVQFYGLSENDEWTQDRAKPVTQIVSAEAWGRADCGFTSESYQQGVLSATILYEILLGKATLYAVLVSALVLMAMVKRKDSRGRAKRSGSGATNFSLLKQAGDVEENPGPTSMDWIWRILFLVGAATGAHSFEQVQLKESGPGLVQPSQTLSLTCTVSGFSLTSYHVHWVRQPPGKGLEWMGVMWSDGDTLYNSALKSRLSISRDTSKSQVLLQMDSLQSEDTATYYCARLQVFGYPGIRDYVMDAWGQGASVTVSSTRIQNPDPAVYQLRDSKSSDKSVCLFTDFDSQTNVSQSKDSDVYITDKCVLDMRSMDFKSNSAVAWSNKSDFACANAFNNSIIPEDTFFPSPESSCDVKLVEKSFETDTNLNFQNLSVIGFRILLLKVAGFNLLMTLRLWSS

SEQ ID NO: 20226 - protein, 770 aa, Artificial Sequence
  Synthetic Polypeptide
MALPVTALLLPLALLLHAARPEVQLVESGGGLVQPGGSLRLSCAASGFSFSDFWMSWVRQAPGKGLEWVATISQAGSEKDYVDSVKGRFTISRDNAKKSLYLQMNSLRAEDTAVYYCASGVYSFDYRGQGTLVTVSSGTGGGGSGGGGSGGGGSEFDLVMTQSPFSLAVSEGEMVTIKCKSSQSLLSSRHQKNFLAWYRQKPGQSPKLLIYHASTRQSGVPDRFIGSGSGTDFTLTISDVQAEDLADYYCLQHYTSPYTFGAGTKLELKRLEIQNPDPAVYQLRDSKSSDKSVCLFTDFDSQTNVSQSKDSDVYITDKCVLDMRSMDFKSNSAVAWSNKSDFACANAFNNSIIPEDTFFPSPESSCDVKLVEKSFETDTNLNFQNLSVIGFRILLLKVAGFNLLMTLRLWSSRAKRSGSGVKQTLNFDLLKLAGDVESNPGPTSMDWIWRILFLVGAATGAHSFEQVQLKESGPGLVQPSQTLSLTCTVSGFSLTSYHVHWVRQPPGKGLEWMGVMWSDGDTLYNSALKSRLSISRDTSKSQVLLQMDSLQSEDTATYYCARLQVFGYPGIRDYVMDAWGQGASVTVSSTREDLKNVFPPEVAVFEPSEAEISHTQKATLVCLATGFYPDHVELSWWVNGKEVHSGVCTDPQPLKEQPALNDSRYCLSSRLRVSATFWQNPRNHFRCQVQFYGLSENDEWTQDRAKPVTQIVSAEAWGRADCGFTSESYQQGVLSATILYEILLGKATLYAVLVSALVLMAMVKRKDSRG

SEQ ID NO: 20227 - protein, 962 aa, Artificial Sequence
  Synthetic Polypeptide
MALPVTALLLPLALLLHAARPEVQLVESGGGLVQPGGSLRLSCAASGFSFSDFWMSWVRQAPGKGLEWVATISQAGSEKDYVDSVKGRFTISRDNAKKSLYLQMNSLRAEDTAVYYCASGVYSFDYRGQGTLVTVSSGTGGGGSGGGGSGGGGSEFDLVMTQSPFSLAVSEGEMVTIKCKSSQSLLSSRHQKNFLAWYRQKPGQSPKLLIYHASTRQSGVPDRFIGSGSGTDFTLTISDVQAEDLADYYCLQHYTSPYTFGAGTKLELKRLEDLKNVFPPEVAVFEPSEAEISHTQKATLVCLATGFYPDHVELSWWVNGKEVHSGVSTDPQPLKEQPALNDSRYCLSSRLRVSATFWQNPRNHFRCQVQFYGLSENDEWTQDRAKPVTQIVSAEAWGRADCGSQSFGLLDPKLCYLLDGILFIYGVILTALFLRVKFSRSADAPAYQQGQNQLYNELNLGRREEYDVLDKRRGRDPEMGGKPQRRKNPQEGLYNELQKDKMAEAYSEIGMKGERRRGKGHDGLYQGLSTATKDTYDALHMQALPPRRAKRSGSGATNFSLLKQAGDVEENPGPTSMDWIWRILFLVGAATGAHSFEQVQLKESGPGLVQPSQTLSLTCTVSGFSLTSYHVHWVRQPPGKGLEWMGVMWSDGDTLYNSALKSRLSISRDTSKSQVLLQMDSLQSEDTATYYCARLQVFGYPGIRDYVMDAWGQGASVTVSSTRIQNPDPAVYQLRDSKSSDKSVCLFTDFDSQTNVSQSKDSDVYITDKTVLDMRSMDFKSNSAVAWSNKSDFACANAFNNSIIPEDTFFPSPESSCGTQSFGLLDPKLCYLLDGILFIYGVILTALFLRVKFSRSADAPAYQQGQNQLYNELNLGRREEYDVLDKRRGRDPEMGGKPQRRKNPQEGLYNELQKDKMAEAYSEIGMKGERRRGKGHDGLYQGLSTATKDTYDALHMQALPPR

SEQ ID NO: 20228 - protein, 792 aa, Artificial Sequence
  Synthetic Polypeptide
MALPVTALLLPLALLLHAARPEVQLVESGGGLVQPGGSLRLSCAASGFSFSDFWMSWVRQAPGKGLEWVATISQAGSEKDYVDSVKGRFTISRDNAKKSLYLQMNSLRAEDTAVYYCASGVYSFDYRGQGTLVTVSSGTGGGGSGGGGSGGGGSEFDLVMTQSPFSLAVSEGEMVTIKCKSSQSLLSSRHQKNFLAWYRQKPGQSPKLLIYHASTRQSGVPDRFIGSGSGTDFTLTISDVQAEDLADYYCLQHYTSPYTFGAGTKLELKRLEGQPKANPTVTLFPPSSEELQANKATLVCLISDFYPGAVTVAWKADGSPVKAGVETTKPSKQSNNKYAASSYLSLTPEQWKSHRSYSCQVTHEGSTVEKTVAPTECSPIKTDVITMDPKDNCSKDANDTLLLQLTNTSAYYMYLLLLLKSVVYFAIITCCLLRRTAFCCNGEKSRAKRSGSGATNFSLLKQAGDVEENPGPTSMDWIWRILFLVGAATGAHSFEQVQLKESGPGLVQPSQTLSLTCTVSGFSLTSYHVHWVRQPPGKGLEWMGVMWSDGDTLYNSALKSRLSISRDTSKSQVLLQMDSLQSEDTATYYCARLQVFGYPGIRDYVMDAWGQGASVTVSSTRASTKGPSVFPLAPSSKSTSGGTAALGCLVKDYFPEPVTVSWNSGALTSGVHTFPAVLQSSGLYSLSSVVTVPSSSLGTQTYICNVNHKPSNTKVDKRVEPKSCEVKTDSTDHVKPKETENTKQPSKSCHKPKAIVHTEKVNMMSLTVLGLRMLFAKTVAVNFLLTAKLFFL

SEQ ID NO: 20229 - protein, 773 aa, Artificial Sequence
  Synthetic Polypeptide
MALPVTALLLPLALLLHAARPEVQLVESGGGLVQPGGSLRLSCAASGFSFSDFWMSWVRQAPGKGLEWVATISQAGSEKDYVDSVKGRFTISRDNAKKSLYLQMNSLRAEDTAVYYCASGVYSFDYRGQGTLVTVSSGTGGGGSGGGGSGGGGSEFDLVMTQSPFSLAVSEGEMVTIKCKSSQSLLSSRHQKNFLAWYRQKPGQSPKLLIYHASTRQSGVPDRFIGSGSGTDFTLTISDVQAEDLADYYCLQHYTSPYTFGAGTKLELKRLEGQPKANPTVTLFPPSSEELQANKATLVCLISDFYPGAVTVAWKADGSPVKAGVETTKPSKQSNNKYAASSYLSLTPEQWKSHRSYSCQVTHEGSTVEKTVAPTECSGRADCGFTSESYQQGVLSATILYEILLGKATLYAVLVSALVLMAMVKRKDSRGRAKRSGSGVKQTLNFDLLKLAGDVESNPGPTSMDWIWRILFLVGAATGAHSFEQVQLKESGPGLVQPSQTLSLTCTVSGFSLTSYHVHWVRQPPGKGLEWMGVMWSDGDTLYNSALKSRLSISRDTSKSQVLLQMDSLQSEDTATYYCARLQVFGYPGIRDYVMDAWGQGASVTVSSTRASTKGPSVFPLAPSSKSTSGGTAALGCLVKDYFPEPVTVSWNSGALTSGVHTFPAVLQSSGLYSLSSVVTVPSSSLGTQTYICNVNHKPSNTKVDKRVEPKSCIPEDTFFPSPESSCDVKLVEKSFETDTNLNFQNLSVIGFRILLLKVAGFNLLMTLRLWSS

SEQ ID NO: 20230 - protein, 907 aa, Artificial Sequence
  Synthetic Polypeptide
MALPVTALLLPLALLLHAARPEVQLVESGGGLVQPGGSLRLSCAASGFSFSDFWMSWVRQAPGKGLEWVATISQAGSEKDYVDSVKGRFTISRDNAKKSLYLQMNSLRAEDTAVYYCASGVYSFDYRGQGTLVTVSSGTGGGGSGGGGSGGGGSEFDLVMTQSPFSLAVSEGEMVTIKCKSSQSLLSSRHQKNFLAWYRQKPGQSPKLLIYHASTRQSGVPDRFIGSGSGTDFTLTISDVQAEDLADYYCLQHYTSPYTFGAGTKLELKRLEIQNPDPAVYQLRDSKSSDKSVCLFTDFDSQTNVSQSKDSDVYITDKCVLDMRSMDFKSNSAVAWSNKSDFACANAFNNSIIPEDTFFPSPESSCDVKLVEKSFETDTNLNFQNLSVIGFRILLLKVAGFNLLMTLRLWSSRAKRSGSGVKQTLNFDLLKLAGDVESNPGPTSMDWIWRILFLVGAATGAHSGPQLQLQESGPGLVKPSETLSLTCTVSGDSISSGDYYWGWIRQPPGKGLEWIGHIYYSGVTYYNPSLKSRVTISVDTSRNQFSLKLSSVTAADTAVYYCTREDSSNWRSRGQGTLVTVSSGSGGGGSGGGGSGGGGSFEQVQLKESGPGLVQPSQTLSLTCTVSGFSLTSYHVHWVRQPPGKGLEWMGVMWSDGDTLYNSALKSRLSISRDTSKSQVLLQMDSLQSEDTATYYCARLQVFGYPGIRDYVMDAWGQGASVTVSSTREDLKNVFPPEVAVFEPSEAEISHTQKATLVCLATGFYPDHVELSWWVNGKEVHSGVCTDPQPLKEQPALNDSRYCLSSRLRVSATFWQNPRNHFRCQVQFYGLSENDEWTQDRAKPVTQIVSAEAWGRADCGFTSESYQQGVLSATILYEILLGKATLYAVLVSALVLMAMVKRKDSRG

SEQ ID NO: 20231 - protein, 1099 aa, Artificial Sequence
  Synthetic Polypeptide
MALPVTALLLPLALLLHAARPEVQLVESGGGLVQPGGSLRLSCAASGFSFSDFWMSWVRQAPGKGLEWVATISQAGSEKDYVDSVKGRFTISRDNAKKSLYLQMNSLRAEDTAVYYCASGVYSFDYRGQGTLVTVSSGTGGGGSGGGGSGGGGSEFDLVMTQSPFSLAVSEGEMVTIKCKSSQSLLSSRHQKNFLAWYRQKPGQSPKLLIYHASTRQSGVPDRFIGSGSGTDFTLTISDVQAEDLADYYCLQHYTSPYTFGAGTKLELKRLEDLKNVFPPEVAVFEPSEAEISHTQKATLVCLATGFYPDHVELSWWVNGKEVHSGVSTDPQPLKEQPALNDSRYCLSSRLRVSATFWQNPRNHFRCQVQFYGLSENDEWTQDRAKPVTQIVSAEAWGRADCGSQSFGLLDPKLCYLLDGILFIYGVILTALFLRVKFSRSADAPAYQQGQNQLYNELNLGRREEYDVLDKRRGRDPEMGGKPQRRKNPQEGLYNELQKDKMAEAYSEIGMKGERRRGKGHDGLYQGLSTATKDTYDALHMQALPPRRAKRSGSGATNFSLLKQAGDVEENPGPTSMDWIWRILFLVGAATGAHSGPQLQLQESGPGLVKPSETLSLTCTVSGDSISSGDYYWGWIRQPPGKGLEWIGHIYYSGVTYYNPSLKSRVTISVDTSRNQFSLKLSSVTAADTAVYYCTREDSSNWRSRGQGTLVTVSSGSGGGGSGGGGSGGGGSFEQVQLKESGPGLVQPSQTLSLTCTVSGFSLTSYHVHWVRQPPGKGLEWMGVMWSDGDTLYNSALKSRLSISRDTSKSQVLLQMDSLQSEDTATYYCARLQVFGYPGIRDYVMDAWGQGASVTVSSTRIQNPDPAVYQLRDSKSSDKSVCLFTDFDSQTNVSQSKDSDVYITDKTVLDMRSMDFKSNSAVAWSNKSDFACANAFNNSIIPEDTFFPSPESSCGTQSFGLLDPKLCYLLDGILFIYGVILTALFLRVKFSRSADAPAYQQGQNQLYNELNLGRREEYDVLDKRRGRDPEMGGKPQRRKNPQEGLYNELQKDKMAEAYSEIGMKGERRRGKGHDGLYQGLSTATKDTYDALHMQALPPR

SEQ ID NO: 20232 - protein, 929 aa, Artificial Sequence
  Synthetic Polypeptide
MALPVTALLLPLALLLHAARPEVQLVESGGGLVQPGGSLRLSCAASGFSFSDFWMSWVRQAPGKGLEWVATISQAGSEKDYVDSVKGRFTISRDNAKKSLYLQMNSLRAEDTAVYYCASGVYSFDYRGQGTLVTVSSGTGGGGSGGGGSGGGGSEFDLVMTQSPFSLAVSEGEMVTIKCKSSQSLLSSRHQKNFLAWYRQKPGQSPKLLIYHASTRQSGVPDRFIGSGSGTDFTLTISDVQAEDLADYYCLQHYTSPYTFGAGTKLELKRLEGQPKANPTVTLFPPSSEELQANKATLVCLISDFYPGAVTVAWKADGSPVKAGVETTKPSKQSNNKYAASSYLSLTPEQWKSHRSYSCQVTHEGSTVEKTVAPTECSPIKTDVITMDPKDNCSKDANDTLLLQLTNTSAYYMYLLLLLKSVVYFAIITCCLLRRTAFCCNGEKSRAKRSGSGATNFSLLKQAGDVEENPGPTSMDWIWRILFLVGAATGAHSGPQLQLQESGPGLVKPSETLSLTCTVSGDSISSGDYYWGWIRQPPGKGLEWIGHIYYSGVTYYNPSLKSRVTISVDTSRNQFSLKLSSVTAADTAVYYCTREDSSNWRSRGQGTLVTVSSGSGGGGSGGGGSGGGGSFEQVQLKESGPGLVQPSQTLSLTCTVSGFSLTSYHVHWVRQPPGKGLEWMGVMWSDGDTLYNSALKSRLSISRDTSKSQVLLQMDSLQSEDTATYYCARLQVFGYPGIRDYVMDAWGQGASVTVSSTRASTKGPSVFPLAPSSKSTSGGTAALGCLVKDYFPEPVTVSWNSGALTSGVHTFPAVLQSSGLYSLSSVVTVPSSSLGTQTYICNVNHKPSNTKVDKRVEPKSCEVKTDSTDHVKPKETENTKQPSKSCHKPKAIVHTEKVNMMSLTVLGLRMLFAKTVAVNFLLTAKLFFL

SEQ ID NO: 20233 - protein, 910 aa, Artificial Sequence
  Synthetic Polypeptide
MALPVTALLLPLALLLHAARPEVQLVESGGGLVQPGGSLRLSCAASGFSFSDFWMSWVRQAPGKGLEWVATISQAGSEKDYVDSVKGRFTISRDNAKKSLYLQMNSLRAEDTAVYYCASGVYSFDYRGQGTLVTVSSGTGGGGSGGGGSGGGGSEFDLVMTQSPFSLAVSEGEMVTIKCKSSQSLLSSRHQKNFLAWYRQKPGQSPKLLIYHASTRQSGVPDRFIGSGSGTDFTLTISDVQAEDLADYYCLQHYTSPYTFGAGTKLELKRLEGQPKANPTVTLFPPSSEELQANKATLVCLISDFYPGAVTVAWKADGSPVKAGVETTKPSKQSNNKYAASSYLSLTPEQWKSHRSYSCQVTHEGSTVEKTVAPTECSGRADCGFTSESYQQGVLSATILYEILLGKATLYAVLVSALVLMAMVKRKDSRGRAKRSGSGVKQTLNFDLLKLAGDVESNPGPTSMDWIWRILFLVGAATGAHSGPQLQLQESGPGLVKPSETLSLTCTVSGDSISSGDYYWGWIRQPPGKGLEWIGHIYYSGVTYYNPSLKSRVTISVDTSRNQFSLKLSSVTAADTAVYYCTREDSSNWRSRGQGTLVTVSSGSGGGGSGGGGSGGGGSFEQVQLKESGPGLVQPSQTLSLTCTVSGFSLTSYHVHWVRQPPGKGLEWMGVMWSDGDTLYNSALKSRLSISRDTSKSQVLLQMDSLQSEDTATYYCARLQVFGYPGIRDYVMDAWGQGASVTVSSTRASTKGPSVFPLAPSSKSTSGGTAALGCLVKDYFPEPVTVSWNSGALTSGVHTFPAVLQSSGLYSLSSVVTVPSSSLGTQTYICNVNHKPSNTKVDKRVEPKSCIPEDTFFPSPESSCDVKLVEKSFETDTNLNFQNLSVIGFRILLLKVAGFNLLMTLRLWSS

SEQ ID NO: 20234 - protein, 767 aa, Artificial Sequence
  Synthetic Polypeptide
MALPVTALLLPLALLLHAARPEVQVLESGGGLVQPGGSLRLSCAASGFTFSNFAMSWVRQAPGKGLEWVSTISGSAGTTDYADSVKGRFTISRDNSKKTLYLQMNSLRVEDTAVYYCADGRGPFFDYRGQGTLVTVSSGTGGGGSGGGGSGGGGSEFDLVMTQSPFSLAVSEGEMVTIKCKSSQSLLSSRHQKNFLAWYRQKPGQSPKLLIYHASTRQSGVPDRFIGSGSGTDFTLTISDVQAEDLADYYCLQHYTSPYTFGAGTKLELKRLEDLKNVFPPEVAVFEPSEAEISHTQKATLVCLATGFYPDHVELSWWVNGKEVHSGVCTDPQPLKEQPALNDSRYCLSSRLRVSATFWQNPRNHFRCQVQFYGLSENDEWTQDRAKPVTQIVSAEAWGRADCGFTSESYQQGVLSATILYEILLGKATLYAVLVSALVLMAMVKRKDSRGRAKRSGSGATNFSLLKQAGDVEENPGPTSMDWIWRILFLVGAATGAHSFEQVQLKESGPGLVQPSQTLSLTCTVSGFSLTSYHVHWVRQPPGKGLEWMGVMWSDGDTLYNSALKSRLSISRDTSKSQVLLQMDSLQSEDTATYYCARLQVFGYPGIRDYVMDAWGQGASVTVSSTRIQNPDPAVYQLRDSKSSDKSVCLFTDFDSQTNVSQSKDSDVYITDKCVLDMRSMDFKSNSAVAWSNKSDFACANAFNNSIIPEDTFFPSPESSCDVKLVEKSFETDTNLNFQNLSVIGFRILLLKVAGFNLLMTLRLWSS

SEQ ID NO: 20235 - protein, 768 aa, Artificial Sequence
  Synthetic Polypeptide
MALPVTALLLPLALLLHAARPDLVMTQSPFSLAVSEGEMVTIKCKSSQSLLSSRHQKNFLAWYRQKPGQSPKLLIYHASTRQSGVPDRFIGSGSGTDFTLTISDVQAEDLADYYCLQHYTSPYTFGAGTKLELKRLEDLKNVFPPEVAVFEPSEAEISHTQKATLVCLATGFYPDHVELSWWVNGKEVHSGVCTDPQPLKEQPALNDSRYCLSSRLRVSATFWQNPRNHFRCQVQFYGLSENDEWTQDRAKPVTQIVSAEAWGRADCGFTSESYQQGVLSATILYEILLGKATLYAVLVSALVLMAMVKRKDSRGRAKRSGSGATNFSLLKQAGDVEENPGPTSMDWIWRILFLVGAATGAHSGPEVQLVESGGGLVQAGGSLRLSCAASGRTFSMGWFRQAPGKEREFVAAITYSGGSPYYADSVKGRFTISRDNAKNTVYLQMNSLKPEDTAVYYCAANPTYGSDWNAENWGQGTQVTVSSGSGGGGSGGGGSGGGGSFEQVQLKESGPGLVQPSQTLSLTCTVSGFSLTSYHVHWVRQPPGKGLEWMGVMWSDGDTLYNSALKSRLSISRDTSKSQVLLQMDSLQSEDTATYYCARLQVFGYPGIRDYVMDAWGQGASVTVSSTRIQNPDPAVYQLRDSKSSDKSVCLFTDFDSQTNVSQSKDSDVYITDKCVLDMRSMDFKSNSAVAWSNKSDFACANAFNNSIIPEDTFFPSPESSCDVKLVEKSFETDTNLNFQNLSVIGFRILLLKVAGFNLLMTLRLWSS

SEQ ID NO: 20236 - protein, 895 aa, Artificial Sequence
  Synthetic Polypeptide
MALPVTALLLPLALLLHAARPDLVMTQSPFSLAVSEGEMVTIKCKSSQSLLSSRHQKNFLAWYRQKPGQSPKLLIYHASTRQSGVPDRFIGSGSGTDFTLTISDVQAEDLADYYCLQHYTSPYTFGAGTKLELKRLEDLKNVFPPEVAVFEPSEAEISHTQKATLVCLATGFYPDHVELSWWVNGKEVHSGVCTDPQPLKEQPALNDSRYCLSSRLRVSATFWQNPRNHFRCQVQFYGLSENDEWTQDRAKPVTQIVSAEAWGRADCGFTSESYQQGVLSATILYEILLGKATLYAVLVSALVLMAMVKRKDSRGRAKRSGSGATNFSLLKQAGDVEENPGPTSMDWIWRILFLVGAATGAHSQLQLQESGPGLVKPSETLSLTCTVSGGSISSGDYYWGWIRQPPGKGLEWIGSISYSGSTYYNPSLKSRVTISVDTSRNQFSLKLSSVTAADTAVYYCTREDSSNWRSRGQGTLVTVSSSGGGGSGGGGSEVQLVESGGGLVQAGGSLRLSCAASGRTFSMGWFRQAPGKEREFVAAITYSGGSPYYADSVKGRFTISRDNAKNTVYLQMNSLKPEDTAVYYCAANPTYGSDWNAENWGQGTQVTVSSGSGGGGSGGGGSGGGGSFEQVQLKESGPGLVQPSQTLSLTCTVSGFSLTSYHVHWVRQPPGKGLEWMGVMWSDGDTLYNSALKSRLSISRDTSKSQVLLQMDSLQSEDTATYYCARLQVFGYPGIRDYVMDAWGQGASVTVSSTRIQNPDPAVYQLRDSKSSDKSVCLFTDFDSQTNVSQSKDSDVYITDKCVLDMRSMDFKSNSAVAWSNKSDFACANAFNNSIIPEDTFFPSPESSCDVKLVEKSFETDTNLNFQNLSVIGFRILLLKVAGFNLLMTLRLWSS

SEQ ID NO: 20237 - protein, 904 aa, Artificial Sequence
  Synthetic Polypeptide
MALPVTALLLPLALLLHAARPEVQVLESGGGLVQPGGSLRLSCAASGFTFSNFAMSWVRQAPGKGLEWVSTISGSAGTTDYADSVKGRFTISRDNSKKTLYLQMNSLRVEDTAVYYCADGRGPFFDYRGQGTLVTVSSGTGGGGSGGGGSGGGGSEFDLVMTQSPFSLAVSEGEMVTIKCKSSQSLLSSRHQKNFLAWYRQKPGQSPKLLIYHASTRQSGVPDRFIGSGSGTDFTLTISDVQAEDLADYYCLQHYTSPYTFGAGTKLELKRLEDLKNVFPPEVAVFEPSEAEISHTQKATLVCLATGFYPDHVELSWWVNGKEVHSGVCTDPQPLKEQPALNDSRYCLSSRLRVSATFWQNPRNHFRCQVQFYGLSENDEWTQDRAKPVTQIVSAEAWGRADCGFTSESYQQGVLSATILYEILLGKATLYAVLVSALVLMAMVKRKDSRGRAKRSGSGATNFSLLKQAGDVEENPGPTSMDWIWRILFLVGAATGAHSGPEVQLVESGGGLVQAGGSLRLSCAASGRTFSMGWFRQAPGKEREFVAAITYSGGSPYYASSVRGRFTISRDNAKNTVYLQMNSLKPEDTAVYYCAANPTYGSDWNAENWGQGTQVTVSSGSGGGGSGGGGSGGGGSFEQVQLKESGPGLVQPSQTLSLTCTVSGFSLTSYHVHWVRQPPGKGLEWMGVMWSDGDTLYNSALKSRLSISRDTSKSQVLLQMDSLQSEDTATYYCARLQVFGYPGIRDYVMDAWGQGASVTVSSTRIQNPDPAVYQLRDSKSSDKSVCLFTDFDSQTNVSQSKDSDVYITDKCVLDMRSMDFKSNSAVAWSNKSDFACANAFNNSIIPEDTFFPSPESSCDVKLVEKSFETDTNLNFQNLSVIGFRILLLKVAGFNLLMTLRLWSS

SEQ ID NO: 20238 - protein, 736 aa, Artificial Sequence
  Synthetic Polypeptide
MALPVTALLLPLALLLHAARPDIQLTQSPSFLSASVGDRVTITCRASQDISSYLAWYQQKPGNAPKLLIYAASLLQSGVPSRFSAFGSGTEFTLTISSLQPEDFATYYCQHLKSYPLFTFGPGTKVDIKRGGGGSGGGGSGGGGSEVQLVESGGRVVRPGGSLRLSCAASGFTFDDYGMSWVRQPPGKGLEFVSGLNWNGDITAFTDSVKGRFTISRDNVKSSLYLQMNSLRADDTAFYYCARVRTWGDYTTGEEIINSWYFDLWGRGTLVTVSSTREQKLISEEDLAKPTTTPAPRPPTPAPTIASQPLSLRPEACRPAAGGAVHTRGLDFACDIYIWAPLAGTCGVLLLSLVITLYCKRGRKKLLYIFKQPFMRPVQTTQEEDGCSCRFPEEEEGGCELRVKFSRSADAPAYQQGQNQLYNELNLGRREEYDVLDKRRGRDPEMGGKPRRKNPQEGLYNELQKDKMAEAYSEIGMKGERRRGKGHDGLYQGLSTATKDTYDALHMQALPPRSSGSGEGRGSLLTCGDVEENPGPHMTEYKPTVRLATRDDVPRAVRTLAAAFADYPATRHTVDPDRHIERVTELQELFLTRVGLDIGKVWVADDGAAVAVWTTPESVEAGAVFAEIGPRMAELSGSRLAAQQQMEGLLAPHRPKEPAWFLATVGVSPDHQGKGLGSAVVLPGVEAAERAGVPAFLETSAPRNLPFYERLGFTVTADVEVPEGPRTWCMTRKPGA

SEQ ID NO: 20239 - protein, 730 aa, Artificial Sequence
  Synthetic Polypeptide
MALPVTALLLPLALLLHAARPDIQLTQSPSFLSASVGDRVTITCRASQDISSYLAWYQQKPGNAPKLLIYAASLLQSGVPSRFSAFGSGTEFTLTISSLQPEDFATYYCQHLKSYPLFTFGPGTKVDIKRGGGGSGGGGSGGGGSEVQLVESGGRVVRPGGSLRLSCAASGFTFDDYGMSWVRQPPGKGLEFVSGLNWNGDITAFTDSVKGRFTISRDNVKSSLYLQMNSLRADDTAFYYCARVRTWGDYTTGEEIINSWYFDLWGRGTLVTVSSTREQKLISEEDLKIEVMYPPPYLDNEKSNGTIIHVKGKHLCPSPLFPGPSKPFWVLVVVGGVLACYSLLVTVAFIIFWVRSKRSRLLHSDYMNMTPRRPGPTRKHYQPYAPPRDFAAYRSRVKFSRSADAPAYQQGQNQLYNELNLGRREEYDVLDKRRGRDPEMGGKPRRKNPQEGLYNELQKDKMAEAYSEIGMKGERRRGKGHDGLYQGLSTATKDTYDALHMQALPPRSSGSGEGRGSLLTCGDVEENPGPHMTEYKPTVRLATRDDVPRAVRTLAAAFADYPATRHTVDPDRHIERVTELQELFLTRVGLDIGKVWVADDGAAVAVWTTPESVEAGAVFAEIGPRMAELSGSRLAAQQQMEGLLAPHRPKEPAWFLATVGVSPDHQGKGLGSAVVLPGVEAAERAGVPAFLETSAPRNLPFYERLGFTVTADVEVPEGPRTWCMTRKPGA

SEQ ID NO: 20240 - protein, 507 aa, Artificial Sequence
  Synthetic Polypeptide
MALPVTALLLPLALLLHAARPDIQLTQSPSFLSASVGDRVTITCRASQDISSYLAWYQQKPGNAPKLLIYAASLLQSGVPSRFSAFGSGTEFTLTISSLQPEDFATYYCQHLKSYPLFTFGPGTKVDIKRGGGGSGGGGSGGGGSEVQLVESGGRVVRPGGSLRLSCAASGFTFDDYGMSWVRQPPGKGLEFVSGLNWNGDITAFTDSVKGRFTISRDNVKSSLYLQMNSLRADDTAFYYCARVRTWGDYTTGEEIINSWYFDLWGRGTLVTVSSTREQKLISEEDLKIEVMYPPPYLDNEKSNGTIIHVKGKHLCPSPLFPGPSKPFWVLVVVGGVLACYSLLVTVAFIIFWVRSKRSRLLHSDYMNMTPRRPGPTRKHYQPYAPPRDFAAYRSRVKFSRSADAPAYQQGQNQLYNELNLGRREEYDVLDKRRGRDPEMGGKPRRKNPQEGLYNELQKDKMAEAYSEIGMKGERRRGKGHDGLYQGLSTATKDTYDALHMQALPPR

SEQ ID NO: 20241 - protein, 513 aa, Artificial Sequence
  Synthetic Polypeptide
MALPVTALLLPLALLLHAARPDIQLTQSPSFLSASVGDRVTITCRASQDISSYLAWYQQKPGNAPKLLIYAASLLQSGVPSRFSAFGSGTEFTLTISSLQPEDFATYYCQHLKSYPLFTFGPGTKVDIKRGGGGSGGGGSGGGGSEVQLVESGGRVVRPGGSLRLSCAASGFTFDDYGMSWVRQPPGKGLEFVSGLNWNGDITAFTDSVKGRFTISRDNVKSSLYLQMNSLRADDTAFYYCARVRTWGDYTTGEEIINSWYFDLWGRGTLVTVSSTREQKLISEEDLAKPTTTPAPRPPTPAPTIASQPLSLRPEACRPAAGGAVHTRGLDFACDIYIWAPLAGTCGVLLLSLVITLYCKRGRKKLLYIFKQPFMRPVQTTQEEDGCSCRFPEEEEGGCELRVKFSRSADAPAYQQGQNQLYNELNLGRREEYDVLDKRRGRDPEMGGKPRRKNPQEGLYNELQKDKMAEAYSEIGMKGERRRGKGHDGLYQGLSTATKDTYDALHMQALPPR

SEQ ID NO: 20242 - protein, 513 aa, Artificial Sequence
  Synthetic Polypeptide
MALPVTALLLPLALLLHAARPEVQLVESGGRVVRPGGSLRLSCAASGFTFDDYGMSWVRQPPGKGLEFVSGLNWNGDITAFTDSVKGRFTISRDNVKSSLYLQMNSLRADDTAFYYCARVRTWGDYTTGEEIINSWYFDLWGRGTLVTVSSGGGGSGGGGSGGGGSDIQLTQSPSFLSASVGDRVTITCRASQDISSYLAWYQQKPGNAPKLLIYAASLLQSGVPSRFSAFGSGTEFTLTISSLQPEDFATYYCQHLKSYPLFTFGPGTKVDIKRTREQKLISEEDLAKPTTTPAPRPPTPAPTIASQPLSLRPEACRPAAGGAVHTRGLDFACDIYIWAPLAGTCGVLLLSLVITLYCKRGRKKLLYIFKQPFMRPVQTTQEEDGCSCRFPEEEEGGCELRVKFSRSADAPAYQQGQNQLYNELNLGRREEYDVLDKRRGRDPEMGGKPRRKNPQEGLYNELQKDKMAEAYSEIGMKGERRRGKGHDGLYQGLSTATKDTYDALHMQALPPR

SEQ ID NO: 20243 - protein, 926 aa, Artificial Sequence
  Synthetic Polypeptide
MALPVTALLLPLALLLHAARPDIQLTQSPSFLSASVGDRVTITCRASQDISSYLAWYQQKPGNAPKLLIYAASLLQSGVPSRFSAFGSGTEFTLTISSLQPEDFATYYCQHLKSYPLFTFGPGTKVDIKRGGGGSGGGGSGGGGSEVQLVESGGRVVRPGGSLRLSCAASGFTFDDYGMSWVRQPPGKGLEFVSGLNWNGDITAFTDSVKGRFTISRDNVKSSLYLQMNSLRADDTAFYYCARVRTWGDYTTGEEIINSWYFDLWGRGTLVTVSSTREQKLISEEDLAKPTTTPAPRPPTPAPTIASQPLSLRPEACRPAAGGAVHTRGLDFACDIYIWAPLAGTCGVLLLSLVITLYCGRARVKFSRSADAPAYQQGQNQLYNELNLGRREEYDVLDKRRGRDPEMGGKPRRKNPQEGLYNELQKDKMAEAYSEIGMKGERRRGKGHDGLYQGLSTATKDTYDALHMQALPPRSRGSGATNFSLLKQAGDVEENPGPGIHMATYEVLCEVARKLGTDDREVVLFLLNVFIPQPTLAQLIGALRALKEEGRLTFPLLAECLFRAGRRDLLRDLLHLDPRFLERHLAGTMSYFSPYQLTVLHVDGELCARDIRSLIFLSKDTIGSRSTPQTFLHWVYCMENLDLLGPTDVDALMSMLRSLSRVDLQRQVQTLMGLHLSGPSHSQHYRHTPLETDFYDYKDDDDKTSGSGEGRGSLLTCGDVEENPGPHMTEYKPTVRLATRDDVPRAVRTLAAAFADYPATRHTVDPDRHIERVTELQELFLTRVGLDIGKVWVADDGAAVAVWTTPESVEAGAVFAEIGPRMAELSGSRLAAQQQMEGLLAPHRPKEPAWFLATVGVSPDHQGKGLGSAVVLPGVEAAERAGVPAFLETSAPRNLPFYERLGFTVTADVEVPEGPRTWCMTRKPGA

SEQ ID NO: 20244 - protein, 866 aa, Artificial Sequence
  Synthetic Polypeptide
MALPVTALLLPLALLLHAARPDIQLTQSPSFLSASVGDRVTITCRASQDISSYLAWYQQKPGNAPKLLIYAASLLQSGVPSRFSAFGSGTEFTLTISSLQPEDFATYYCQHLKSYPLFTFGPGTKVDIKRLEIQNPDPAVYQLRDSKSSDKSVCLFTDFDSQTNVSQSKDSDVYITDKCVLDMRSMDFKSNSAVAWSNKSDFACANAFNNSIIPEDTFFPSSDVPCDVKLVEKSFETDTNLNFQNLSVIGFRILLLKVAGFNLLMTLRLWSSRAKRSGSGVKQTLNFDLLKLAGDVESNPGPTSMDWIWRILFLVGAATGAHSFEEVQLVESGGRVVRPGGSLRLSCAASGFTFDDYGMSWVRQPPGKGLEFVSGLNWNGDITAFTDSVKGRFTISRDNVKSSLYLQMNSLRADDTAFYYCARVRTWGDYTTGEEIINSWYFDLWGRGTLVTVSSTREDLKNVFPPEVAVFEPSKAEIAHTQKATLVCLATGFYPDHVELSWWVNGKEVHSGVCTDPQPLKEQPALNDSRYCLSSRLRVSATFWQNPRNHFRCQVQFYGLSENDEWTQDRAKPVTQIVSAEAWGRADCGITSASYHQGVLSATILYEILLGKATLYAVLVSALVLMAMVKRKDSRGRAKRSGSGATNFSLLKQAGDVEENPGPSRGHMTEYKPTVRLATRDDVPRAVRTLAAAFADYPATRHTVDPDRHIERVTELQELFLTRVGLDIGKVWVADDGAAVAVWTTPESVEAGAVFAEIGPRMAELSGSRLAAQQQMEGLLAPHRPKEPAWFLATVGVSPDHQGKGLGSAVVLPGVEAAERAGVPAFLETSAPRNLPFYERLGFTVTADVEVPEGPRTWCMTRKPGA

SEQ ID NO: 20245 - protein, 865 aa, Artificial Sequence
  Synthetic Polypeptide
MALPVTALLLPLALLLHAARPDIQLTQSPSFLSASVGDRVTITCRASQDISSYLAWYQQKPGNAPKLLIYAASLLQSGVPSRFSAFGSGTEFTLTISSLQPEDFATYYCQHLKSYPLFTFGPGTKVDIKRLEDLKNVFPPEVAVFEPSKAEIAHTQKATLVCLATGFYPDHVELSWWVNGKEVHSGVCTDPQPLKEQPALNDSRYCLSSRLRVSATFWQNPRNHFRCQVQFYGLSENDEWTQDRAKPVTQIVSAEAWGRADCGITSASYHQGVLSATILYEILLGKATLYAVLVSALVLMAMVKRKDSRGRAKRSGSGATNFSLLKQAGDVEENPGPTSMDWIWRILFLVGAATGAHSFEEVQLVESGGRVVRPGGSLRLSCAASGFTFDDYGMSWVRQPPGKGLEFVSGLNWNGDITAFTDSVKGRFTISRDNVKSSLYLQMNSLRADDTAFYYCARVRTWGDYTTGEEIINSWYFDLWGRGTLVTVSSTRIQNPDPAVYQLRDSKSSDKSVCLFTDFDSQTNVSQSKDSDVYITDKCVLDMRSMDFKSNSAVAWSNKSDFACANAFNNSIIPEDTFFPSSDVPCDVKLVEKSFETDTNLNFQNLSVIGFRILLLKVAGFNLLMTLRLWSSRAKRSGSGVKQTLNFDLLKLAGDVESNPGPSRGHMTEYKPTVRLATRDDVPRAVRTLAAAFADYPATRHTVDPDRHIERVTELQELFLTRVGLDIGKVWVADDGAAVAVWTTPESVEAGAVFAEIGPRMAELSGSRLAAQQQMEGLLAPHRPKEPAWFLATVGVSPDHQGKGLGSAVVLPGVEAAERAGVPAFLETSAPRNLPFYERLGFTVTADVEVPEGPRTWCMTRKPGA

SEQ ID NO: 20246 - protein, 632 aa, Artificial Sequence
  Synthetic Polypeptide
MALPVTALLLPLALLLHAARPDIQLTQSPSFLSASVGDRVTITCRASQDISSYLAWYQQKPGNAPKLLIYAASLLQSGVPSRFSAFGSGTEFTLTISSLQPEDFATYYCQHLKSYPLFTFGPGTKVDIKRLEDLKNVFPPEVAVFEPSEAEISHTQKATLVCLATGFYPDHVELSWWVNGKEVHSGVCTDPQPLKEQPALNDSRYCLSSRLRVSATFWQNPRNHFRCQVQFYGLSENDEWTQDRAKPVTQIVSAEAWGRADCGFTSESYQQGVLSATILYEILLGKATLYAVLVSALVLMAMVKRKDSRGRAKRSGSGATNFSLLKQAGDVEENPGPTSMDWIWRILFLVGAATGAHSFEEVQLVESGGRVVRPGGSLRLSCAASGFTFDDYGMSWVRQPPGKGLEFVSGLNWNGDITAFTDSVKGRFTISRDNVKSSLYLQMNSLRADDTAFYYCARVRTWGDYTTGEEIINSWYFDLWGRGTLVTVSSTRIQNPDPAVYQLRDSKSSDKSVCLFTDFDSQTNVSQSKDSDVYITDKCVLDMRSMDFKSNSAVAWSNKSDFACANAFNNSIIPEDTFFPSPESSCDVKLVEKSFETDTNLNFQNLSVIGFRILLLKVAGFNLLMTLRLWSS

SEQ ID NO: 20247 - protein, 857 aa, Artificial Sequence
  Synthetic Polypeptide
MALPVTALLLPLALLLHAARPDIQLTQSPSFLSASVGDRVTITCRASQDISSYLAWYQQKPGNAPKLLIYAASLLQSGVPSRFSAFGSGTEFTLTISSLQPEDFATYYCQHLKSYPLFTFGPGTKVDIKRLEDLKNVFPPEVAVFEPSEAEISHTQKATLVCLATGFYPDHVELSWWVNGKEVHSGVCTDPQPLKEQPALNDSRYCLSSRLRVSATFWQNPRNHFRCQVQFYGLSENDEWTQDRAKPVTQIVSAEAWGRADCGFTSESYQQGVLSATILYEILLGKATLYAVLVSALVLMAMVKRKDSRGRAKRSGSGATNFSLLKQAGDVEENPGPTSMDWIWRILFLVGAATGAHSFEEVQLVESGGRVVRPGGSLRLSCAASGFTFDDYGMSWVRQPPGKGLEFVSGLNWNGDITAFTDSVKGRFTISRDNVKSSLYLQMNSLRADDTAFYYCARVRTWGDYTTGEEIINSWYFDLWGRGTLVTVSSTRIQNPDPAVYQLRDSKSSDKSVCLFTDFDSQTNVSQSKDSDVYITDKCVLDMRSMDFKSNSAVAWSNKSDFACANAFNNSIIPEDTFFPSPESSCDVKLVEKSFETDTNLNFQNLSVIGFRILLLKVAGFNLLMTLRLWSSRAKRSGSGVKQTLNFDLLKLAGDVESNPGPSRGGIHTMATYEVLCEVARKLGTDDREVVLFLLNVFIPQPTLAQLIGALRALKEEGRLTFPLLAECLFRAGRRDLLRDLLHLDPRFLERHLAGTMSYFSPYQLTVLHVDGELCARDIRSLIFLSKDTIGSRSTPQTFLHWVYCMENLDLLGPTDVDALMSMLRSLSRVDLQRQVQTLMGLHLSGPSHSQHYRHTP

SEQ ID NO: 20248 - protein, 636 aa, Artificial Sequence
  Synthetic Polypeptide
MALPVTALLLPLALLLHAARPDIQLTQSPSFLSASVGDRVTITCRASQDISSYLAWYQQKPGNAPKLLIYAASLLQSGVPSRFSAFGSGTEFTLTISSLQPEDFATYYCQHLKSYPLFTFGPGTKVDIKRLEIQNPDPAVYQLRDSKSSDKSVCLFTDFDSQTNVSQSKDSDVYITDKCVLDMRSMDFKSNSAVAWSNKSDFACANAFNNSIIPEDTFFPSPESSCDVKLVEKSFETDTNLNFQNLSVIGFRILLLKVAGFNLLMTLRLWSSRAKRSGSGVKQTLNFDLLKLAGDVESNPGPTSMDWIWRILFLVGAATGAHSFEEVQLVESGGRVVRPGGSLRLSCAASGFTFDDYGMSWVRQPPGKGLEFVSGLNWNGDITAFTDSVKGRFTISRDNVKSSLYLQMNSLRADDTAFYYCARVRTWGDYTTGEEIINSWYFDLWGRGTLVTVSSTREDLKNVFPPEVAVFEPSEAEISHTQKATLVCLATGFYPDHVELSWWVNGKEVHSGVCTDPQPLKEQPALNDSRYCLSSRLRVSATFWQNPRNHFRCQVQFYGLSENDEWTQDRAKPVTQIVSAEAWGRADCGFTSESYQQGVLSATILYEILLGKATLYAVLVSALVLMAMVKRKDSRG

SEQ ID NO: 20249 - protein, 858 aa, Artificial Sequence
  Synthetic Polypeptide
MALPVTALLLPLALLLHAARPDIQLTQSPSFLSASVGDRVTITCRASQDISSYLAWYQQKPGNAPKLLIYAASLLQSGVPSRFSAFGSGTEFTLTISSLQPEDFATYYCQHLKSYPLFTFGPGTKVDIKRLEIQNPDPAVYQLRDSKSSDKSVCLFTDFDSQTNVSQSKDSDVYITDKCVLDMRSMDFKSNSAVAWSNKSDFACANAFNNSIIPEDTFFPSPESSCDVKLVEKSFETDTNLNFQNLSVIGFRILLLKVAGFNLLMTLRLWSSRAKRSGSGVKQTLNFDLLKLAGDVESNPGPTSMDWIWRILFLVGAATGAHSFEEVQLVESGGRVVRPGGSLRLSCAASGFTFDDYGMSWVRQPPGKGLEFVSGLNWNGDITAFTDSVKGRFTISRDNVKSSLYLQMNSLRADDTAFYYCARVRTWGDYTTGEEIINSWYFDLWGRGTLVTVSSTREDLKNVFPPEVAVFEPSEAEISHTQKATLVCLATGFYPDHVELSWWVNGKEVHSGVCTDPQPLKEQPALNDSRYCLSSRLRVSATFWQNPRNHFRCQVQFYGLSENDEWTQDRAKPVTQIVSAEAWGRADCGFTSESYQQGVLSATILYEILLGKATLYAVLVSALVLMAMVKRKDSRGRAKRSGSGATNFSLLKQAGDVEENPGPSRGGIHTMATYEVLCEVARKLGTDDREVVLFLLNVFIPQPTLAQLIGALRALKEEGRLTFPLLAECLFRAGRRDLLRDLLHLDPRFLERHLAGTMSYFSPYQLTVLHVDGELCARDIRSLIFLSKDTIGSRSTPQTFLHWVYCMENLDLLGPTDVDALMSMLRSLSRVDLQRQVQTLMGLHLSGPSHSQHYRHTP

SEQ ID NO: 20250 - protein, 910 aa, Artificial Sequence
  Synthetic Polypeptide
MALPVTALLLPLALLLHAARPLEGKPIPNPLLGLDSTGSGEDLKNVFPPEVAVFEPSKAEIAHTQKATLVCLATGFYPDHVELSWWVNGKEVHSGVCTDPQPLKEQPALNDSRYCLSSRLRVSATFWQNPRNHFRCQVQFYGLSENDEWTQDRAKPVTQIVSAEAWGRADCGITSASYHQGVLSATILYEILLGKATLYAVLVSALVLMAMVKRKDSRGRAKRSGSGATNFSLLKQAGDVEENPGPTSMALPVTALLLPLALLLHAARPDIQLTQSPSFLSASVGDRVTITCRASQDISSYLAWYQQKPGNAPKLLIYAASLLQSGVPSRFSAFGSGTEFTLTISSLQPEDFATYYCQHLKSYPLFTFGPGTKVDIKRGGGGSGGGGSGGGGSEVQLVESGGRVVRPGGSLRLSCAASGFTFDDYGMSWVRQPPGKGLEFVSGLNWNGDITAFTDSVKGRFTISRDNVKSSLYLQMNSLRADDTAFYYCARVRTWGDYTTGEEIINSWYFDLWGRGTLVTVSSTREQKLISEEDGSGIQNPDPAVYQLRDSKSSDKSVCLFTDFDSQTNVSQSKDSDVYITDKCVLDMRSMDFKSNSAVAWSNKSDFACANAFNNSIIPEDTFFPSSDVPCDVKLVEKSFETDTNLNFQNLSVIGFRILLLKVAGFNLLMTLRLWSSRAKRSGSGVKQTLNFDLLKLAGDVESNPGPSRGHMTEYKPTVRLATRDDVPRAVRTLAAAFADYPATRHTVDPDRHIERVTELQELFLTRVGLDIGKVWVADDGAAVAVWTTPESVEAGAVFAEIGPRMAELSGSRLAAQQQMEGLLAPHRPKEPAWFLATVGVSPDHQGKGLGSAVVLPGVEAAERAGVPAFLETSAPRNLPFYERLGFTVTADVEVPEGPRTWCMTRKPGA

SEQ ID NO: 20251 - protein, 911 aa, Artificial Sequence
  Synthetic Polypeptide
MALPVTALLLPLALLLHAARPLEQKLISEEDLGSGDRPDPAVYQLRDSKSSDKSVCLFTDFDSQTNVSQSKDSDVYITDKCVLDMRSMDFKSNSAVAWSNKSDFACANAFNNSIIPEDTFFPSPESSCDVKLVEKSFETDTNLNFQNLSVIGFRILLLKVAGFNLLMTLRLWSSSSRAKRSGSGVKQTLNFDLLKLAGDVESNPGPTSMALPVTALLLPLALLLHAARPDIQLTQSPSFLSASVGDRVTITCRASQDISSYLAWYQQKPGNAPKLLIYAASLLQSGVPSRFSAFGSGTEFTLTISSLQPEDFATYYCQHLKSYPLFTFGPGTKVDIKRGGGGSGGGGSGGGGSEVQLVESGGRVVRPGGSLRLSCAASGFTFDDYGMSWVRQPPGKGLEFVSGLNWNGDITAFTDSVKGRFTISRDNVKSSLYLQMNSLRADDTAFYYCARVRTWGDYTTGEEIINSWYFDLWGRGTLVTVSSTRGKPIPNPLLGLDSTGSGEDLKNVFPPEVAVFEPSEAEISHTQKATLVCLATGFYPDHVELSWWVNGKEVHSGVCTDPQPLKEQPALNDSRYCLSSRLRVSATFWQNPRNHFRCQVQFYGLSENDEWTQDRAKPVTQIVSAEAWGRADCGFTSESYQQGVLSATILYEILLGKATLYAVLVSALVLMAMVKRKDSRGRAKRSGSGATNFSLLKQAGDVEENPGPSRGHMTEYKPTVRLATRDDVPRAVRTLAAAFADYPATRHTVDPDRHIERVTELQELFLTRVGLDIGKVWVADDGAAVAVWTTPESVEAGAVFAEIGPRMAELSGSRLAAQQQMEGLLAPHRPKEPAWFLATVGVSPDHQGKGLGSAVVLPGVEAAERAGVPAFLETSAPRNLPFYERLGFTVTADVEVPEGPRTWCMTRKPGA

SEQ ID NO: 20252 - protein, 865 aa, Artificial Sequence
  Synthetic Polypeptide
MALPVTALLLPLALLLHAARPDIQLTQSPSFLSASVGDRVTITCRASQDISSYLAWYQQKPGNAPKLLIYAASLLQSGVPSRFSAFGSGTEFTLTISSLQPEDFATYYCQHLKSYPLFTFGPGTKVDIKRLEDLKNVFPPEVAVFEPSEAEISHTQKATLVCLATGFYPDHVELSWWVNGKEVHSGVSTDPQPLKEQPALNDSRYCLSSRLRVSATFWQNPRNHFRCQVQFYGLSENDEWTQDRAKPVTQIVSAEAWGRADCGFTSESYQQGVLSATILYEILLGKATLYAVLVSALVLMAMVKRKDSRGRAKRSGSGATNFSLLKQAGDVEENPGPTSMDWIWRILFLVGAATGAHSFEEVQLVESGGRVVRPGGSLRLSCAASGFTFDDYGMSWVRQPPGKGLEFVSGLNWNGDITAFTDSVKGRFTISRDNVKSSLYLQMNSLRADDTAFYYCARVRTWGDYTTGEEIINSWYFDLWGRGTLVTVSSTRIQNPDPAVYQLRDSKSSDKSVCLFTDFDSQTNVSQSKDSDVYITDKTVLDMRSMDFKSNSAVAWSNKSDFACANAFNNSIIPEDTFFPSPESSCDVKLVEKSFETDTNLNFQNLSVIGFRILLLKVAGFNLLMTLRLWSSRAKRSGSGVKQTLNFDLLKLAGDVESNPGPSRGHMTEYKPTVRLATRDDVPRAVRTLAAAFADYPATRHTVDPDRHIERVTELQELFLTRVGLDIGKVWVADDGAAVAVWTTPESVEAGAVFAEIGPRMAELSGSRLAAQQQMEGLLAPHRPKEPAWFLATVGVSPDHQGKGLGSAVVLPGVEAAERAGVPAFLETSAPRNLPFYERLGFTVTADVEVPEGPRTWCMTRKPGA

SEQ ID NO: 20253 - protein, 947 aa, Artificial Sequence
  Synthetic Polypeptide
MALPVTALLLPLALLLHAARPDIQLTQSPSFLSASVGDRVTITCRASQDISSYLAWYQQKPGNAPKLLIYAASLLQSGVPSRFSAFGSGTEFTLTISSLQPEDFATYYCQHLKSYPLFTFGPGTKVDIKRLEDLKNVFPPEVAVFEPSEAEISHTQKATLVCLATGFYPDHVELSWWVNGKEVHSGVSTDPQPLKEQPALNDSRYCLSSRLRVSATFWQNPRNHFRCQVQFYGLSENDEWTQDRAKPVTQIVSAEAWGRADCGFTSESYQQGVLSATILYEILLGKATLYAVLVSALVLMAMVKRKDSRGRAKRSGSGATNFSLLKQAGDVEENPGPTSMDWIWRILFLVGAATGAHSFEEVQLVESGGRVVRPGGSLRLSCAASGFTFDDYGMSWVRQPPGKGLEFVSGLNWNGDITAFTDSVKGRFTISRDNVKSSLYLQMNSLRADDTAFYYCARVRTWGDYTTGEEIINSWYFDLWGRGTLVTVSSTREQKLISEEDGSGTPFPSLAPPIMLLVDGKQQMVVVCLVLDVAPPGLDSPIWFSAGNGSALDAFTYGPSPATDGTWTNLAHLSLPSEELASWEPLVCHTGPGAEGHSRSTQPMHLSGEASTARTCPQEPLRGTPGGALWLGVLRLLLFKLLLFDLLLTCSCLCDPAGPLPSPATTTRLRALGSHRLHPATETGGREATSSPRPQPRDRRWGDTPPGRKPGSPVRAKRSGSGVKQTLNFDLLKLAGDVESNPGPSRGHMTEYKPTVRLATRDDVPRAVRTLAAAFADYPATRHTVDPDRHIERVTELQELFLTRVGLDIGKVWVADDGAAVAVWTTPESVEAGAVFAEIGPRMAELSGSRLAAQQQMEGLLAPHRPKEPAWFLATVGVSPDHQGKGLGSAVVLPGVEAAERAGVPAFLETSAPRNLPFYERLGFTVTADVEVPEGPRTWCMTRKPGA

SEQ ID NO: 20254 - protein, 965 aa, Artificial Sequence
  Synthetic Polypeptide
MALPVTALLLPLALLLHAARPLEDLKNVFPPEVAVFEPSEAEISHTQKATLVCLATGFYPDHVELSWWVNGKEVHSGVSTDPQPLKEQPALNDSRYCLSSRLRVSATFWQNPRNHFRCQVQFYGLSENDEWTQDRAKPVTQIVSAEAWGRADCGFTSESYQQGVLSATILYEILLGKATLYAVLVSALVLMAMVKRKDSRGRAKRSGSGATNFSLLKQAGDVEENPGPTSMALPVTALLLPLALLLHAARPDIQLTQSPSFLSASVGDRVTITCRASQDISSYLAWYQQKPGNAPKLLIYAASLLQSGVPSRFSAFGSGTEFTLTISSLQPEDFATYYCQHLKSYPLFTFGPGTKVDIKRGGGGSGGGGSGGGGSEVQLVESGGRVVRPGGSLRLSCAASGFTFDDYGMSWVRQPPGKGLEFVSGLNWNGDITAFTDSVKGRFTISRDNVKSSLYLQMNSLRADDTAFYYCARVRTWGDYTTGEEIINSWYFDLWGRGTLVTVSSTREQKLISEEDLGSGTPFPSLAPPIMLLVDGKQQMVVVCLVLDVAPPGLDSPIWFSAGNGSALDAFTYGPSPATDGTWTNLAHLSLPSEELASWEPLVCHTGPGAEGHSRSTQPMHLSGEASTARTCPQEPLRGTPGGALWLGVLRLLLFKLLLFDLLLTCSCLCDPAGPLPSPATTTRLRALGSHRLHPATETGGREATSSPRPQPRDRRWGDTPPGRKPGSPVRAKRSGSGVKQTLNFDLLKLAGDVESNPGPSRSRGHMTEYKPTVRLATRDDVPRAVRTLAAAFADYPATRHTVDPDRHIERVTELQELFLTRVGLDIGKVWVADDGAAVAVWTTPESVEAGAVFAEIGPRMAELSGSRLAAQQQMEGLLAPHRPKEPAWFLATVGVSPDHQGKGLGSAVVLPGVEAAERAGVPAFLETSAPRNLPFYERLGFTVTADVEVPEGPRTWCMTRKPGA

SEQ ID NO: 20255 - protein, 902 aa, Artificial Sequence
  Synthetic Polypeptide
MALPVTALLLPLALLLHAARPDIQLTQSPSFLSASVGDRVTITCRASQDISSYLAWYQQKPGNAPKLLIYAASLLQSGVPSRFSAFGSGTEFTLTISSLQPEDFATYYCQHLKSYPLFTFGPGTKVDIKRLEGKPIPNPLLGLDSTGSGDKQLDADVSPKPTIFLPSIAETKLQKAGTYLCLLEKFFPDVIKIHWQEKKSNTILGSQEGNTMKTNDTYMKFSWLTVPEKSLDKEHRCIVRHENNKNGVDQEIIFPPIKTDVITMDPKDNCSKDANDTLLLQLTNTSAYYMYLLLLLKSVVYFAIITCCLLRRTAFCCNGEKSRAKRSGSGATNFSLLKQAGDVEENPGPTSMDWIWRILFLVGAATGAHSFEEVQLVESGGRVVRPGGSLRLSCAASGFTFDDYGMSWVRQPPGKGLEFVSGLNWNGDITAFTDSVKGRFTISRDNVKSSLYLQMNSLRADDTAFYYCARVRTWGDYTTGEEIINSWYFDLWGRGTLVTVSSTREQKLISEEDGSGSQPHTKPSVFVMKNGTNVACLVKEFYPKDIRINLVSSKKITEFDPAIVISPSGKYNAVKLGKYEDSNSVTCSVQHDNKTVHSTDFEVKTDSTDHVKPKETENTKQPSKSCHKPKAIVHTEKVNMMSLTVLGLRMLFAKTVAVNFLLTAKLFFLRAKRSGSGVKQTLNFDLLKLAGDVESNPGPSRGHMTEYKPTVRLATRDDVPRAVRTLAAAFADYPATRHTVDPDRHIERVTELQELFLTRVGLDIGKVWVADDGAAVAVWTTPESVEAGAVFAEIGPRMAELSGSRLAAQQQMEGLLAPHRPKEPAWFLATVGVSPDHQGKGLGSAVVLPGVEAAERAGVPAFLETSAPRNLPFYERLGFTVTADVEVPEGPRTWCMTRKPGA

SEQ ID NO: 20256 - protein, 640 aa, Artificial Sequence
  Synthetic Polypeptide
MALPVTALLLPLALLLHAARPDIQLTQSPSFLSASVGDRVTITCRASQDISSYLAWYQQKPGNAPKLLIYAASLLQSGVPSRFSAFGSGTEFTLTISSLQPEDFATYYCQHLKSYPLFTFGPGTKVDIKRLESQPHTKPSVFVMKNGTNVACLVKEFYPKDIRINLVSSKKITEFDPAIVISPSGKYNAVKLGKYEDSNSVTCSVQHDNKTVHSTDFEVKTDSTDHVKPKETENTKQPSKSCHKPKAIVHTEKVNMMSLTVLGLRMLFAKTVAVNFLLTAKLFFLRAKRSGSGATNFSLLKQAGDVEENPGPTSMDWIWRILFLVGAATGAHSFEEVQLVESGGRVVRPGGSLRLSCAASGFTFDDYGMSWVRQPPGKGLEFVSGLNWNGDITAFTDSVKGRFTISRDNVKSSLYLQMNSLRADDTAFYYCARVRTWGDYTTGEEIINSWYFDLWGRGTLVTVSSTRDKQLDADVSPKPTIFLPSIAETKLQKAGTYLCLLEKFFPDVIKIHWQEKKSNTILGSQEGNTMKTNDTYMKFSWLTVPEKSLDKEHRCIVRHENNKNGVDQEIIFPPIKTDVITMDPKDNCSKDANDTLLLQLTNTSAYYMYLLLLLKSVVYFAIITCCLLRRTAFCCNGEKS

SEQ ID NO: 20257 - protein, 917 aa, Artificial Sequence
  Synthetic Polypeptide
MALPVTALLLPLALLLHAARPLEGKPIPNPLLGLDSTGSGDKQLDADVSPKPTIFLPSIAETKLQKAGTYLCLLEKFFPDVIKIHWQEKKSNTILGSQEGNTMKTNDTYMKFSWLTVPEKSLDKEHRCIVRHENNKNGVDQEIIFPPIKTDVITMDPKDNCSKDANDTLLLQLTNTSAYYMYLLLLLKSVVYFAIITCCLLRRTAFCCNGEKSRAKRSGSGATNFSLLKQAGDVEENPGPTSMALPVTALLLPLALLLHAARPDIQLTQSPSFLSASVGDRVTITCRASQDISSYLAWYQQKPGNAPKLLIYAASLLQSGVPSRFSAFGSGTEFTLTISSLQPEDFATYYCQHLKSYPLFTFGPGTKVDIKRGGGGSGGGGSGGGGSEVQLVESGGRVVRPGGSLRLSCAASGFTFDDYGMSWVRQPPGKGLEFVSGLNWNGDITAFTDSVKGRFTISRDNVKSSLYLQMNSLRADDTAFYYCARVRTWGDYTTGEEIINSWYFDLWGRGTLVTVSSTREQKLISEEDGSGSQPHTKPSVFVMKNGTNVACLVKEFYPKDIRINLVSSKKITEFDPAIVISPSGKYNAVKLGKYEDSNSVTCSVQHDNKTVHSTDFEVKTDSTDHVKPKETENTKQPSKSCHKPKAIVHTEKVNMMSLTVLGLRMLFAKTVAVNFLLTAKLFFLRAKRSGSGVKQTLNFDLLKLAGDVESNPGPSRGHMTEYKPTVRLATRDDVPRAVRTLAAAFADYPATRHTVDPDRHIERVTELQELFLTRVGLDIGKVWVADDGAAVAVWTTPESVEAGAVFAEIGPRMAELSGSRLAAQQQMEGLLAPHRPKEPAWFLATVGVSPDHQGKGLGSAVVLPGVEAAERAGVPAFLETSAPRNLPFYERLGFTVTADVEVPEGPRTWCMTRKPGA

SEQ ID NO: 20258 - protein, 1042 aa, Artificial Sequence
  Synthetic Polypeptide
MALPVTALLLPLALLLHAARPDIQLTQSPSFLSASVGDRVTITCRASQDISSYLAWYQQKPGNAPKLLIYAASLLQSGVPSRFSAFGSGTEFTLTISSLQPEDFATYYCQHLKSYPLFTFGPGTKVDIKRGQPKANPTVTLFPPSSEELQANKATLVCLISDFYPGAVTVAWKADGSPVKAGVETTKPSKQSNNKYAASSYLSLTPEQWKSHRSYSCQVTHEGSTVEKTVAPTECSGSQSFGLLDPKLCYLLDGILFIYGVILTALFLRVKFSRSADAPAYQQGQNQLYNELNLGRREEYDVLDKRRGRDPEMGGKPQRRKNPQEGLYNELQKDKMAEAYSEIGMKGERRRGKGHDGLYQGLSTATKDTYDALHMQALPPRRAKRSGSGATNFSLLKQAGDVEENPGPTSMDWIWRILFLVGAATGAHSFEEVQLVESGGRVVRPGGSLRLSCAASGFTFDDYGMSWVRQPPGKGLEFVSGLNWNGDITAFTDSVKGRFTISRDNVKSSLYLQMNSLRADDTAFYYCARVRTWGDYTTGEEIINSWYFDLWGRGTLVTVSSASTKGPSVFPLAPSSKSTSGGTAALGCLVKDYFPEPVTVSWNSGALTSGVHTFPAVLQSSGLYSLSSVVTVPSSSLGTQTYICNVNHKPSNTKVDKRVEPKSCGTQSFGLLDPKLCYLLDGILFIYGVILTALFLRVKFSRSADAPAYQQGQNQLYNELNLGRREEYDVLDKRRGRDPEMGGKPQRRKNPQEGLYNELQKDKMAEAYSEIGMKGERRRGKGHDGLYQGLSTATKDTYDALHMQALPPRRAKRSGSGVKQTLNFDLLKLAGDVESNPGPSRGHMTEYKPTVRLATRDDVPRAVRTLAAAFADYPATRHTVDPDRHIERVTELQELFLTRVGLDIGKVWVADDGAAVAVWTTPESVEAGAVFAEIGPRMAELSGSRLAAQQQMEGLLAPHRPKEPAWFLATVGVSPDHQGKGLGSAVVLPGVEAAERAGVPAFLETSAPRNLPFYERLGFTVTADVEVPEGPRTWCMTRKPGA

SEQ ID NO: 20259 - protein, 828 aa, Artificial Sequence
  Synthetic Polypeptide
MALPVTALLLPLALLLHAARPDIQLTQSPSFLSASVGDRVTITCRASQDISSYLAWYQQKPGNAPKLLIYAASLLQSGVPSRFSAFGSGTEFTLTISSLQPEDFATYYCQHLKSYPLFTFGPGTKVDIKRLEDLKNVFPPEVAVFEPSEAEISHTQKATLVCLATGFYPDHVELSWWVNGKEVHSGVSTDPQPLKEQPALNDSRYCLSSRLRVSATFWQNPRNHFRCQVQFYGLSENDEWTQDRAKPVTQIVSAEAWGRADCGSQSFGLLDPKLCYLLDGILFIYGVILTALFLRVKFSRSADAPAYQQGQNQLYNELNLGRREEYDVLDKRRGRDPEMGGKPQRRKNPQEGLYNELQKDKMAEAYSEIGMKGERRRGKGHDGLYQGLSTATKDTYDALHMQALPPRRAKRSGSGATNFSLLKQAGDVEENPGPTSMDWIWRILFLVGAATGAHSFEEVQLVESGGRVVRPGGSLRLSCAASGFTFDDYGMSWVRQPPGKGLEFVSGLNWNGDITAFTDSVKGRFTISRDNVKSSLYLQMNSLRADDTAFYYCARVRTWGDYTTGEEIINSWYFDLWGRGTLVTVSSTRIQNPDPAVYQLRDSKSSDKSVCLFTDFDSQTNVSQSKDSDVYITDKTVLDMRSMDFKSNSAVAWSNKSDFACANAFNNSIIPEDTFFPSPESSCGTQSFGLLDPKLCYLLDGILFIYGVILTALFLRVKFSRSADAPAYQQGQNQLYNELNLGRREEYDVLDKRRGRDPEMGGKPQRRKNPQEGLYNELQKDKMAEAYSEIGMKGERRRGKGHDGLYQGLSTATKDTYDALHMQALPPR

SEQ ID NO: 20260 - protein, 828 aa, Artificial Sequence
  Synthetic Polypeptide
MALPVTALLLPLALLLHAARPDIQLTQSPSFLSASVGDRVTITCRASQDISSYLAWYQQKPGNAPKLLIYAASLLQSGVPSRFSAFGSGTEFTLTISSLQPEDFATYYCQHLKSYPLFTFGPGTKVDIKRLEDLKNVFPPEVAVFEPSKAEIAHTQKATLVCLATGFYPDHVELSWWVNGKEVHSGVCTDPQPLKEQPALNDSRYCLSSRLRVSATFWQNPRNHFRCQVQFYGLSENDEWTQDRAKPVTQIVSAEAWGRADCGSQSFGLLDPKLCYLLDGILFIYGVILTALFLRVKFSRSADAPAYQQGQNQLYNELNLGRREEYDVLDKRRGRDPEMGGKPQRRKNPQEGLYNELQKDKMAEAYSEIGMKGERRRGKGHDGLYQGLSTATKDTYDALHMQALPPRRAKRSGSGATNFSLLKQAGDVEENPGPTSMDWIWRILFLVGAATGAHSFEEVQLVESGGRVVRPGGSLRLSCAASGFTFDDYGMSWVRQPPGKGLEFVSGLNWNGDITAFTDSVKGRFTISRDNVKSSLYLQMNSLRADDTAFYYCARVRTWGDYTTGEEIINSWYFDLWGRGTLVTVSSTRIQNPDPAVYQLRDSKSSDKSVCLFTDFDSQTNVSQSKDSDVYITDKCVLDMRSMDFKSNSAVAWSNKSDFACANAFNNSIIPEDTFFPSSDVPCGTQSFGLLDPKLCYLLDGILFIYGVILTALFLRVKFSRSADAPAYQQGQNQLYNELNLGRREEYDVLDKRRGRDPEMGGKPQRRKNPQEGLYNELQKDKMAEAYSEIGMKGERRRGKGHDGLYQGLSTATKDTYDALHMQALPPR

SEQ ID NO: 20261 - protein, 899 aa, Artificial Sequence
  Synthetic Polypeptide
MALPVTALLLPLALLLHAARPDIQLTQSPSFLSASVGDRVTITCRASQDISSYLAWYQQKPGNAPKLLIYAASLLQSGVPSRFSAFGSGTEFTLTISSLQPEDFATYYCQHLKSYPLFTFGPGTKVDIKRLEGKPIPNPLLGLDSTGSGEDLKNVFPPEVAVFEPSEAEISHTQKATLVCLATGFYPDHVELSWWVNGKEVHSGVSTDPQPLKEQPALNDSRYCLSSRLRVSATFWQNPRNHFRCQVQFYGLSENDEWTQDRAKPVTQIVSAEAWGRADCGSQSFGLLDPKLCYLLDGILFIYGVILTALFLRVKFSRSADAPAYQQGQNQLYNELNLGRREEYDVLDKRRGRDPEMGGKPQRRKNPQEGLYNELQKDKMAEAYSEIGMKGERRRGKGHDGLYQGLSTATKDTYDALHMQALPPRRAKRSGSGATNFSLLKQAGDVEENPGPTSMDWIWRILFLVGAATGAHSFEEVQLVESGGRVVRPGGSLRLSCAASGFTFDDYGMSWVRQPPGKGLEFVSGLNWNGDITAFTDSVKGRFTISRDNVKSSLYLQMNSLRADDTAFYYCARVRTWGDYTTGEEIINSWYFDLWGRGTLVTVSSTREQKLISEEDGSGIQNPDPAVYQLRDSKSSDKSVCLFTDFDSQTNVSQSKDSDVYITDKTVLDMRSMDFKSNSAVAWSNKSDFACANAFNNSIIPEDTFFPSPESSCGTQSFGLLDPKLCYLLDGILFIYGVILTALFLRSKRSRLLHSDYMNMTPRRPGPTRKHYQPYAPPRDFAAYRSRVKFSRSADAPAYQQGQNQLYNELNLGRREEYDVLDKRRGRDPEMGGKPQRRKNPQEGLYNELQKDKMAEAYSEIGMKGERRRGKGHDGLYQGLSTATKDTYDALHMQALPPR

SEQ ID NO: 20262 - protein, 940 aa, Artificial Sequence
  Synthetic Polypeptide
MALPVTALLLPLALLLHAARPDIQLTQSPSFLSASVGDRVTITCRASQDISSYLAWYQQKPGNAPKLLIYAASLLQSGVPSRFSAFGSGTEFTLTISSLQPEDFATYYCQHLKSYPLFTFGPGTKVDIKRLEGKPIPNPLLGLDSTGSGEDLKNVFPPEVAVFEPSEAEISHTQKATLVCLATGFYPDHVELSWWVNGKEVHSGVSTDPQPLKEQPALNDSRYCLSSRLRVSATFWQNPRNHFRCQVQFYGLSENDEWTQDRAKPVTQIVSAEAWGRADCGSQSFGLLDPKLCYLLDGILFIYGVILTALFLRSKRSRLLHSDYMNMTPRRPGPTRKHYQPYAPPRDFAAYRSRVKFSRSADAPAYQQGQNQLYNELNLGRREEYDVLDKRRGRDPEMGGKPQRRKNPQEGLYNELQKDKMAEAYSEIGMKGERRRGKGHDGLYQGLSTATKDTYDALHMQALPPRRAKRSGSGATNFSLLKQAGDVEENPGPTSMDWIWRILFLVGAATGAHSFEEVQLVESGGRVVRPGGSLRLSCAASGFTFDDYGMSWVRQPPGKGLEFVSGLNWNGDITAFTDSVKGRFTISRDNVKSSLYLQMNSLRADDTAFYYCARVRTWGDYTTGEEIINSWYFDLWGRGTLVTVSSTREQKLISEEDGSGIQNPDPAVYQLRDSKSSDKSVCLFTDFDSQTNVSQSKDSDVYITDKTVLDMRSMDFKSNSAVAWSNKSDFACANAFNNSIIPEDTFFPSPESSCGTQSFGLLDPKLCYLLDGILFIYGVILTALFLRSKRSRLLHSDYMNMTPRRPGPTRKHYQPYAPPRDFAAYRSRVKFSRSADAPAYQQGQNQLYNELNLGRREEYDVLDKRRGRDPEMGGKPQRRKNPQEGLYNELQKDKMAEAYSEIGMKGERRRGKGHDGLYQGLSTATKDTYDALHMQALPPR

SEQ ID NO: 20263 - protein, 901 aa, Artificial Sequence
  Synthetic Polypeptide
MALPVTALLLPLALLLHAARPDIQLTQSPSFLSASVGDRVTITCRASQDISSYLAWYQQKPGNAPKLLIYAASLLQSGVPSRFSAFGSGTEFTLTISSLQPEDFATYYCQHLKSYPLFTFGPGTKVDIKRLEGKPIPNPLLGLDSTGSGEDLKNVFPPEVAVFEPSEAEISHTQKATLVCLATGFYPDHVELSWWVNGKEVHSGVSTDPQPLKEQPALNDSRYCLSSRLRVSATFWQNPRNHFRCQVQFYGLSENDEWTQDRAKPVTQIVSAEAWGRADCGSQSFGLLDPKLCYLLDGILFIYGVILTALFLRVKFSRSADAPAYQQGQNQLYNELNLGRREEYDVLDKRRGRDPEMGGKPQRRKNPQEGLYNELQKDKMAEAYSEIGMKGERRRGKGHDGLYQGLSTATKDTYDALHMQALPPRRAKRSGSGATNFSLLKQAGDVEENPGPTSMDWIWRILFLVGAATGAHSFEEVQLVESGGRVVRPGGSLRLSCAASGFTFDDYGMSWVRQPPGKGLEFVSGLNWNGDITAFTDSVKGRFTISRDNVKSSLYLQMNSLRADDTAFYYCARVRTWGDYTTGEEIINSWYFDLWGRGTLVTVSSTREQKLISEEDLGSGIQNPDPAVYQLRDSKSSDKSVCLFTDFDSQTNVSQSKDSDVYITDKTVLDMRSMDFKSNSAVAWSNKSDFACANAFNNSIIPEDTFFPSPESSCGTQSFGLLDPKLCYLLDGILFIYGVILTALFLKRGRKKLLYIFKQPFMRPVQTTQEEDGCSCRFPEEEEGGCELRVKFSRSADAPAYQQGQNQLYNELNLGRREEYDVLDKRRGRDPEMGGKPQRRKNPQEGLYNELQKDKMAEAYSEIGMKGERRRGKGHDGLYQGLSTATKDTYDALHMQALPPR

SEQ ID NO: 20264 - protein, 943 aa, Artificial Sequence
  Synthetic Polypeptide
MALPVTALLLPLALLLHAARPDIQLTQSPSFLSASVGDRVTITCRASQDISSYLAWYQQKPGNAPKLLIYAASLLQSGVPSRFSAFGSGTEFTLTISSLQPEDFATYYCQHLKSYPLFTFGPGTKVDIKRLEGKPIPNPLLGLDSTGSGEDLKNVFPPEVAVFEPSEAEISHTQKATLVCLATGFYPDHVELSWWVNGKEVHSGVSTDPQPLKEQPALNDSRYCLSSRLRVSATFWQNPRNHFRCQVQFYGLSENDEWTQDRAKPVTQIVSAEAWGRADCGSQSFGLLDPKLCYLLDGILFIYGVILTALFLKRGRKKLLYIFKQPFMRPVQTTQEEDGCSCRFPEEEEGGCELRVKFSRSADAPAYQQGQNQLYNELNLGRREEYDVLDKRRGRDPEMGGKPQRRKNPQEGLYNELQKDKMAEAYSEIGMKGERRRGKGHDGLYQGLSTATKDTYDALHMQALPPRRAKRSGSGATNFSLLKQAGDVEENPGPTSMDWIWRILFLVGAATGAHSFEEVQLVESGGRVVRPGGSLRLSCAASGFTFDDYGMSWVRQPPGKGLEFVSGLNWNGDITAFTDSVKGRFTISRDNVKSSLYLQMNSLRADDTAFYYCARVRTWGDYTTGEEIINSWYFDLWGRGTLVTVSSTREQKLISEEDLGSGIQNPDPAVYQLRDSKSSDKSVCLFTDFDSQTNVSQSKDSDVYITDKTVLDMRSMDFKSNSAVAWSNKSDFACANAFNNSIIPEDTFFPSPESSCGTQSFGLLDPKLCYLLDGILFIYGVILTALFLKRGRKKLLYIFKQPFMRPVQTTQEEDGCSCRFPEEEEGGCELRVKFSRSADAPAYQQGQNQLYNELNLGRREEYDVLDKRRGRDPEMGGKPQRRKNPQEGLYNELQKDKMAEAYSEIGMKGERRRGKGHDGLYQGLSTATKDTYDALHMQALPPR

SEQ ID NO: 20265 - protein, 833 aa, Artificial Sequence
  Synthetic Polypeptide
MALPVTALLLPLALLLHAARPDIQLTQSPSFLSASVGDRVTITCRASQDISSYLAWYQQKPGNAPKLLIYAASLLQSGVPSRFSAFGSGTEFTLTISSLQPEDFATYYCQHLKSYPLFTFGPGTKVDIKRLEQSFGLLDPKLCYLLDGILFIYGVILTALFLRVKFSRSADAPAYQQGQNQLYNELNLGRREEYDVLDKRRGRDPEMGGKPQRRKNPQEGLYNELQKDKMAEAYSEIGMKGERRRGKGHDGLYQGLSTATKDTYDALHMQALPPRRAKRSGSGATNFSLLKQAGDVEENPGPTSMDWIWRILFLVGAATGAHSFEEVQLVESGGRVVRPGGSLRLSCAASGFTFDDYGMSWVRQPPGKGLEFVSGLNWNGDITAFTDSVKGRFTISRDNVKSSLYLQMNSLRADDTAFYYCARVRTWGDYTTGEEIINSWYFDLWGRGTLVTVSSTRQSFGLLDPKLCYLLDGILFIYGVILTALFLRVKFSRSADAPAYQQGQNQLYNELNLGRREEYDVLDKRRGRDPEMGGKPQRRKNPQEGLYNELQKDKMAEAYSEIGMKGERRRGKGHDGLYQGLSTATKDTYDALHMQALPPRRAKRSGSGVKQTLNFDLLKLAGDVESNPGPSRGHMTEYKPTVRLATRDDVPRAVRTLAAAFADYPATRHTVDPDRHIERVTELQELFLTRVGLDIGKVWVADDGAAVAVWTTPESVEAGAVFAEIGPRMAELSGSRLAAQQQMEGLLAPHRPKEPAWFLATVGVSPDHQGKGLGSAVVLPGVEAAERAGVPAFLETSAPRNLPFYERLGFTVTADVEVPEGPRTWCMTRKPGA

SEQ ID NO: 20266 - protein, 658 aa, Artificial Sequence
  Synthetic Polypeptide
MALPVTALLLPLALLLHAARPDIQLTQSPSFLSASVGDRVTITCRASQDISSYLAWYQQKPGNAPKLLIYAASLLQSGVPSRFSAFGSGTEFTLTISSLQPEDFATYYCQHLKSYPLFTFGPGTKVDIKRLEGQPKANPTVTLFPPSSEELQANKATLVCLISDFYPGAVTVAWKADGSPVKAGVETTKPSKQSNNKYAASSYLSLTPEQWKSHRSYSCQVTHEGSTVEKTVAPTECSPIKTDVITMDPKDNCSKDANDTLLLQLTNTSAYYMYLLLLLKSVVYFAIITCCLLRRTAFCCNGEKSRAKRSGSGATNFSLLKQAGDVEENPGPTSMDWIWRILFLVGAATGAHSFEEVQLVESGGRVVRPGGSLRLSCAASGFTFDDYGMSWVRQPPGKGLEFVSGLNWNGDITAFTDSVKGRFTISRDNVKSSLYLQMNSLRADDTAFYYCARVRTWGDYTTGEEIINSWYFDLWGRGTLVTVSSTRASTKGPSVFPLAPSSKSTSGGTAALGCLVKDYFPEPVTVSWNSGALTSGVHTFPAVLQSSGLYSLSSVVTVPSSSLGTQTYICNVNHKPSNTKVDKRVEPKSCEVKTDSTDHVKPKETENTKQPSKSCHKPKAIVHTEKVNMMSLTVLGLRMLFAKTVAVNFLLTAKLFFL

SEQ ID NO: 20267 - protein, 636 aa, Artificial Sequence
  Synthetic Polypeptide
MALPVTALLLPLALLLHAARPDIQLTQSPSFLSASVGDRVTITCRASQDISSYLAWYQQKPGNAPKLLIYAASLLQSGVPSRFSAFGSGTEFTLTISSLQPEDFATYYCQHLKSYPLFTFGPGTKVDIKRLEGQPKANPTVTLFPPSSEELQANKATLVCLISDFYPGAVTVAWKADGSPVKAGVETTKPSKQSNNKYAASSYLSLTPEQWKSHRSYSCQVTHEGSTVEKTVAPTECSGRADCGITSASYHQGVLSATILYEILLGKATLYAVLVSALVLMAMVKRKDSRGRAKRSGSGATNFSLLKQAGDVEENPGPTSMDWIWRILFLVGAATGAHSFEEVQLVESGGRVVRPGGSLRLSCAASGFTFDDYGMSWVRQPPGKGLEFVSGLNWNGDITAFTDSVKGRFTISRDNVKSSLYLQMNSLRADDTAFYYCARVRTWGDYTTGEEIINSWYFDLWGRGTLVTVSSTRASTKGPSVFPLAPSSKSTSGGTAALGCLVKDYFPEPVTVSWNSGALTSGVHTFPAVLQSSGLYSLSSVVTVPSSSLGTQTYICNVNHKPSNTKVDKRVEPKSCIPEDTFFPSSDVPCDVKLVEKSFETDTNLNFQNLSVIGFRILLLKVAGFNLLMTLRLWSS

SEQ ID NO: 20268 - protein, 636 aa, Artificial Sequence
  Synthetic Polypeptide
MALPVTALLLPLALLLHAARPDIQLTQSPSFLSASVGDRVTITCRASQDISSYLAWYQQKPGNAPKLLIYAASLLQSGVPSRFSAFGSGTEFTLTISSLQPEDFATYYCQHLKSYPLFTFGPGTKVDIKRLEGQPKANPTVTLFPPSSEELQANKATLVCLISDFYPGAVTVAWKADGSPVKAGVETTKPSKQSNNKYAASSYLSLTPEQWKSHRSYSCQVTHEGSTVEKTVAPTECSGRADCGFTSESYQQGVLSATILYEILLGKATLYAVLVSALVLMAMVKRKDSRGRAKRSGSGATNFSLLKQAGDVEENPGPTSMDWIWRILFLVGAATGAHSFEEVQLVESGGRVVRPGGSLRLSCAASGFTFDDYGMSWVRQPPGKGLEFVSGLNWNGDITAFTDSVKGRFTISRDNVKSSLYLQMNSLRADDTAFYYCARVRTWGDYTTGEEIINSWYFDLWGRGTLVTVSSTRASTKGPSVFPLAPSSKSTSGGTAALGCLVKDYFPEPVTVSWNSGALTSGVHTFPAVLQSSGLYSLSSVVTVPSSSLGTQTYICNVNHKPSNTKVDKRVEPKSCIPEDTFFPSPESSCDVKLVEKSFETDTNLNFQNLSVIGFRILLLKVAGFNLLMTLRLWSS

SEQ ID NO: 20269 - protein, 462 aa, Artificial Sequence
  Synthetic Polypeptide
MALPVTALLLPLALLLHAARPDIQLTQSPSFLSASVGDRVTITCRASQDISSYLAWYQQKPGNAPKLLIYAASLLQSGVPSRFSAFGSGTEFTLTISSLQPEDFATYYCQHLKSYPLFTFGPGTKVDIKRGGGGSGGGGSGGGGSEVQLVESGGRVVRPGGSLRLSCAASGFTFDDYGMSWVRQPPGKGLEFVSGLNWNGDITAFTDSVKGRFTISRDNVKSSLYLQMNSLRADDTAFYYCARVRTWGDYTTGEEIINSWYFDLWGRGTLVTVSSTRDGNEEMGGITQTPYKVSISGTTVILTCPQYPGSEILWQHNDKNIGGDEDDKNIGSDEDHLSLKEFSELEQSGYYVCYPRGSKPEDANFYLYLRARVCENCMEMDVMSVATIVIVDICITGGLLLLVYYWSKNRKAKAKPVTRGAGAGGRQRGQNKERPPPVPNPDYEPIRKGQRDLYSGLNQRRI

SEQ ID NO: 20270 - protein, 427 aa, Artificial Sequence
  Synthetic Polypeptide
MALPVTALLLPLALLLHAARPDIQLTQSPSFLSASVGDRVTITCRASQDISSYLAWYQQKPGNAPKLLIYAASLLQSGVPSRFSAFGSGTEFTLTISSLQPEDFATYYCQHLKSYPLFTFGPGTKVDIKRGGGGSGGGGSGGGGSEVQLVESGGRVVRPGGSLRLSCAASGFTFDDYGMSWVRQPPGKGLEFVSGLNWNGDITAFTDSVKGRFTISRDNVKSSLYLQMNSLRADDTAFYYCARVRTWGDYTTGEEIINSWYFDLWGRGTLVTVSSTRFKIPIEELEDRVFVNCNTSITWVEGTVGTLLSDITRLDLGKRILDPRGIYRCNGTDIYKDKESTVQVHYRMCQSCVELDPATVAGIIVTDVIATLLLALGVFCFAGHETGRLSGAADTQALLRNDQVYQPLRDRDDAQYSHLGGNWARNK

SEQ ID NO: 20271 - protein, 437 aa, Artificial Sequence
  Synthetic Polypeptide
MALPVTALLLPLALLLHAARPDIQLTQSPSFLSASVGDRVTITCRASQDISSYLAWYQQKPGNAPKLLIYAASLLQSGVPSRFSAFGSGTEFTLTISSLQPEDFATYYCQHLKSYPLFTFGPGTKVDIKRGGGGSGGGGSGGGGSEVQLVESGGRVVRPGGSLRLSCAASGFTFDDYGMSWVRQPPGKGLEFVSGLNWNGDITAFTDSVKGRFTISRDNVKSSLYLQMNSLRADDTAFYYCARVRTWGDYTTGEEIINSWYFDLWGRGTLVTVSSTRQSIKGNHLVKVYDYQEDGSVLLTCDAEAKNITWFKDGKMIGFLTEDKKKWNLGSNAKDPRGMYQCKGSQNKSKPLQVYYRMCQNCIELNAATISGFLFAEIVSIFVLAVGVYFIAGQDGVRQSRASDKQTLLPNDQLYQPLKDREDDQYSHLQGNQLRRN

SEQ ID NO: 20272 - protein, 420 aa, Artificial Sequence
  Synthetic Polypeptide
MALPVTALLLPLALLLHAARPDIQLTQSPSFLSASVGDRVTITCRASQDISSYLAWYQQKPGNAPKLLIYAASLLQSGVPSRFSAFGSGTEFTLTISSLQPEDFATYYCQHLKSYPLFTFGPGTKVDIKRGGGGSGGGGSGGGGSEVQLVESGGRVVRPGGSLRLSCAASGFTFDDYGMSWVRQPPGKGLEFVSGLNWNGDITAFTDSVKGRFTISRDNVKSSLYLQMNSLRADDTAFYYCARVRTWGDYTTGEEIINSWYFDLWGRGTLVTVSSTRQSFGLLDPKLCYLLDGILFIYGVILTALFLRVKFSRSADAPAYQQGQNQLYNELNLGRREEYDVLDKRRGRDPEMGGKPQRRKNPQEGLYNELQKDKMAEAYSEIGMKGERRRGKGHDGLYQGLSTATKDTYDALHMQALPPR

SEQ ID NO: 20273 - protein, 462 aa, Artificial Sequence
  Synthetic Polypeptide
MALPVTALLLPLALLLHAARPEVQLVESGGRVVRPGGSLRLSCAASGFTFDDYGMSWVRQPPGKGLEFVSGLNWNGDITAFTDSVKGRFTISRDNVKSSLYLQMNSLRADDTAFYYCARVRTWGDYTTGEEIINSWYFDLWGRGTLVTVSSGGGGSGGGGSGGGGSDIQLTQSPSFLSASVGDRVTITCRASQDISSYLAWYQQKPGNAPKLLIYAASLLQSGVPSRFSAFGSGTEFTLTISSLQPEDFATYYCQHLKSYPLFTFGPGTKVDIKRTRDGNEEMGGITQTPYKVSISGTTVILTCPQYPGSEILWQHNDKNIGGDEDDKNIGSDEDHLSLKEFSELEQSGYYVCYPRGSKPEDANFYLYLRARVCENCMEMDVMSVATIVIVDICITGGLLLLVYYWSKNRKAKAKPVTRGAGAGGRQRGQNKERPPPVPNPDYEPIRKGQRDLYSGLNQRRI

SEQ ID NO: 20274 - protein, 427 aa, Artificial Sequence
  Synthetic Polypeptide
MALPVTALLLPLALLLHAARPEVQLVESGGRVVRPGGSLRLSCAASGFTFDDYGMSWVRQPPGKGLEFVSGLNWNGDITAFTDSVKGRFTISRDNVKSSLYLQMNSLRADDTAFYYCARVRTWGDYTTGEEIINSWYFDLWGRGTLVTVSSGGGGSGGGGSGGGGSDIQLTQSPSFLSASVGDRVTITCRASQDISSYLAWYQQKPGNAPKLLIYAASLLQSGVPSRFSAFGSGTEFTLTISSLQPEDFATYYCQHLKSYPLFTFGPGTKVDIKRTRFKIPIEELEDRVFVNCNTSITWVEGTVGTLLSDITRLDLGKRILDPRGIYRCNGTDIYKDKESTVQVHYRMCQSCVELDPATVAGIIVTDVIATLLLALGVFCFAGHETGRLSGAADTQALLRNDQVYQPLRDRDDAQYSHLGGNWARNK

SEQ ID NO: 20275 - protein, 437 aa, Artificial Sequence
  Synthetic Polypeptide
MALPVTALLLPLALLLHAARPEVQLVESGGRVVRPGGSLRLSCAASGFTFDDYGMSWVRQPPGKGLEFVSGLNWNGDITAFTDSVKGRFTISRDNVKSSLYLQMNSLRADDTAFYYCARVRTWGDYTTGEEIINSWYFDLWGRGTLVTVSSGGGGSGGGGSGGGGSDIQLTQSPSFLSASVGDRVTITCRASQDISSYLAWYQQKPGNAPKLLIYAASLLQSGVPSRFSAFGSGTEFTLTISSLQPEDFATYYCQHLKSYPLFTFGPGTKVDIKRTRQSIKGNHLVKVYDYQEDGSVLLTCDAEAKNITWFKDGKMIGFLTEDKKKWNLGSNAKDPRGMYQCKGSQNKSKPLQVYYRMCQNCIELNAATISGFLFAEIVSIFVLAVGVYFIAGQDGVRQSRASDKQTLLPNDQLYQPLKDREDDQYSHLQGNQLRRN

SEQ ID NO: 20276 - protein, 420 aa, Artificial Sequence
  Synthetic Polypeptide
MALPVTALLLPLALLLHAARPEVQLVESGGRVVRPGGSLRLSCAASGFTFDDYGMSWVRQPPGKGLEFVSGLNWNGDITAFTDSVKGRFTISRDNVKSSLYLQMNSLRADDTAFYYCARVRTWGDYTTGEEIINSWYFDLWGRGTLVTVSSGGGGSGGGGSGGGGSDIQLTQSPSFLSASVGDRVTITCRASQDISSYLAWYQQKPGNAPKLLIYAASLLQSGVPSRFSAFGSGTEFTLTISSLQPEDFATYYCQHLKSYPLFTFGPGTKVDIKRTRQSFGLLDPKLCYLLDGILFIYGVILTALFLRVKFSRSADAPAYQQGQNQLYNELNLGRREEYDVLDKRRGRDPEMGGKPQRRKNPQEGLYNELQKDKMAEAYSEIGMKGERRRGKGHDGLYQGLSTATKDTYDALHMQALPPR

SEQ ID NO: 20277 - protein, 653 aa, Artificial Sequence
  Synthetic Polypeptide
MALPVTALLLPLALLLHAARPDIQLTQSPSFLSASVGDRVTITCRASQDISSYLAWYQQKPGNAPKLLIYAASLLQSGVPSRFSAFGSGTEFTLTISSLQPEDFATYYCQHLKSYPLFTFGPGTKVDIKRGGGGSGGGGSGGGGSEVQLVESGGRVVRPGGSLRLSCAASGFTFDDYGMSWVRQPPGKGLEFVSGLNWNGDITAFTDSVKGRFTISRDNVKSSLYLQMNSLRADDTAFYYCARVRTWGDYTTGEEIINSWYFDLWGRGTLVTVSSTRGSGIQNPDPAVYQLRDSKSSDKSVCLFTDFDSQTNVSQSKDSDVYITDKTVLDMRSMDFKSNSAVAWSNKSDFACANAFNNSIIPEDTFFPSPESSCDVKLVEKSFETDTNLNFQNLSVIGFRILLLKVAGFNLLMTLRLWSSRAKRSGSGVKQTLNFDLLKLAGDVESNPGPSRGHMTEYKPTVRLATRDDVPRAVRTLAAAFADYPATRHTVDPDRHIERVTELQELFLTRVGLDIGKVWVADDGAAVAVWTTPESVEAGAVFAEIGPRMAELSGSRLAAQQQMEGLLAPHRPKEPAWFLATVGVSPDHQGKGLGSAVVLPGVEAAERAGVPAFLETSAPRNLPFYERLGFTVTADVEVPEGPRTWCMTRKPGA

SEQ ID NO: 20278 - protein, 685 aa, Artificial Sequence
  Synthetic Polypeptide
MALPVTALLLPLALLLHAARPDIQLTQSPSFLSASVGDRVTITCRASQDISSYLAWYQQKPGNAPKLLIYAASLLQSGVPSRFSAFGSGTEFTLTISSLQPEDFATYYCQHLKSYPLFTFGPGTKVDIKRGGGGSGGGGSGGGGSEVQLVESGGRVVRPGGSLRLSCAASGFTFDDYGMSWVRQPPGKGLEFVSGLNWNGDITAFTDSVKGRFTISRDNVKSSLYLQMNSLRADDTAFYYCARVRTWGDYTTGEEIINSWYFDLWGRGTLVTVSSLEDLKNVFPPEVAVFEPSEAEISHTQKATLVCLATGFYPDHVELSWWVNGKEVHSGVSTDPQPLKEQPALNDSRYCLSSRLRVSATFWQNPRNHFRCQVQFYGLSENDEWTQDRAKPVTQIVSAEAWGRADCGFTSESYQQGVLSATILYEILLGKATLYAVLVSALVLMAMVKRKDSRGRAKRSGSGATNFSLLKQAGDVEENPGPTRGHMTEYKPTVRLATRDDVPRAVRTLAAAFADYPATRHTVDPDRHIERVTELQELFLTRVGLDIGKVWVADDGAAVAVWTTPESVEAGAVFAEIGPRMAELSGSRLAAQQQMEGLLAPHRPKEPAWFLATVGVSPDHQGKGLGSAVVLPGVEAAERAGVPAFLETSAPRNLPFYERLGFTVTADVEVPEGPRTWCMTRKPGA

SEQ ID NO: 20279 - protein, 735 aa, Artificial Sequence
  Synthetic Polypeptide
MALPVTALLLPLALLLHAARPDIQLTQSPSFLSASVGDRVTITCRASQDISSYLAWYQQKPGNAPKLLIYAASLLQSGVPSRFSAFGSGTEFTLTISSLQPEDFATYYCQHLKSYPLFTFGPGTKVDIKRGGGGSGGGGSGGGGSEVQLVESGGRVVRPGGSLRLSCAASGFTFDDYGMSWVRQPPGKGLEFVSGLNWNGDITAFTDSVKGRFTISRDNVKSSLYLQMNSLRADDTAFYYCARVRTWGDYTTGEEIINSWYFDLWGRGTLVTVSSTREQKLISEEDLGSGTPFPSLAPPIMLLVDGKQQMVVVCLVLDVAPPGLDSPIWFSAGNGSALDAFTYGPSPATDGTWTNLAHLSLPSEELASWEPLVCHTGPGAEGHSRSTQPMHLSGEASTARTCPQEPLRGTPGGALWLGVLRLLLFKLLLFDLLLTCSCLCDPAGPLPSPATTTRLRALGSHRLHPATETGGREATSSPRPQPRDRRWGDTPPGRKPGSPVRAKRSGSGVKQTLNFDLLKLAGDVESNPGPSRSRGHMTEYKPTVRLATRDDVPRAVRTLAAAFADYPATRHTVDPDRHIERVTELQELFLTRVGLDIGKVWVADDGAAVAVWTTPESVEAGAVFAEIGPRMAELSGSRLAAQQQMEGLLAPHRPKEPAWFLATVGVSPDHQGKGLGSAVVLPGVEAAERAGVPAFLETSAPRNLPFYERLGFTVTADVEVPEGPRTWCMTRKPGA

SEQ ID NO: 20280 - protein, 540 aa, Artificial Sequence
  Synthetic Polypeptide
MALPVTALLLPLALLLHAARPDIQLTQSPSFLSASVGDRVTITCRASQDISSYLAWYQQKPGNAPKLLIYAASLLQSGVPSRFSAFGSGTEFTLTISSLQPEDFATYYCQHLKSYPLFTFGPGTKVDIKRLEDLKNVFPPEVAVFEPSEAEISHTQKATLVCLATGFYPDHVELSWWVNGKEVHSGVSTDPQPLKEQPALNDSRYCLSSRLRVSATFWQNPRNHFRCQVQFYGLSENDEWTQDRAKPVTQIVSAEAWGRADCGFTSESYQQGVLSATILYEILLGKATLYAVLVSALVLMAMVKRKDSRGRAKRSGSGATNFSLLKQAGDVEENPGPTRGHMTEYKPTVRLATRDDVPRAVRTLAAAFADYPATRHTVDPDRHIERVTELQELFLTRVGLDIGKVWVADDGAAVAVWTTPESVEAGAVFAEIGPRMAELSGSRLAAQQQMEGLLAPHRPKEPAWFLATVGVSPDHQGKGLGSAVVLPGVEAAERAGVPAFLETSAPRNLPFYERLGFTVTADVEVPEGPRTWCMTRKPGA

SEQ ID NO: 20281 - protein, 310 aa, Artificial Sequence
  Synthetic Polypeptide
MALPVTALLLPLALLLHAARPDIQLTQSPSFLSASVGDRVTITCRASQDISSYLAWYQQKPGNAPKLLIYAASLLQSGVPSRFSAFGSGTEFTLTISSLQPEDFATYYCQHLKSYPLFTFGPGTKVDIKRLEDLKNVFPPEVAVFEPSEAEISHTQKATLVCLATGFYPDHVELSWWVNGKEVHSGVSTDPQPLKEQPALNDSRYCLSSRLRVSATFWQNPRNHFRCQVQFYGLSENDEWTQDRAKPVTQIVSAEAWGRADCGFTSESYQQGVLSATILYEILLGKATLYAVLVSALVLMAMVKRKDSRG

SEQ ID NO: 20282 - protein, 459 aa, Artificial Sequence
  Synthetic Polypeptide
MDWIWRILFLVGAATGAHSFEEVQLVESGGRVVRPGGSLRLSCAASGFTFDDYGMSWVRQPPGKGLEFVSGLNWNGDITAFTDSVKGRFTISRDNVKSSLYLQMNSLRADDTAFYYCARVRTWGDYTTGEEIINSWYFDLWGRGTLVTVSSTRIQNPDPAVYQLRDSKSSDKSVCLFTDFDSQTNVSQSKDSDVYITDKTVLDMRSMDFKSNSAVAWSNKSDFACANAFNNSIIPEDTFFPSPESSCDVKLVEKSFETDTNLNFQNLSVIGFRILLLKVAGFNLLMTLRLWSSRAKRSGSGVKQTLNFDLLKLAGDVESNPGPSRGHMAKPLSQEESTLIERATATINSIPISEDYSVASAALSSDGRIFTGVNVYHFTGGPCAELVVLGTAAAAAAGNLTCIVAIGNENRGILSPCGRCRQVLLDLHPGIKAIVKDSDGQPTAVGIRELLPSGYVWEG

SEQ ID NO: 20283 - protein, 293 aa, Artificial Sequence
  Synthetic Polypeptide
MDWIWRILFLVGAATGAHSFEEVQLVESGGRVVRPGGSLRLSCAASGFTFDDYGMSWVRQPPGKGLEFVSGLNWNGDITAFTDSVKGRFTISRDNVKSSLYLQMNSLRADDTAFYYCARVRTWGDYTTGEEIINSWYFDLWGRGTLVTVSSTRIQNPDPAVYQLRDSKSSDKSVCLFTDFDSQTNVSQSKDSDVYITDKTVLDMRSMDFKSNSAVAWSNKSDFACANAFNNSIIPEDTFFPSPESSCDVKLVEKSFETDTNLNFQNLSVIGFRILLLKVAGFNLLMTLRLWSS

SEQ ID NO: 20284 - protein, 558 aa, Artificial Sequence
  Synthetic Polypeptide
MALPVTALLLPLALLLHAARPDIQLTQSPSFLSASVGDRVTITCRASQDISSYLAWYQQKPGNAPKLLIYAASLLQSGVPSRFSAFGSGTEFTLTISSLQPEDFATYYCQHLKSYPLFTFGPGTKVDIKRLEGKPIPNPLLGLDSTGSGEDLKNVFPPEVAVFEPSEAEISHTQKATLVCLATGFYPDHVELSWWVNGKEVHSGVCTDPQPLKEQPALNDSRYCLSSRLRVSATFWQNPRNHFRCQVQFYGLSENDEWTQDRAKPVTQIVSAEAWGRADCGFTSESYQQGVLSATILYEILLGKATLYAVLVSALVLMAMVKRKDSRGRAKRSGSGATNFSLLKQAGDVEENPGPTRGHMTEYKPTVRLATRDDVPRAVRTLAAAFADYPATRHTVDPDRHIERVTELQELFLTRVGLDIGKVWVADDGAAVAVWTTPESVEAGAVFAEIGPRMAELSGSRLAAQQQMEGLLAPHRPKEPAWFLATVGVSPDHQGKGLGSAVVLPGVEAAERAGVPAFLETSAPRNLPFYERLGFTVTADVEVPEGPRTWCMTRKPGA

SEQ ID NO: 20285 - protein, 328 aa, Artificial Sequence
  Synthetic Polypeptide
MALPVTALLLPLALLLHAARPDIQLTQSPSFLSASVGDRVTITCRASQDISSYLAWYQQKPGNAPKLLIYAASLLQSGVPSRFSAFGSGTEFTLTISSLQPEDFATYYCQHLKSYPLFTFGPGTKVDIKRLEGKPIPNPLLGLDSTGSGEDLKNVFPPEVAVFEPSEAEISHTQKATLVCLATGFYPDHVELSWWVNGKEVHSGVCTDPQPLKEQPALNDSRYCLSSRLRVSATFWQNPRNHFRCQVQFYGLSENDEWTQDRAKPVTQIVSAEAWGRADCGFTSESYQQGVLSATILYEILLGKATLYAVLVSALVLMAMVKRKDSRG

SEQ ID NO: 20286 - protein, 471 aa, Artificial Sequence
  Synthetic Polypeptide
MDWIWRILFLVGAATGAHSFEEVQLVESGGRVVRPGGSLRLSCAASGFTFDDYGMSWVRQPPGKGLEFVSGLNWNGDITAFTDSVKGRFTISRDNVKSSLYLQMNSLRADDTAFYYCARVRTWGDYTTGEEIINSWYFDLWGRGTLVTVSSTREQKLISEEDGSGIQNPDPAVYQLRDSKSSDKSVCLFTDFDSQTNVSQSKDSDVYITDKCVLDMRSMDFKSNSAVAWSNKSDFACANAFNNSIIPEDTFFPSPESSCDVKLVEKSFETDTNLNFQNLSVIGFRILLLKVAGFNLLMTLRLWSSRAKRSGSGVKQTLNFDLLKLAGDVESNPGPSRGHMAKPLSQEESTLIERATATINSIPISEDYSVASAALSSDGRIFTGVNVYHFTGGPCAELVVLGTAAAAAAGNLTCIVAIGNENRGILSPCGRCRQVLLDLHPGIKAIVKDSDGQPTAVGIRELLPSGYVWEG

SEQ ID NO: 20287 - protein, 305 aa, Artificial Sequence
  Synthetic Polypeptide
MDWIWRILFLVGAATGAHSFEEVQLVESGGRVVRPGGSLRLSCAASGFTFDDYGMSWVRQPPGKGLEFVSGLNWNGDITAFTDSVKGRFTISRDNVKSSLYLQMNSLRADDTAFYYCARVRTWGDYTTGEEIINSWYFDLWGRGTLVTVSSTREQKLISEEDGSGIQNPDPAVYQLRDSKSSDKSVCLFTDFDSQTNVSQSKDSDVYITDKCVLDMRSMDFKSNSAVAWSNKSDFACANAFNNSIIPEDTFFPSPESSCDVKLVEKSFETDTNLNFQNLSVIGFRILLLKVAGFNLLMTLRLWSS

SEQ ID NO: 20288 - protein, 653 aa, Artificial Sequence
  Synthetic Polypeptide
MALPVTALLLPLALLLHAARPDIQLTQSPSFLSASVGDRVTITCRASQDISSYLAWYQQKPGNAPKLLIYAASLLQSGVPSRFSAFGSGTEFTLTISSLQPEDFATYYCQHLKSYPLFTFGPGTKVDIKRGGGGSGGGGSGGGGSEVQLVESGGRVVRPGGSLRLSCAASGFTFDDYGMSWVRQPPGKGLEFVSGLNWNGDITAFTDSVKGRFTISRDNVKSSLYLQMNSLRADDTAFYYCARVRTWGDYTTGEEIINSWYFDLWGRGTLVTVSSTRGSGIQNPDPAVYQLRDSKSSDKSVCLFTDFDSQTNVSQSKDSDVYITDKTVLDMRSMDFKSNSAVAWSNKSDFACANAFNNSIIPEDTFFPSSDVPCDVKLVEKSFETDTNLNFQNLSVIGFRILLLKVAGFNLLMTLRLWSSRAKRSGSGVKQTLNFDLLKLAGDVESNPGPSRGHMTEYKPTVRLATRDDVPRAVRTLAAAFADYPATRHTVDPDRHIERVTELQELFLTRVGLDIGKVWVADDGAAVAVWTTPESVEAGAVFAEIGPRMAELSGSRLAAQQQMEGLLAPHRPKEPAWFLATVGVSPDHQGKGLGSAVVLPGVEAAERAGVPAFLETSAPRNLPFYERLGFTVTADVEVPEGPRTWCMTRKPGA

SEQ ID NO: 20289 - protein, 685 aa, Artificial Sequence
  Synthetic Polypeptide
MALPVTALLLPLALLLHAARPDIQLTQSPSFLSASVGDRVTITCRASQDISSYLAWYQQKPGNAPKLLIYAASLLQSGVPSRFSAFGSGTEFTLTISSLQPEDFATYYCQHLKSYPLFTFGPGTKVDIKRGGGGSGGGGSGGGGSEVQLVESGGRVVRPGGSLRLSCAASGFTFDDYGMSWVRQPPGKGLEFVSGLNWNGDITAFTDSVKGRFTISRDNVKSSLYLQMNSLRADDTAFYYCARVRTWGDYTTGEEIINSWYFDLWGRGTLVTVSSLEDLKNVFPPEVAVFEPSKAEIAHTQKATLVCLATGFYPDHVELSWWVNGKEVHSGVSTDPQPLKEQPALNDSRYCLSSRLRVSATFWQNPRNHFRCQVQFYGLSENDEWTQDRAKPVTQIVSAEAWGRADCGITSASYHQGVLSATILYEILLGKATLYAVLVSALVLMAMVKRKDSRGRAKRSGSGATNFSLLKQAGDVEENPGPTRGHMTEYKPTVRLATRDDVPRAVRTLAAAFADYPATRHTVDPDRHIERVTELQELFLTRVGLDIGKVWVADDGAAVAVWTTPESVEAGAVFAEIGPRMAELSGSRLAAQQQMEGLLAPHRPKEPAWFLATVGVSPDHQGKGLGSAVVLPGVEAAERAGVPAFLETSAPRNLPFYERLGFTVTADVEVPEGPRTWCMTRKPGA

SEQ ID NO: 20290 - protein, 708 aa, Artificial Sequence
  Synthetic Polypeptide
MALPVTALLLPLALLLHAARPDIQLTQSPSFLSASVGDRVTITCRASQDISSYLAWYQQKPGNAPKLLIYAASLLQSGVPSRFSAFGSGTEFTLTISSLQPEDFATYYCQHLKSYPLFTFGPGTKVDIKRGGGGSGGGGSGGGGSEVQLVESGGRVVRPGGSLRLSCAASGFTFDDYGMSWVRQPPGKGLEFVSGLNWNGDITAFTDSVKGRFTISRDNVKSSLYLQMNSLRADDTAFYYCARVRTWGDYTTGEEIINSWYFDLWGRGTLVTVSSTRGSGGGGSGGGGSGDGNEEMGGITQTPYKVSISGTTVILTCPQYPGSEILWQHNDKNIGGDEDDKNIGSDEDHLSLKEFSELEQSGYYVCYPRGSKPEDANFYLYLRARVCENCMEMDVMSVATIVIVDICITGGLLLLVYYWSKNRKAKAKPVTRGAGAGGRQRGQNKERPPPVPNPDYEPIRKGQRDLYSGLNQRRIRAKRSGSGVKQTLNFDLLKLAGDVESNPGPSRGHMTEYKPTVRLATRDDVPRAVRTLAAAFADYPATRHTVDPDRHIERVTELQELFLTRVGLDIGKVWVADDGAAVAVWTTPESVEAGAVFAEIGPRMAELSGSRLAAQQQMEGLLAPHRPKEPAWFLATVGVSPDHQGKGLGSAVVLPGVEAAERAGVPAFLETSAPRNLPFYERLGFTVTADVEVPEGPRTWCMTRKPGA

SEQ ID NO: 20291 - protein, 673 aa, Artificial Sequence
  Synthetic Polypeptide
MALPVTALLLPLALLLHAARPDIQLTQSPSFLSASVGDRVTITCRASQDISSYLAWYQQKPGNAPKLLIYAASLLQSGVPSRFSAFGSGTEFTLTISSLQPEDFATYYCQHLKSYPLFTFGPGTKVDIKRGGGGSGGGGSGGGGSEVQLVESGGRVVRPGGSLRLSCAASGFTFDDYGMSWVRQPPGKGLEFVSGLNWNGDITAFTDSVKGRFTISRDNVKSSLYLQMNSLRADDTAFYYCARVRTWGDYTTGEEIINSWYFDLWGRGTLVTVSSTRGSGGGGSGGGGSGFKIPIEELEDRVFVNCNTSITWVEGTVGTLLSDITRLDLGKRILDPRGIYRCNGTDIYKDKESTVQVHYRMCQSCVELDPATVAGIIVTDVIATLLLALGVFCFAGHETGRLSGAADTQALLRNDQVYQPLRDRDDAQYSHLGGNWARNKRAKRSGSGVKQTLNFDLLKLAGDVESNPGPSRGHMTEYKPTVRLATRDDVPRAVRTLAAAFADYPATRHTVDPDRHIERVTELQELFLTRVGLDIGKVWVADDGAAVAVWTTPESVEAGAVFAEIGPRMAELSGSRLAAQQQMEGLLAPHRPKEPAWFLATVGVSPDHQGKGLGSAVVLPGVEAAERAGVPAFLETSAPRNLPFYERLGFTVTADVEVPEGPRTWCMTRKPGA

SEQ ID NO: 20292 - protein, 683 aa, Artificial Sequence
  Synthetic Polypeptide
MALPVTALLLPLALLLHAARPDIQLTQSPSFLSASVGDRVTITCRASQDISSYLAWYQQKPGNAPKLLIYAASLLQSGVPSRFSAFGSGTEFTLTISSLQPEDFATYYCQHLKSYPLFTFGPGTKVDIKRGGGGSGGGGSGGGGSEVQLVESGGRVVRPGGSLRLSCAASGFTFDDYGMSWVRQPPGKGLEFVSGLNWNGDITAFTDSVKGRFTISRDNVKSSLYLQMNSLRADDTAFYYCARVRTWGDYTTGEEIINSWYFDLWGRGTLVTVSSTRGSGGGGSGGGGSGQSIKGNHLVKVYDYQEDGSVLLTCDAEAKNITWFKDGKMIGFLTEDKKKWNLGSNAKDPRGMYQCKGSQNKSKPLQVYYRMCQNCIELNAATISGFLFAEIVSIFVLAVGVYFIAGQDGVRQSRASDKQTLLPNDQLYQPLKDREDDQYSHLQGNQLRRNRAKRSGSGVKQTLNFDLLKLAGDVESNPGPSRGHMTEYKPTVRLATRDDVPRAVRTLAAAFADYPATRHTVDPDRHIERVTELQELFLTRVGLDIGKVWVADDGAAVAVWTTPESVEAGAVFAEIGPRMAELSGSRLAAQQQMEGLLAPHRPKEPAWFLATVGVSPDHQGKGLGSAVVLPGVEAAERAGVPAFLETSAPRNLPFYERLGFTVTADVEVPEGPRTWCMTRKPGA

SEQ ID NO: 20293 - protein, 666 aa, Artificial Sequence
  Synthetic Polypeptide
MALPVTALLLPLALLLHAARPDIQLTQSPSFLSASVGDRVTITCRASQDISSYLAWYQQKPGNAPKLLIYAASLLQSGVPSRFSAFGSGTEFTLTISSLQPEDFATYYCQHLKSYPLFTFGPGTKVDIKRGGGGSGGGGSGGGGSEVQLVESGGRVVRPGGSLRLSCAASGFTFDDYGMSWVRQPPGKGLEFVSGLNWNGDITAFTDSVKGRFTISRDNVKSSLYLQMNSLRADDTAFYYCARVRTWGDYTTGEEIINSWYFDLWGRGTLVTVSSTRGSGGGGSGGGGSGQSFGLLDPKLCYLLDGILFIYGVILTALFLRVKFSRSADAPAYQQGQNQLYNELNLGRREEYDVLDKRRGRDPEMGGKPQRRKNPQEGLYNELQKDKMAEAYSEIGMKGERRRGKGHDGLYQGLSTATKDTYDALHMQALPPRRAKRSGSGVKQTLNFDLLKLAGDVESNPGPSRGHMTEYKPTVRLATRDDVPRAVRTLAAAFADYPATRHTVDPDRHIERVTELQELFLTRVGLDIGKVWVADDGAAVAVWTTPESVEAGAVFAEIGPRMAELSGSRLAAQQQMEGLLAPHRPKEPAWFLATVGVSPDHQGKGLGSAVVLPGVEAAERAGVPAFLETSAPRNLPFYERLGFTVTADVEVPEGPRTWCMTRKPGA

SEQ ID NO: 20294 - protein, 767 aa, Artificial Sequence
  Synthetic Polypeptide
MALPVTALLLPLALLLHAARPEVQLVESGGGLVQPGGSLRLSCAASGFSFSDFWMSWVRQAPGKGLEWVATISQAGSEKDYVDSVKGRFTISRDNAKKSLYLQMNSLRAEDTAVYYCASGVYSFDYRGQGTLVTVSSGTGGGGSGGGGSGGGGSEFDIQLTQSPSFLSASVGDRVTITCRASQDISSYLAWYQQKPGNAPKLLIYAASLLQSGVPSRFSAFGSGTEFTLTISSLQPEDFATYYCQHLKSYPLFTFGPGTKVDIKRLEDLKNVFPPEVAVFEPSEAEISHTQKATLVCLATGFYPDHVELSWWVNGKEVHSGVCTDPQPLKEQPALNDSRYCLSSRLRVSATFWQNPRNHFRCQVQFYGLSENDEWTQDRAKPVTQIVSAEAWGRADCGFTSESYQQGVLSATILYEILLGKATLYAVLVSALVLMAMVKRKDSRGRAKRSGSGATNFSLLKQAGDVEENPGPTSMDWIWRILFLVGAATGAHSFEEVQLVESGGRVVRPGGSLRLSCAASGFTFDDYGMSWVRQPPGKGLEFVSGLNWNGDITAFTDSVKGRFTISRDNVKSSLYLQMNSLRADDTAFYYCARVRTWGDYTTGEEIINSWYFDLWGRGTLVTVSSTRIQNPDPAVYQLRDSKSSDKSVCLFTDFDSQTNVSQSKDSDVYITDKCVLDMRSMDFKSNSAVAWSNKSDFACANAFNNSIIPEDTFFPSPESSCDVKLVEKSFETDTNLNFQNLSVIGFRILLLKVAGFNLLMTLRLWSS

SEQ ID NO: 20295 - protein, 771 aa, Artificial Sequence
  Synthetic Polypeptide
MALPVTALLLPLALLLHAARPEVQLVESGGGLVQPGGSLRLSCAASGFSFSDFWMSWVRQAPGKGLEWVATISQAGSEKDYVDSVKGRFTISRDNAKKSLYLQMNSLRAEDTAVYYCASGVYSFDYRGQGTLVTVSSGTGGGGSGGGGSGGGGSEFDIQLTQSPSFLSASVGDRVTITCRASQDISSYLAWYQQKPGNAPKLLIYAASLLQSGVPSRFSAFGSGTEFTLTISSLQPEDFATYYCQHLKSYPLFTFGPGTKVDIKRLEIQNPDPAVYQLRDSKSSDKSVCLFTDFDSQTNVSQSKDSDVYITDKCVLDMRSMDFKSNSAVAWSNKSDFACANAFNNSIIPEDTFFPSPESSCDVKLVEKSFETDTNLNFQNLSVIGFRILLLKVAGFNLLMTLRLWSSRAKRSGSGVKQTLNFDLLKLAGDVESNPGPTSMDWIWRILFLVGAATGAHSFEEVQLVESGGRVVRPGGSLRLSCAASGFTFDDYGMSWVRQPPGKGLEFVSGLNWNGDITAFTDSVKGRFTISRDNVKSSLYLQMNSLRADDTAFYYCARVRTWGDYTTGEEIINSWYFDLWGRGTLVTVSSTREDLKNVFPPEVAVFEPSEAEISHTQKATLVCLATGFYPDHVELSWWVNGKEVHSGVCTDPQPLKEQPALNDSRYCLSSRLRVSATFWQNPRNHFRCQVQFYGLSENDEWTQDRAKPVTQIVSAEAWGRADCGFTSESYQQGVLSATILYEILLGKATLYAVLVSALVLMAMVKRKDSRG

SEQ ID NO: 20296 - protein, 963 aa, Artificial Sequence
  Synthetic Polypeptide
MALPVTALLLPLALLLHAARPEVQLVESGGGLVQPGGSLRLSCAASGFSFSDFWMSWVRQAPGKGLEWVATISQAGSEKDYVDSVKGRFTISRDNAKKSLYLQMNSLRAEDTAVYYCASGVYSFDYRGQGTLVTVSSGTGGGGSGGGGSGGGGSEFDIQLTQSPSFLSASVGDRVTITCRASQDISSYLAWYQQKPGNAPKLLIYAASLLQSGVPSRFSAFGSGTEFTLTISSLQPEDFATYYCQHLKSYPLFTFGPGTKVDIKRLEDLKNVFPPEVAVFEPSEAEISHTQKATLVCLATGFYPDHVELSWWVNGKEVHSGVSTDPQPLKEQPALNDSRYCLSSRLRVSATFWQNPRNHFRCQVQFYGLSENDEWTQDRAKPVTQIVSAEAWGRADCGSQSFGLLDPKLCYLLDGILFIYGVILTALFLRVKFSRSADAPAYQQGQNQLYNELNLGRREEYDVLDKRRGRDPEMGGKPQRRKNPQEGLYNELQKDKMAEAYSEIGMKGERRRGKGHDGLYQGLSTATKDTYDALHMQALPPRRAKRSGSGATNFSLLKQAGDVEENPGPTSMDWIWRILFLVGAATGAHSFEEVQLVESGGRVVRPGGSLRLSCAASGFTFDDYGMSWVRQPPGKGLEFVSGLNWNGDITAFTDSVKGRFTISRDNVKSSLYLQMNSLRADDTAFYYCARVRTWGDYTTGEEIINSWYFDLWGRGTLVTVSSTRIQNPDPAVYQLRDSKSSDKSVCLFTDFDSQTNVSQSKDSDVYITDKTVLDMRSMDFKSNSAVAWSNKSDFACANAFNNSIIPEDTFFPSPESSCGTQSFGLLDPKLCYLLDGILFIYGVILTALFLRVKFSRSADAPAYQQGQNQLYNELNLGRREEYDVLDKRRGRDPEMGGKPQRRKNPQEGLYNELQKDKMAEAYSEIGMKGERRRGKGHDGLYQGLSTATKDTYDALHMQALPPR

SEQ ID NO: 20297 - protein, 793 aa, Artificial Sequence
  Synthetic Polypeptide
MALPVTALLLPLALLLHAARPEVQLVESGGGLVQPGGSLRLSCAASGFSFSDFWMSWVRQAPGKGLEWVATISQAGSEKDYVDSVKGRFTISRDNAKKSLYLQMNSLRAEDTAVYYCASGVYSFDYRGQGTLVTVSSGTGGGGSGGGGSGGGGSEFDIQLTQSPSFLSASVGDRVTITCRASQDISSYLAWYQQKPGNAPKLLIYAASLLQSGVPSRFSAFGSGTEFTLTISSLQPEDFATYYCQHLKSYPLFTFGPGTKVDIKRLEGQPKANPTVTLFPPSSEELQANKATLVCLISDFYPGAVTVAWKADGSPVKAGVETTKPSKQSNNKYAASSYLSLTPEQWKSHRSYSCQVTHEGSTVEKTVAPTECSPIKTDVITMDPKDNCSKDANDTLLLQLTNTSAYYMYLLLLLKSVVYFAIITCCLLRRTAFCCNGEKSRAKRSGSGATNFSLLKQAGDVEENPGPTSMDWIWRILFLVGAATGAHSFEEVQLVESGGRVVRPGGSLRLSCAASGFTFDDYGMSWVRQPPGKGLEFVSGLNWNGDITAFTDSVKGRFTISRDNVKSSLYLQMNSLRADDTAFYYCARVRTWGDYTTGEEIINSWYFDLWGRGTLVTVSSTRASTKGPSVFPLAPSSKSTSGGTAALGCLVKDYFPEPVTVSWNSGALTSGVHTFPAVLQSSGLYSLSSVVTVPSSSLGTQTYICNVNHKPSNTKVDKRVEPKSCEVKTDSTDHVKPKETENTKQPSKSCHKPKAIVHTEKVNMMSLTVLGLRMLFAKTVAVNFLLTAKLFFL

SEQ ID NO: 20298 - protein, 774 aa, Artificial Sequence
  Synthetic Polypeptide
MALPVTALLLPLALLLHAARPEVQLVESGGGLVQPGGSLRLSCAASGFSFSDFWMSWVRQAPGKGLEWVATISQAGSEKDYVDSVKGRFTISRDNAKKSLYLQMNSLRAEDTAVYYCASGVYSFDYRGQGTLVTVSSGTGGGGSGGGGSGGGGSEFDIQLTQSPSFLSASVGDRVTITCRASQDISSYLAWYQQKPGNAPKLLIYAASLLQSGVPSRFSAFGSGTEFTLTISSLQPEDFATYYCQHLKSYPLFTFGPGTKVDIKRLEGQPKANPTVTLFPPSSEELQANKATLVCLISDFYPGAVTVAWKADGSPVKAGVETTKPSKQSNNKYAASSYLSLTPEQWKSHRSYSCQVTHEGSTVEKTVAPTECSGRADCGFTSESYQQGVLSATILYEILLGKATLYAVLVSALVLMAMVKRKDSRGRAKRSGSGVKQTLNFDLLKLAGDVESNPGPTSMDWIWRILFLVGAATGAHSFEEVQLVESGGRVVRPGGSLRLSCAASGFTFDDYGMSWVRQPPGKGLEFVSGLNWNGDITAFTDSVKGRFTISRDNVKSSLYLQMNSLRADDTAFYYCARVRTWGDYTTGEEIINSWYFDLWGRGTLVTVSSTRASTKGPSVFPLAPSSKSTSGGTAALGCLVKDYFPEPVTVSWNSGALTSGVHTFPAVLQSSGLYSLSSVVTVPSSSLGTQTYICNVNHKPSNTKVDKRVEPKSCIPEDTFFPSPESSCDVKLVEKSFETDTNLNFQNLSVIGFRILLLKVAGFNLLMTLRLWSS

SEQ ID NO: 20299 - protein, 908 aa, Artificial Sequence
  Synthetic Polypeptide
MALPVTALLLPLALLLHAARPEVQLVESGGGLVQPGGSLRLSCAASGFSFSDFWMSWVRQAPGKGLEWVATISQAGSEKDYVDSVKGRFTISRDNAKKSLYLQMNSLRAEDTAVYYCASGVYSFDYRGQGTLVTVSSGTGGGGSGGGGSGGGGSEFDIQLTQSPSFLSASVGDRVTITCRASQDISSYLAWYQQKPGNAPKLLIYAASLLQSGVPSRFSAFGSGTEFTLTISSLQPEDFATYYCQHLKSYPLFTFGPGTKVDIKRLEIQNPDPAVYQLRDSKSSDKSVCLFTDFDSQTNVSQSKDSDVYITDKCVLDMRSMDFKSNSAVAWSNKSDFACANAFNNSIIPEDTFFPSPESSCDVKLVEKSFETDTNLNFQNLSVIGFRILLLKVAGFNLLMTLRLWSSRAKRSGSGVKQTLNFDLLKLAGDVESNPGPTSMDWIWRILFLVGAATGAHSGPQLQLQESGPGLVKPSETLSLTCTVSGDSISSGDYYWGWIRQPPGKGLEWIGHIYYSGVTYYNPSLKSRVTISVDTSRNQFSLKLSSVTAADTAVYYCTREDSSNWRSRGQGTLVTVSSGSGGGGSGGGGSGGGGSFEEVQLVESGGRVVRPGGSLRLSCAASGFTFDDYGMSWVRQPPGKGLEFVSGLNWNGDITAFTDSVKGRFTISRDNVKSSLYLQMNSLRADDTAFYYCARVRTWGDYTTGEEIINSWYFDLWGRGTLVTVSSTREDLKNVFPPEVAVFEPSEAEISHTQKATLVCLATGFYPDHVELSWWVNGKEVHSGVCTDPQPLKEQPALNDSRYCLSSRLRVSATFWQNPRNHFRCQVQFYGLSENDEWTQDRAKPVTQIVSAEAWGRADCGFTSESYQQGVLSATILYEILLGKATLYAVLVSALVLMAMVKRKDSRG

SEQ ID NO: 20300 - protein, 1100 aa, Artificial Sequence
  Synthetic Polypeptide
MALPVTALLLPLALLLHAARPEVQLVESGGGLVQPGGSLRLSCAASGFSFSDFWMSWVRQAPGKGLEWVATISQAGSEKDYVDSVKGRFTISRDNAKKSLYLQMNSLRAEDTAVYYCASGVYSFDYRGQGTLVTVSSGTGGGGSGGGGSGGGGSEFDIQLTQSPSFLSASVGDRVTITCRASQDISSYLAWYQQKPGNAPKLLIYAASLLQSGVPSRFSAFGSGTEFTLTISSLQPEDFATYYCQHLKSYPLFTFGPGTKVDIKRLEDLKNVFPPEVAVFEPSEAEISHTQKATLVCLATGFYPDHVELSWWVNGKEVHSGVSTDPQPLKEQPALNDSRYCLSSRLRVSATFWQNPRNHFRCQVQFYGLSENDEWTQDRAKPVTQIVSAEAWGRADCGSQSFGLLDPKLCYLLDGILFIYGVILTALFLRVKFSRSADAPAYQQGQNQLYNELNLGRREEYDVLDKRRGRDPEMGGKPQRRKNPQEGLYNELQKDKMAEAYSEIGMKGERRRGKGHDGLYQGLSTATKDTYDALHMQALPPRRAKRSGSGATNFSLLKQAGDVEENPGPTSMDWIWRILFLVGAATGAHSGPQLQLQESGPGLVKPSETLSLTCTVSGDSISSGDYYWGWIRQPPGKGLEWIGHIYYSGVTYYNPSLKSRVTISVDTSRNQFSLKLSSVTAADTAVYYCTREDSSNWRSRGQGTLVTVSSGSGGGGSGGGGSGGGGSFEEVQLVESGGRVVRPGGSLRLSCAASGFTFDDYGMSWVRQPPGKGLEFVSGLNWNGDITAFTDSVKGRFTISRDNVKSSLYLQMNSLRADDTAFYYCARVRTWGDYTTGEEIINSWYFDLWGRGTLVTVSSTRIQNPDPAVYQLRDSKSSDKSVCLFTDFDSQTNVSQSKDSDVYITDKTVLDMRSMDFKSNSAVAWSNKSDFACANAFNNSIIPEDTFFPSPESSCGTQSFGLLDPKLCYLLDGILFIYGVILTALFLRVKFSRSADAPAYQQGQNQLYNELNLGRREEYDVLDKRRGRDPEMGGKPQRRKNPQEGLYNELQKDKMAEAYSEIGMKGERRRGKGHDGLYQGLSTATKDTYDALHMQALPPR

SEQ ID NO: 20301 - protein, 930 aa, Artificial Sequence
  Synthetic Polypeptide
MALPVTALLLPLALLLHAARPEVQLVESGGGLVQPGGSLRLSCAASGFSFSDFWMSWVRQAPGKGLEWVATISQAGSEKDYVDSVKGRFTISRDNAKKSLYLQMNSLRAEDTAVYYCASGVYSFDYRGQGTLVTVSSGTGGGGSGGGGSGGGGSEFDIQLTQSPSFLSASVGDRVTITCRASQDISSYLAWYQQKPGNAPKLLIYAASLLQSGVPSRFSAFGSGTEFTLTISSLQPEDFATYYCQHLKSYPLFTFGPGTKVDIKRLEGQPKANPTVTLFPPSSEELQANKATLVCLISDFYPGAVTVAWKADGSPVKAGVETTKPSKQSNNKYAASSYLSLTPEQWKSHRSYSCQVTHEGSTVEKTVAPTECSPIKTDVITMDPKDNCSKDANDTLLLQLTNTSAYYMYLLLLLKSVVYFAIITCCLLRRTAFCCNGEKSRAKRSGSGATNFSLLKQAGDVEENPGPTSMDWIWRILFLVGAATGAHSGPQLQLQESGPGLVKPSETLSLTCTVSGDSISSGDYYWGWIRQPPGKGLEWIGHIYYSGVTYYNPSLKSRVTISVDTSRNQFSLKLSSVTAADTAVYYCTREDSSNWRSRGQGTLVTVSSGSGGGGSGGGGSGGGGSFEEVQLVESGGRVVRPGGSLRLSCAASGFTFDDYGMSWVRQPPGKGLEFVSGLNWNGDITAFTDSVKGRFTISRDNVKSSLYLQMNSLRADDTAFYYCARVRTWGDYTTGEEIINSWYFDLWGRGTLVTVSSTRASTKGPSVFPLAPSSKSTSGGTAALGCLVKDYFPEPVTVSWNSGALTSGVHTFPAVLQSSGLYSLSSVVTVPSSSLGTQTYICNVNHKPSNTKVDKRVEPKSCEVKTDSTDHVKPKETENTKQPSKSCHKPKAIVHTEKVNMMSLTVLGLRMLFAKTVAVNFLLTAKLFFL

SEQ ID NO: 20302 - protein, 911 aa, Artificial Sequence
  Synthetic Polypeptide
MALPVTALLLPLALLLHAARPEVQLVESGGGLVQPGGSLRLSCAASGFSFSDFWMSWVRQAPGKGLEWVATISQAGSEKDYVDSVKGRFTISRDNAKKSLYLQMNSLRAEDTAVYYCASGVYSFDYRGQGTLVTVSSGTGGGGSGGGGSGGGGSEFDIQLTQSPSFLSASVGDRVTITCRASQDISSYLAWYQQKPGNAPKLLIYAASLLQSGVPSRFSAFGSGTEFTLTISSLQPEDFATYYCQHLKSYPLFTFGPGTKVDIKRLEGQPKANPTVTLFPPSSEELQANKATLVCLISDFYPGAVTVAWKADGSPVKAGVETTKPSKQSNNKYAASSYLSLTPEQWKSHRSYSCQVTHEGSTVEKTVAPTECSGRADCGFTSESYQQGVLSATILYEILLGKATLYAVLVSALVLMAMVKRKDSRGRAKRSGSGVKQTLNFDLLKLAGDVESNPGPTSMDWIWRILFLVGAATGAHSGPQLQLQESGPGLVKPSETLSLTCTVSGDSISSGDYYWGWIRQPPGKGLEWIGHIYYSGVTYYNPSLKSRVTISVDTSRNQFSLKLSSVTAADTAVYYCTREDSSNWRSRGQGTLVTVSSGSGGGGSGGGGSGGGGSFEEVQLVESGGRVVRPGGSLRLSCAASGFTFDDYGMSWVRQPPGKGLEFVSGLNWNGDITAFTDSVKGRFTISRDNVKSSLYLQMNSLRADDTAFYYCARVRTWGDYTTGEEIINSWYFDLWGRGTLVTVSSTRASTKGPSVFPLAPSSKSTSGGTAALGCLVKDYFPEPVTVSWNSGALTSGVHTFPAVLQSSGLYSLSSVVTVPSSSLGTQTYICNVNHKPSNTKVDKRVEPKSCIPEDTFFPSPESSCDVKLVEKSFETDTNLNFQNLSVIGFRILLLKVAGFNLLMTLRLWSS

SEQ ID NO: 20303 - protein, 768 aa, Artificial Sequence
  Synthetic Polypeptide
MALPVTALLLPLALLLHAARPEVQVLESGGGLVQPGGSLRLSCAASGFTFSNFAMSWVRQAPGKGLEWVSTISGSAGTTDYADSVKGRFTISRDNSKKTLYLQMNSLRVEDTAVYYCADGRGPFFDYRGQGTLVTVSSGTGGGGSGGGGSGGGGSEFDIQLTQSPSFLSASVGDRVTITCRASQDISSYLAWYQQKPGNAPKLLIYAASLLQSGVPSRFSAFGSGTEFTLTISSLQPEDFATYYCQHLKSYPLFTFGPGTKVDIKRLEDLKNVFPPEVAVFEPSEAEISHTQKATLVCLATGFYPDHVELSWWVNGKEVHSGVCTDPQPLKEQPALNDSRYCLSSRLRVSATFWQNPRNHFRCQVQFYGLSENDEWTQDRAKPVTQIVSAEAWGRADCGFTSESYQQGVLSATILYEILLGKATLYAVLVSALVLMAMVKRKDSRGRAKRSGSGATNFSLLKQAGDVEENPGPTSMDWIWRILFLVGAATGAHSFEEVQLVESGGRVVRPGGSLRLSCAASGFTFDDYGMSWVRQPPGKGLEFVSGLNWNGDITAFTDSVKGRFTISRDNVKSSLYLQMNSLRADDTAFYYCARVRTWGDYTTGEEIINSWYFDLWGRGTLVTVSSTRIQNPDPAVYQLRDSKSSDKSVCLFTDFDSQTNVSQSKDSDVYITDKCVLDMRSMDFKSNSAVAWSNKSDFACANAFNNSIIPEDTFFPSPESSCDVKLVEKSFETDTNLNFQNLSVIGFRILLLKVAGFNLLMTLRLWSS

SEQ ID NO: 20304 - protein, 769 aa, Artificial Sequence
  Synthetic Polypeptide
MALPVTALLLPLALLLHAARPDIQLTQSPSFLSASVGDRVTITCRASQDISSYLAWYQQKPGNAPKLLIYAASLLQSGVPSRFSAFGSGTEFTLTISSLQPEDFATYYCQHLKSYPLFTFGPGTKVDIKRLEDLKNVFPPEVAVFEPSEAEISHTQKATLVCLATGFYPDHVELSWWVNGKEVHSGVCTDPQPLKEQPALNDSRYCLSSRLRVSATFWQNPRNHFRCQVQFYGLSENDEWTQDRAKPVTQIVSAEAWGRADCGFTSESYQQGVLSATILYEILLGKATLYAVLVSALVLMAMVKRKDSRGRAKRSGSGATNFSLLKQAGDVEENPGPTSMDWIWRILFLVGAATGAHSGPEVQLVESGGGLVQAGGSLRLSCAASGRTFSMGWFRQAPGKEREFVAAITYSGGSPYYADSVKGRFTISRDNAKNTVYLQMNSLKPEDTAVYYCAANPTYGSDWNAENWGQGTQVTVSSGSGGGGSGGGGSGGGGSFEEVQLVESGGRVVRPGGSLRLSCAASGFTFDDYGMSWVRQPPGKGLEFVSGLNWNGDITAFTDSVKGRFTISRDNVKSSLYLQMNSLRADDTAFYYCARVRTWGDYTTGEEIINSWYFDLWGRGTLVTVSSTRIQNPDPAVYQLRDSKSSDKSVCLFTDFDSQTNVSQSKDSDVYITDKCVLDMRSMDFKSNSAVAWSNKSDFACANAFNNSIIPEDTFFPSPESSCDVKLVEKSFETDTNLNFQNLSVIGFRILLLKVAGFNLLMTLRLWSS

SEQ ID NO: 20305 - protein, 896 aa, Artificial Sequence
  Synthetic Polypeptide
MALPVTALLLPLALLLHAARPDIQLTQSPSFLSASVGDRVTITCRASQDISSYLAWYQQKPGNAPKLLIYAASLLQSGVPSRFSAFGSGTEFTLTISSLQPEDFATYYCQHLKSYPLFTFGPGTKVDIKRLEDLKNVFPPEVAVFEPSEAEISHTQKATLVCLATGFYPDHVELSWWVNGKEVHSGVCTDPQPLKEQPALNDSRYCLSSRLRVSATFWQNPRNHFRCQVQFYGLSENDEWTQDRAKPVTQIVSAEAWGRADCGFTSESYQQGVLSATILYEILLGKATLYAVLVSALVLMAMVKRKDSRGRAKRSGSGATNFSLLKQAGDVEENPGPTSMDWIWRILFLVGAATGAHSQLQLQESGPGLVKPSETLSLTCTVSGGSISSGDYYWGWIRQPPGKGLEWIGSISYSGSTYYNPSLKSRVTISVDTSRNQFSLKLSSVTAADTAVYYCTREDSSNWRSRGQGTLVTVSSSGGGGSGGGGSEVQLVESGGGLVQAGGSLRLSCAASGRTFSMGWFRQAPGKEREFVAAITYSGGSPYYADSVKGRFTISRDNAKNTVYLQMNSLKPEDTAVYYCAANPTYGSDWNAENWGQGTQVTVSSGSGGGGSGGGGSGGGGSFEEVQLVESGGRVVRPGGSLRLSCAASGFTFDDYGMSWVRQPPGKGLEFVSGLNWNGDITAFTDSVKGRFTISRDNVKSSLYLQMNSLRADDTAFYYCARVRTWGDYTTGEEIINSWYFDLWGRGTLVTVSSTRIQNPDPAVYQLRDSKSSDKSVCLFTDFDSQTNVSQSKDSDVYITDKCVLDMRSMDFKSNSAVAWSNKSDFACANAFNNSIIPEDTFFPSPESSCDVKLVEKSFETDTNLNFQNLSVIGFRILLLKVAGFNLLMTLRLWSS

SEQ ID NO: 20306 - protein, 905 aa, Artificial Sequence
  Synthetic Polypeptide
MALPVTALLLPLALLLHAARPEVQVLESGGGLVQPGGSLRLSCAASGFTFSNFAMSWVRQAPGKGLEWVSTISGSAGTTDYADSVKGRFTISRDNSKKTLYLQMNSLRVEDTAVYYCADGRGPFFDYRGQGTLVTVSSGTGGGGSGGGGSGGGGSEFDIQLTQSPSFLSASVGDRVTITCRASQDISSYLAWYQQKPGNAPKLLIYAASLLQSGVPSRFSAFGSGTEFTLTISSLQPEDFATYYCQHLKSYPLFTFGPGTKVDIKRLEDLKNVFPPEVAVFEPSEAEISHTQKATLVCLATGFYPDHVELSWWVNGKEVHSGVCTDPQPLKEQPALNDSRYCLSSRLRVSATFWQNPRNHFRCQVQFYGLSENDEWTQDRAKPVTQIVSAEAWGRADCGFTSESYQQGVLSATILYEILLGKATLYAVLVSALVLMAMVKRKDSRGRAKRSGSGATNFSLLKQAGDVEENPGPTSMDWIWRILFLVGAATGAHSGPEVQLVESGGGLVQAGGSLRLSCAASGRTFSMGWFRQAPGKEREFVAAITYSGGSPYYASSVRGRFTISRDNAKNTVYLQMNSLKPEDTAVYYCAANPTYGSDWNAENWGQGTQVTVSSGSGGGGSGGGGSGGGGSFEEVQLVESGGRVVRPGGSLRLSCAASGFTFDDYGMSWVRQPPGKGLEFVSGLNWNGDITAFTDSVKGRFTISRDNVKSSLYLQMNSLRADDTAFYYCARVRTWGDYTTGEEIINSWYFDLWGRGTLVTVSSTRIQNPDPAVYQLRDSKSSDKSVCLFTDFDSQTNVSQSKDSDVYITDKCVLDMRSMDFKSNSAVAWSNKSDFACANAFNNSIIPEDTFFPSPESSCDVKLVEKSFETDTNLNFQNLSVIGFRILLLKVAGFNLLMTLRLWSS

SEQ ID NO: 20307 - protein, 724 aa, Artificial Sequence
  Synthetic Polypeptide
MALPVTALLLPLALLLHAARPELQMTQSPSSLSASVGDRVAITCRASQSISSHLNWYQQKPGKAPKLLIYAASSLQSGVPSRFSGSGSGTDFTLTISSLQPEDFATYYCQQSYSTPYTFGQGTKLEIKGGGGSGGGGSGGGGSEVQLVESGGGLVQPGGSLRLSCAASGFTFSSYWMSWVRQAPGKGLEWVANIKQDGSEKYYVDSVKGRFTISRDNAKNSLYLRMNSLRAEDTAVYYCARAWGYSSYYFDYWGQGTLVTVSPTREQKLISEEDLAKPTTTPAPRPPTPAPTIASQPLSLRPEACRPAAGGAVHTRGLDFACDIYIWAPLAGTCGVLLLSLVITLYCKRGRKKLLYIFKQPFMRPVQTTQEEDGCSCRFPEEEEGGCELRVKFSRSADAPAYQQGQNQLYNELNLGRREEYDVLDKRRGRDPEMGGKPRRKNPQEGLYNELQKDKMAEAYSEIGMKGERRRGKGHDGLYQGLSTATKDTYDALHMQALPPRSSGSGEGRGSLLTCGDVEENPGPHMTEYKPTVRLATRDDVPRAVRTLAAAFADYPATRHTVDPDRHIERVTELQELFLTRVGLDIGKVWVADDGAAVAVWTTPESVEAGAVFAEIGPRMAELSGSRLAAQQQMEGLLAPHRPKEPAWFLATVGVSPDHQGKGLGSAVVLPGVEAAERAGVPAFLETSAPRNLPFYERLGFTVTADVEVPEGPRTWCMTRKPGA

SEQ ID NO: 20308 - protein, 718 aa, Artificial Sequence
  Synthetic Polypeptide
MALPVTALLLPLALLLHAARPELQMTQSPSSLSASVGDRVAITCRASQSISSHLNWYQQKPGKAPKLLIYAASSLQSGVPSRFSGSGSGTDFTLTISSLQPEDFATYYCQQSYSTPYTFGQGTKLEIKGGGGSGGGGSGGGGSEVQLVESGGGLVQPGGSLRLSCAASGFTFSSYWMSWVRQAPGKGLEWVANIKQDGSEKYYVDSVKGRFTISRDNAKNSLYLRMNSLRAEDTAVYYCARAWGYSSYYFDYWGQGTLVTVSPTREQKLISEEDLKIEVMYPPPYLDNEKSNGTIIHVKGKHLCPSPLFPGPSKPFWVLVVVGGVLACYSLLVTVAFIIFWVRSKRSRLLHSDYMNMTPRRPGPTRKHYQPYAPPRDFAAYRSRVKFSRSADAPAYQQGQNQLYNELNLGRREEYDVLDKRRGRDPEMGGKPRRKNPQEGLYNELQKDKMAEAYSEIGMKGERRRGKGHDGLYQGLSTATKDTYDALHMQALPPRSSGSGEGRGSLLTCGDVEENPGPHMTEYKPTVRLATRDDVPRAVRTLAAAFADYPATRHTVDPDRHIERVTELQELFLTRVGLDIGKVWVADDGAAVAVWTTPESVEAGAVFAEIGPRMAELSGSRLAAQQQMEGLLAPHRPKEPAWFLATVGVSPDHQGKGLGSAVVLPGVEAAERAGVPAFLETSAPRNLPFYERLGFTVTADVEVPEGPRTWCMTRKPGA

SEQ ID NO: 20309 - protein, 495 aa, Artificial Sequence
  Synthetic Polypeptide
MALPVTALLLPLALLLHAARPELQMTQSPSSLSASVGDRVAITCRASQSISSHLNWYQQKPGKAPKLLIYAASSLQSGVPSRFSGSGSGTDFTLTISSLQPEDFATYYCQQSYSTPYTFGQGTKLEIKGGGGSGGGGSGGGGSEVQLVESGGGLVQPGGSLRLSCAASGFTFSSYWMSWVRQAPGKGLEWVANIKQDGSEKYYVDSVKGRFTISRDNAKNSLYLRMNSLRAEDTAVYYCARAWGYSSYYFDYWGQGTLVTVSPTREQKLISEEDLKIEVMYPPPYLDNEKSNGTIIHVKGKHLCPSPLFPGPSKPFWVLVVVGGVLACYSLLVTVAFIIFWVRSKRSRLLHSDYMNMTPRRPGPTRKHYQPYAPPRDFAAYRSRVKFSRSADAPAYQQGQNQLYNELNLGRREEYDVLDKRRGRDPEMGGKPRRKNPQEGLYNELQKDKMAEAYSEIGMKGERRRGKGHDGLYQGLSTATKDTYDALHMQALPPR

SEQ ID NO: 20310 - protein, 501 aa, Artificial Sequence
  Synthetic Polypeptide
MALPVTALLLPLALLLHAARPELQMTQSPSSLSASVGDRVAITCRASQSISSHLNWYQQKPGKAPKLLIYAASSLQSGVPSRFSGSGSGTDFTLTISSLQPEDFATYYCQQSYSTPYTFGQGTKLEIKGGGGSGGGGSGGGGSEVQLVESGGGLVQPGGSLRLSCAASGFTFSSYWMSWVRQAPGKGLEWVANIKQDGSEKYYVDSVKGRFTISRDNAKNSLYLRMNSLRAEDTAVYYCARAWGYSSYYFDYWGQGTLVTVSPTREQKLISEEDLAKPTTTPAPRPPTPAPTIASQPLSLRPEACRPAAGGAVHTRGLDFACDIYIWAPLAGTCGVLLLSLVITLYCKRGRKKLLYIFKQPFMRPVQTTQEEDGCSCRFPEEEEGGCELRVKFSRSADAPAYQQGQNQLYNELNLGRREEYDVLDKRRGRDPEMGGKPRRKNPQEGLYNELQKDKMAEAYSEIGMKGERRRGKGHDGLYQGLSTATKDTYDALHMQALPPR

SEQ ID NO: 20311 - protein, 501 aa, Artificial Sequence
  Synthetic Polypeptide
MALPVTALLLPLALLLHAARPEVQLVESGGGLVQPGGSLRLSCAASGFTFSSYWMSWVRQAPGKGLEWVANIKQDGSEKYYVDSVKGRFTISRDNAKNSLYLRMNSLRAEDTAVYYCARAWGYSSYYFDYWGQGTLVTVSPGGGGSGGGGSGGGGSELQMTQSPSSLSASVGDRVAITCRASQSISSHLNWYQQKPGKAPKLLIYAASSLQSGVPSRFSGSGSGTDFTLTISSLQPEDFATYYCQQSYSTPYTFGQGTKLEIKTREQKLISEEDLAKPTTTPAPRPPTPAPTIASQPLSLRPEACRPAAGGAVHTRGLDFACDIYIWAPLAGTCGVLLLSLVITLYCKRGRKKLLYIFKQPFMRPVQTTQEEDGCSCRFPEEEEGGCELRVKFSRSADAPAYQQGQNQLYNELNLGRREEYDVLDKRRGRDPEMGGKPRRKNPQEGLYNELQKDKMAEAYSEIGMKGERRRGKGHDGLYQGLSTATKDTYDALHMQALPPR

SEQ ID NO: 20312 - protein, 914 aa, Artificial Sequence
  Synthetic Polypeptide
MALPVTALLLPLALLLHAARPELQMTQSPSSLSASVGDRVAITCRASQSISSHLNWYQQKPGKAPKLLIYAASSLQSGVPSRFSGSGSGTDFTLTISSLQPEDFATYYCQQSYSTPYTFGQGTKLEIKGGGGSGGGGSGGGGSEVQLVESGGGLVQPGGSLRLSCAASGFTFSSYWMSWVRQAPGKGLEWVANIKQDGSEKYYVDSVKGRFTISRDNAKNSLYLRMNSLRAEDTAVYYCARAWGYSSYYFDYWGQGTLVTVSPTREQKLISEEDLAKPTTTPAPRPPTPAPTIASQPLSLRPEACRPAAGGAVHTRGLDFACDIYIWAPLAGTCGVLLLSLVITLYCGRARVKFSRSADAPAYQQGQNQLYNELNLGRREEYDVLDKRRGRDPEMGGKPRRKNPQEGLYNELQKDKMAEAYSEIGMKGERRRGKGHDGLYQGLSTATKDTYDALHMQALPPRSRGSGATNFSLLKQAGDVEENPGPGIHMATYEVLCEVARKLGTDDREVVLFLLNVFIPQPTLAQLIGALRALKEEGRLTFPLLAECLFRAGRRDLLRDLLHLDPRFLERHLAGTMSYFSPYQLTVLHVDGELCARDIRSLIFLSKDTIGSRSTPQTFLHWVYCMENLDLLGPTDVDALMSMLRSLSRVDLQRQVQTLMGLHLSGPSHSQHYRHTPLETDFYDYKDDDDKTSGSGEGRGSLLTCGDVEENPGPHMTEYKPTVRLATRDDVPRAVRTLAAAFADYPATRHTVDPDRHIERVTELQELFLTRVGLDIGKVWVADDGAAVAVWTTPESVEAGAVFAEIGPRMAELSGSRLAAQQQMEGLLAPHRPKEPAWFLATVGVSPDHQGKGLGSAVVLPGVEAAERAGVPAFLETSAPRNLPFYERLGFTVTADVEVPEGPRTWCMTRKPGA

SEQ ID NO: 20313 - protein, 854 aa, Artificial Sequence
  Synthetic Polypeptide
MALPVTALLLPLALLLHAARPELQMTQSPSSLSASVGDRVAITCRASQSISSHLNWYQQKPGKAPKLLIYAASSLQSGVPSRFSGSGSGTDFTLTISSLQPEDFATYYCQQSYSTPYTFGQGTKLEIKLEIQNPDPAVYQLRDSKSSDKSVCLFTDFDSQTNVSQSKDSDVYITDKCVLDMRSMDFKSNSAVAWSNKSDFACANAFNNSIIPEDTFFPSSDVPCDVKLVEKSFETDTNLNFQNLSVIGFRILLLKVAGFNLLMTLRLWSSRAKRSGSGVKQTLNFDLLKLAGDVESNPGPTSMDWIWRILFLVGAATGAHSFEEVQLVESGGGLVQPGGSLRLSCAASGFTFSSYWMSWVRQAPGKGLEWVANIKQDGSEKYYVDSVKGRFTISRDNAKNSLYLRMNSLRAEDTAVYYCARAWGYSSYYFDYWGQGTLVTVSPTREDLKNVFPPEVAVFEPSKAEIAHTQKATLVCLATGFYPDHVELSWWVNGKEVHSGVCTDPQPLKEQPALNDSRYCLSSRLRVSATFWQNPRNHFRCQVQFYGLSENDEWTQDRAKPVTQIVSAEAWGRADCGITSASYHQGVLSATILYEILLGKATLYAVLVSALVLMAMVKRKDSRGRAKRSGSGATNFSLLKQAGDVEENPGPSRGHMTEYKPTVRLATRDDVPRAVRTLAAAFADYPATRHTVDPDRHIERVTELQELFLTRVGLDIGKVWVADDGAAVAVWTTPESVEAGAVFAEIGPRMAELSGSRLAAQQQMEGLLAPHRPKEPAWFLATVGVSPDHQGKGLGSAVVLPGVEAAERAGVPAFLETSAPRNLPFYERLGFTVTADVEVPEGPRTWCMTRKPGA

SEQ ID NO: 20314 - protein, 853 aa, Artificial Sequence
  Synthetic Polypeptide
MALPVTALLLPLALLLHAARPELQMTQSPSSLSASVGDRVAITCRASQSISSHLNWYQQKPGKAPKLLIYAASSLQSGVPSRFSGSGSGTDFTLTISSLQPEDFATYYCQQSYSTPYTFGQGTKLEIKLEDLKNVFPPEVAVFEPSKAEIAHTQKATLVCLATGFYPDHVELSWWVNGKEVHSGVCTDPQPLKEQPALNDSRYCLSSRLRVSATFWQNPRNHFRCQVQFYGLSENDEWTQDRAKPVTQIVSAEAWGRADCGITSASYHQGVLSATILYEILLGKATLYAVLVSALVLMAMVKRKDSRGRAKRSGSGATNFSLLKQAGDVEENPGPTSMDWIWRILFLVGAATGAHSFEEVQLVESGGGLVQPGGSLRLSCAASGFTFSSYWMSWVRQAPGKGLEWVANIKQDGSEKYYVDSVKGRFTISRDNAKNSLYLRMNSLRAEDTAVYYCARAWGYSSYYFDYWGQGTLVTVSPTRIQNPDPAVYQLRDSKSSDKSVCLFTDFDSQTNVSQSKDSDVYITDKCVLDMRSMDFKSNSAVAWSNKSDFACANAFNNSIIPEDTFFPSSDVPCDVKLVEKSFETDTNLNFQNLSVIGFRILLLKVAGFNLLMTLRLWSSRAKRSGSGVKQTLNFDLLKLAGDVESNPGPSRGHMTEYKPTVRLATRDDVPRAVRTLAAAFADYPATRHTVDPDRHIERVTELQELFLTRVGLDIGKVWVADDGAAVAVWTTPESVEAGAVFAEIGPRMAELSGSRLAAQQQMEGLLAPHRPKEPAWFLATVGVSPDHQGKGLGSAVVLPGVEAAERAGVPAFLETSAPRNLPFYERLGFTVTADVEVPEGPRTWCMTRKPGA

SEQ ID NO: 20315 - protein, 620 aa, Artificial Sequence
  Synthetic Polypeptide
MALPVTALLLPLALLLHAARPELQMTQSPSSLSASVGDRVAITCRASQSISSHLNWYQQKPGKAPKLLIYAASSLQSGVPSRFSGSGSGTDFTLTISSLQPEDFATYYCQQSYSTPYTFGQGTKLEIKLEDLKNVFPPEVAVFEPSEAEISHTQKATLVCLATGFYPDHVELSWWVNGKEVHSGVCTDPQPLKEQPALNDSRYCLSSRLRVSATFWQNPRNHFRCQVQFYGLSENDEWTQDRAKPVTQIVSAEAWGRADCGFTSESYQQGVLSATILYEILLGKATLYAVLVSALVLMAMVKRKDSRGRAKRSGSGATNFSLLKQAGDVEENPGPTSMDWIWRILFLVGAATGAHSFEEVQLVESGGGLVQPGGSLRLSCAASGFTFSSYWMSWVRQAPGKGLEWVANIKQDGSEKYYVDSVKGRFTISRDNAKNSLYLRMNSLRAEDTAVYYCARAWGYSSYYFDYWGQGTLVTVSPTRIQNPDPAVYQLRDSKSSDKSVCLFTDFDSQTNVSQSKDSDVYITDKCVLDMRSMDFKSNSAVAWSNKSDFACANAFNNSIIPEDTFFPSPESSCDVKLVEKSFETDTNLNFQNLSVIGFRILLLKVAGFNLLMTLRLWSS

SEQ ID NO: 20316 - protein, 845 aa, Artificial Sequence
  Synthetic Polypeptide
MALPVTALLLPLALLLHAARPELQMTQSPSSLSASVGDRVAITCRASQSISSHLNWYQQKPGKAPKLLIYAASSLQSGVPSRFSGSGSGTDFTLTISSLQPEDFATYYCQQSYSTPYTFGQGTKLEIKLEDLKNVFPPEVAVFEPSEAEISHTQKATLVCLATGFYPDHVELSWWVNGKEVHSGVCTDPQPLKEQPALNDSRYCLSSRLRVSATFWQNPRNHFRCQVQFYGLSENDEWTQDRAKPVTQIVSAEAWGRADCGFTSESYQQGVLSATILYEILLGKATLYAVLVSALVLMAMVKRKDSRGRAKRSGSGATNFSLLKQAGDVEENPGPTSMDWIWRILFLVGAATGAHSFEEVQLVESGGGLVQPGGSLRLSCAASGFTFSSYWMSWVRQAPGKGLEWVANIKQDGSEKYYVDSVKGRFTISRDNAKNSLYLRMNSLRAEDTAVYYCARAWGYSSYYFDYWGQGTLVTVSPTRIQNPDPAVYQLRDSKSSDKSVCLFTDFDSQTNVSQSKDSDVYITDKCVLDMRSMDFKSNSAVAWSNKSDFACANAFNNSIIPEDTFFPSPESSCDVKLVEKSFETDTNLNFQNLSVIGFRILLLKVAGFNLLMTLRLWSSRAKRSGSGVKQTLNFDLLKLAGDVESNPGPSRGGIHTMATYEVLCEVARKLGTDDREVVLFLLNVFIPQPTLAQLIGALRALKEEGRLTFPLLAECLFRAGRRDLLRDLLHLDPRFLERHLAGTMSYFSPYQLTVLHVDGELCARDIRSLIFLSKDTIGSRSTPQTFLHWVYCMENLDLLGPTDVDALMSMLRSLSRVDLQRQVQTLMGLHLSGPSHSQHYRHTP

SEQ ID NO: 20317 - protein, 624 aa, Artificial Sequence
  Synthetic Polypeptide
MALPVTALLLPLALLLHAARPELQMTQSPSSLSASVGDRVAITCRASQSISSHLNWYQQKPGKAPKLLIYAASSLQSGVPSRFSGSGSGTDFTLTISSLQPEDFATYYCQQSYSTPYTFGQGTKLEIKLEIQNPDPAVYQLRDSKSSDKSVCLFTDFDSQTNVSQSKDSDVYITDKCVLDMRSMDFKSNSAVAWSNKSDFACANAFNNSIIPEDTFFPSPESSCDVKLVEKSFETDTNLNFQNLSVIGFRILLLKVAGFNLLMTLRLWSSRAKRSGSGVKQTLNFDLLKLAGDVESNPGPTSMDWIWRILFLVGAATGAHSFEEVQLVESGGGLVQPGGSLRLSCAASGFTFSSYWMSWVRQAPGKGLEWVANIKQDGSEKYYVDSVKGRFTISRDNAKNSLYLRMNSLRAEDTAVYYCARAWGYSSYYFDYWGQGTLVTVSPTREDLKNVFPPEVAVFEPSEAEISHTQKATLVCLATGFYPDHVELSWWVNGKEVHSGVCTDPQPLKEQPALNDSRYCLSSRLRVSATFWQNPRNHFRCQVQFYGLSENDEWTQDRAKPVTQIVSAEAWGRADCGFTSESYQQGVLSATILYEILLGKATLYAVLVSALVLMAMVKRKDSRG

SEQ ID NO: 20318 - protein, 846 aa, Artificial Sequence
  Synthetic Polypeptide
MALPVTALLLPLALLLHAARPELQMTQSPSSLSASVGDRVAITCRASQSISSHLNWYQQKPGKAPKLLIYAASSLQSGVPSRFSGSGSGTDFTLTISSLQPEDFATYYCQQSYSTPYTFGQGTKLEIKLEIQNPDPAVYQLRDSKSSDKSVCLFTDFDSQTNVSQSKDSDVYITDKCVLDMRSMDFKSNSAVAWSNKSDFACANAFNNSIIPEDTFFPSPESSCDVKLVEKSFETDTNLNFQNLSVIGFRILLLKVAGFNLLMTLRLWSSRAKRSGSGVKQTLNFDLLKLAGDVESNPGPTSMDWIWRILFLVGAATGAHSFEEVQLVESGGGLVQPGGSLRLSCAASGFTFSSYWMSWVRQAPGKGLEWVANIKQDGSEKYYVDSVKGRFTISRDNAKNSLYLRMNSLRAEDTAVYYCARAWGYSSYYFDYWGQGTLVTVSPTREDLKNVFPPEVAVFEPSEAEISHTQKATLVCLATGFYPDHVELSWWVNGKEVHSGVCTDPQPLKEQPALNDSRYCLSSRLRVSATFWQNPRNHFRCQVQFYGLSENDEWTQDRAKPVTQIVSAEAWGRADCGFTSESYQQGVLSATILYEILLGKATLYAVLVSALVLMAMVKRKDSRGRAKRSGSGATNFSLLKQAGDVEENPGPSRGGIHTMATYEVLCEVARKLGTDDREVVLFLLNVFIPQPTLAQLIGALRALKEEGRLTFPLLAECLFRAGRRDLLRDLLHLDPRFLERHLAGTMSYFSPYQLTVLHVDGELCARDIRSLIFLSKDTIGSRSTPQTFLHWVYCMENLDLLGPTDVDALMSMLRSLSRVDLQRQVQTLMGLHLSGPSHSQHYRHTP

SEQ ID NO: 20319 - protein, 898 aa, Artificial Sequence
  Synthetic Polypeptide
MALPVTALLLPLALLLHAARPLEGKPIPNPLLGLDSTGSGEDLKNVFPPEVAVFEPSKAEIAHTQKATLVCLATGFYPDHVELSWWVNGKEVHSGVCTDPQPLKEQPALNDSRYCLSSRLRVSATFWQNPRNHFRCQVQFYGLSENDEWTQDRAKPVTQIVSAEAWGRADCGITSASYHQGVLSATILYEILLGKATLYAVLVSALVLMAMVKRKDSRGRAKRSGSGATNFSLLKQAGDVEENPGPTSMALPVTALLLPLALLLHAARPELQMTQSPSSLSASVGDRVAITCRASQSISSHLNWYQQKPGKAPKLLIYAASSLQSGVPSRFSGSGSGTDFTLTISSLQPEDFATYYCQQSYSTPYTFGQGTKLEIKGGGGSGGGGSGGGGSEVQLVESGGGLVQPGGSLRLSCAASGFTFSSYWMSWVRQAPGKGLEWVANIKQDGSEKYYVDSVKGRFTISRDNAKNSLYLRMNSLRAEDTAVYYCARAWGYSSYYFDYWGQGTLVTVSPTREQKLISEEDGSGIQNPDPAVYQLRDSKSSDKSVCLFTDFDSQTNVSQSKDSDVYITDKCVLDMRSMDFKSNSAVAWSNKSDFACANAFNNSIIPEDTFFPSSDVPCDVKLVEKSFETDTNLNFQNLSVIGFRILLLKVAGFNLLMTLRLWSSRAKRSGSGVKQTLNFDLLKLAGDVESNPGPSRGHMTEYKPTVRLATRDDVPRAVRTLAAAFADYPATRHTVDPDRHIERVTELQELFLTRVGLDIGKVWVADDGAAVAVWTTPESVEAGAVFAEIGPRMAELSGSRLAAQQQMEGLLAPHRPKEPAWFLATVGVSPDHQGKGLGSAVVLPGVEAAERAGVPAFLETSAPRNLPFYERLGFTVTADVEVPEGPRTWCMTRKPGA

SEQ ID NO: 20320 - protein, 899 aa, Artificial Sequence
  Synthetic Polypeptide
MALPVTALLLPLALLLHAARPLEQKLISEEDLGSGDRPDPAVYQLRDSKSSDKSVCLFTDFDSQTNVSQSKDSDVYITDKCVLDMRSMDFKSNSAVAWSNKSDFACANAFNNSIIPEDTFFPSPESSCDVKLVEKSFETDTNLNFQNLSVIGFRILLLKVAGFNLLMTLRLWSSSSRAKRSGSGVKQTLNFDLLKLAGDVESNPGPTSMALPVTALLLPLALLLHAARPELQMTQSPSSLSASVGDRVAITCRASQSISSHLNWYQQKPGKAPKLLIYAASSLQSGVPSRFSGSGSGTDFTLTISSLQPEDFATYYCQQSYSTPYTFGQGTKLEIKGGGGSGGGGSGGGGSEVQLVESGGGLVQPGGSLRLSCAASGFTFSSYWMSWVRQAPGKGLEWVANIKQDGSEKYYVDSVKGRFTISRDNAKNSLYLRMNSLRAEDTAVYYCARAWGYSSYYFDYWGQGTLVTVSPTRGKPIPNPLLGLDSTGSGEDLKNVFPPEVAVFEPSEAEISHTQKATLVCLATGFYPDHVELSWWVNGKEVHSGVCTDPQPLKEQPALNDSRYCLSSRLRVSATFWQNPRNHFRCQVQFYGLSENDEWTQDRAKPVTQIVSAEAWGRADCGFTSESYQQGVLSATILYEILLGKATLYAVLVSALVLMAMVKRKDSRGRAKRSGSGATNFSLLKQAGDVEENPGPSRGHMTEYKPTVRLATRDDVPRAVRTLAAAFADYPATRHTVDPDRHIERVTELQELFLTRVGLDIGKVWVADDGAAVAVWTTPESVEAGAVFAEIGPRMAELSGSRLAAQQQMEGLLAPHRPKEPAWFLATVGVSPDHQGKGLGSAVVLPGVEAAERAGVPAFLETSAPRNLPFYERLGFTVTADVEVPEGPRTWCMTRKPGA

SEQ ID NO: 20321 - protein, 853 aa, Artificial Sequence
  Synthetic Polypeptide
MALPVTALLLPLALLLHAARPELQMTQSPSSLSASVGDRVAITCRASQSISSHLNWYQQKPGKAPKLLIYAASSLQSGVPSRFSGSGSGTDFTLTISSLQPEDFATYYCQQSYSTPYTFGQGTKLEIKLEDLKNVFPPEVAVFEPSEAEISHTQKATLVCLATGFYPDHVELSWWVNGKEVHSGVSTDPQPLKEQPALNDSRYCLSSRLRVSATFWQNPRNHFRCQVQFYGLSENDEWTQDRAKPVTQIVSAEAWGRADCGFTSESYQQGVLSATILYEILLGKATLYAVLVSALVLMAMVKRKDSRGRAKRSGSGATNFSLLKQAGDVEENPGPTSMDWIWRILFLVGAATGAHSFEEVQLVESGGGLVQPGGSLRLSCAASGFTFSSYWMSWVRQAPGKGLEWVANIKQDGSEKYYVDSVKGRFTISRDNAKNSLYLRMNSLRAEDTAVYYCARAWGYSSYYFDYWGQGTLVTVSPTRIQNPDPAVYQLRDSKSSDKSVCLFTDFDSQTNVSQSKDSDVYITDKTVLDMRSMDFKSNSAVAWSNKSDFACANAFNNSIIPEDTFFPSPESSCDVKLVEKSFETDTNLNFQNLSVIGFRILLLKVAGFNLLMTLRLWSSRAKRSGSGVKQTLNFDLLKLAGDVESNPGPSRGHMTEYKPTVRLATRDDVPRAVRTLAAAFADYPATRHTVDPDRHIERVTELQELFLTRVGLDIGKVWVADDGAAVAVWTTPESVEAGAVFAEIGPRMAELSGSRLAAQQQMEGLLAPHRPKEPAWFLATVGVSPDHQGKGLGSAVVLPGVEAAERAGVPAFLETSAPRNLPFYERLGFTVTADVEVPEGPRTWCMTRKPGA

SEQ ID NO: 20322 - protein, 935 aa, Artificial Sequence
  Synthetic Polypeptide
MALPVTALLLPLALLLHAARPELQMTQSPSSLSASVGDRVAITCRASQSISSHLNWYQQKPGKAPKLLIYAASSLQSGVPSRFSGSGSGTDFTLTISSLQPEDFATYYCQQSYSTPYTFGQGTKLEIKLEDLKNVFPPEVAVFEPSEAEISHTQKATLVCLATGFYPDHVELSWWVNGKEVHSGVSTDPQPLKEQPALNDSRYCLSSRLRVSATFWQNPRNHFRCQVQFYGLSENDEWTQDRAKPVTQIVSAEAWGRADCGFTSESYQQGVLSATILYEILLGKATLYAVLVSALVLMAMVKRKDSRGRAKRSGSGATNFSLLKQAGDVEENPGPTSMDWIWRILFLVGAATGAHSFEEVQLVESGGGLVQPGGSLRLSCAASGFTFSSYWMSWVRQAPGKGLEWVANIKQDGSEKYYVDSVKGRFTISRDNAKNSLYLRMNSLRAEDTAVYYCARAWGYSSYYFDYWGQGTLVTVSPTREQKLISEEDGSGTPFPSLAPPIMLLVDGKQQMVVVCLVLDVAPPGLDSPIWFSAGNGSALDAFTYGPSPATDGTWTNLAHLSLPSEELASWEPLVCHTGPGAEGHSRSTQPMHLSGEASTARTCPQEPLRGTPGGALWLGVLRLLLFKLLLFDLLLTCSCLCDPAGPLPSPATTTRLRALGSHRLHPATETGGREATSSPRPQPRDRRWGDTPPGRKPGSPVRAKRSGSGVKQTLNFDLLKLAGDVESNPGPSRGHMTEYKPTVRLATRDDVPRAVRTLAAAFADYPATRHTVDPDRHIERVTELQELFLTRVGLDIGKVWVADDGAAVAVWTTPESVEAGAVFAEIGPRMAELSGSRLAAQQQMEGLLAPHRPKEPAWFLATVGVSPDHQGKGLGSAVVLPGVEAAERAGVPAFLETSAPRNLPFYERLGFTVTADVEVPEGPRTWCMTRKPGA

SEQ ID NO: 20323 - protein, 953 aa, Artificial Sequence
  Synthetic Polypeptide
MALPVTALLLPLALLLHAARPLEDLKNVFPPEVAVFEPSEAEISHTQKATLVCLATGFYPDHVELSWWVNGKEVHSGVSTDPQPLKEQPALNDSRYCLSSRLRVSATFWQNPRNHFRCQVQFYGLSENDEWTQDRAKPVTQIVSAEAWGRADCGFTSESYQQGVLSATILYEILLGKATLYAVLVSALVLMAMVKRKDSRGRAKRSGSGATNFSLLKQAGDVEENPGPTSMALPVTALLLPLALLLHAARPELQMTQSPSSLSASVGDRVAITCRASQSISSHLNWYQQKPGKAPKLLIYAASSLQSGVPSRFSGSGSGTDFTLTISSLQPEDFATYYCQQSYSTPYTFGQGTKLEIKGGGGSGGGGSGGGGSEVQLVESGGGLVQPGGSLRLSCAASGFTFSSYWMSWVRQAPGKGLEWVANIKQDGSEKYYVDSVKGRFTISRDNAKNSLYLRMNSLRAEDTAVYYCARAWGYSSYYFDYWGQGTLVTVSPTREQKLISEEDLGSGTPFPSLAPPIMLLVDGKQQMVVVCLVLDVAPPGLDSPIWFSAGNGSALDAFTYGPSPATDGTWTNLAHLSLPSEELASWEPLVCHTGPGAEGHSRSTQPMHLSGEASTARTCPQEPLRGTPGGALWLGVLRLLLFKLLLFDLLLTCSCLCDPAGPLPSPATTTRLRALGSHRLHPATETGGREATSSPRPQPRDRRWGDTPPGRKPGSPVRAKRSGSGVKQTLNFDLLKLAGDVESNPGPSRSRGHMTEYKPTVRLATRDDVPRAVRTLAAAFADYPATRHTVDPDRHIERVTELQELFLTRVGLDIGKVWVADDGAAVAVWTTPESVEAGAVFAEIGPRMAELSGSRLAAQQQMEGLLAPHRPKEPAWFLATVGVSPDHQGKGLGSAVVLPGVEAAERAGVPAFLETSAPRNLPFYERLGFTVTADVEVPEGPRTWCMTRKPGA

SEQ ID NO: 20324 - protein, 890 aa, Artificial Sequence
  Synthetic Polypeptide
MALPVTALLLPLALLLHAARPELQMTQSPSSLSASVGDRVAITCRASQSISSHLNWYQQKPGKAPKLLIYAASSLQSGVPSRFSGSGSGTDFTLTISSLQPEDFATYYCQQSYSTPYTFGQGTKLEIKLEGKPIPNPLLGLDSTGSGDKQLDADVSPKPTIFLPSIAETKLQKAGTYLCLLEKFFPDVIKIHWQEKKSNTILGSQEGNTMKTNDTYMKFSWLTVPEKSLDKEHRCIVRHENNKNGVDQEIIFPPIKTDVITMDPKDNCSKDANDTLLLQLTNTSAYYMYLLLLLKSVVYFAIITCCLLRRTAFCCNGEKSRAKRSGSGATNFSLLKQAGDVEENPGPTSMDWIWRILFLVGAATGAHSFEEVQLVESGGGLVQPGGSLRLSCAASGFTFSSYWMSWVRQAPGKGLEWVANIKQDGSEKYYVDSVKGRFTISRDNAKNSLYLRMNSLRAEDTAVYYCARAWGYSSYYFDYWGQGTLVTVSPTREQKLISEEDGSGSQPHTKPSVFVMKNGTNVACLVKEFYPKDIRINLVSSKKITEFDPAIVISPSGKYNAVKLGKYEDSNSVTCSVQHDNKTVHSTDFEVKTDSTDHVKPKETENTKQPSKSCHKPKAIVHTEKVNMMSLTVLGLRMLFAKTVAVNFLLTAKLFFLRAKRSGSGVKQTLNFDLLKLAGDVESNPGPSRGHMTEYKPTVRLATRDDVPRAVRTLAAAFADYPATRHTVDPDRHIERVTELQELFLTRVGLDIGKVWVADDGAAVAVWTTPESVEAGAVFAEIGPRMAELSGSRLAAQQQMEGLLAPHRPKEPAWFLATVGVSPDHQGKGLGSAVVLPGVEAAERAGVPAFLETSAPRNLPFYERLGFTVTADVEVPEGPRTWCMTRKPGA

SEQ ID NO: 20325 - protein, 628 aa, Artificial Sequence
  Synthetic Polypeptide
MALPVTALLLPLALLLHAARPELQMTQSPSSLSASVGDRVAITCRASQSISSHLNWYQQKPGKAPKLLIYAASSLQSGVPSRFSGSGSGTDFTLTISSLQPEDFATYYCQQSYSTPYTFGQGTKLEIKLESQPHTKPSVFVMKNGTNVACLVKEFYPKDIRINLVSSKKITEFDPAIVISPSGKYNAVKLGKYEDSNSVTCSVQHDNKTVHSTDFEVKTDSTDHVKPKETENTKQPSKSCHKPKAIVHTEKVNMMSLTVLGLRMLFAKTVAVNFLLTAKLFFLRAKRSGSGATNFSLLKQAGDVEENPGPTSMDWIWRILFLVGAATGAHSFEEVQLVESGGGLVQPGGSLRLSCAASGFTFSSYWMSWVRQAPGKGLEWVANIKQDGSEKYYVDSVKGRFTISRDNAKNSLYLRMNSLRAEDTAVYYCARAWGYSSYYFDYWGQGTLVTVSPTRDKQLDADVSPKPTIFLPSIAETKLQKAGTYLCLLEKFFPDVIKIHWQEKKSNTILGSQEGNTMKTNDTYMKFSWLTVPEKSLDKEHRCIVRHENNKNGVDQEIIFPPIKTDVITMDPKDNCSKDANDTLLLQLTNTSAYYMYLLLLLKSVVYFAIITCCLLRRTAFCCNGEKS

SEQ ID NO: 20326 - protein, 905 aa, Artificial Sequence
  Synthetic Polypeptide
MALPVTALLLPLALLLHAARPLEGKPIPNPLLGLDSTGSGDKQLDADVSPKPTIFLPSIAETKLQKAGTYLCLLEKFFPDVIKIHWQEKKSNTILGSQEGNTMKTNDTYMKFSWLTVPEKSLDKEHRCIVRHENNKNGVDQEIIFPPIKTDVITMDPKDNCSKDANDTLLLQLTNTSAYYMYLLLLLKSVVYFAIITCCLLRRTAFCCNGEKSRAKRSGSGATNFSLLKQAGDVEENPGPTSMALPVTALLLPLALLLHAARPELQMTQSPSSLSASVGDRVAITCRASQSISSHLNWYQQKPGKAPKLLIYAASSLQSGVPSRFSGSGSGTDFTLTISSLQPEDFATYYCQQSYSTPYTFGQGTKLEIKGGGGSGGGGSGGGGSEVQLVESGGGLVQPGGSLRLSCAASGFTFSSYWMSWVRQAPGKGLEWVANIKQDGSEKYYVDSVKGRFTISRDNAKNSLYLRMNSLRAEDTAVYYCARAWGYSSYYFDYWGQGTLVTVSPTREQKLISEEDGSGSQPHTKPSVFVMKNGTNVACLVKEFYPKDIRINLVSSKKITEFDPAIVISPSGKYNAVKLGKYEDSNSVTCSVQHDNKTVHSTDFEVKTDSTDHVKPKETENTKQPSKSCHKPKAIVHTEKVNMMSLTVLGLRMLFAKTVAVNFLLTAKLFFLRAKRSGSGVKQTLNFDLLKLAGDVESNPGPSRGHMTEYKPTVRLATRDDVPRAVRTLAAAFADYPATRHTVDPDRHIERVTELQELFLTRVGLDIGKVWVADDGAAVAVWTTPESVEAGAVFAEIGPRMAELSGSRLAAQQQMEGLLAPHRPKEPAWFLATVGVSPDHQGKGLGSAVVLPGVEAAERAGVPAFLETSAPRNLPFYERLGFTVTADVEVPEGPRTWCMTRKPGA

SEQ ID NO: 20327 - protein, 1030 aa, Artificial Sequence
  Synthetic Polypeptide
MALPVTALLLPLALLLHAARPELQMTQSPSSLSASVGDRVAITCRASQSISSHLNWYQQKPGKAPKLLIYAASSLQSGVPSRFSGSGSGTDFTLTISSLQPEDFATYYCQQSYSTPYTFGQGTKLEIKGQPKANPTVTLFPPSSEELQANKATLVCLISDFYPGAVTVAWKADGSPVKAGVETTKPSKQSNNKYAASSYLSLTPEQWKSHRSYSCQVTHEGSTVEKTVAPTECSGSQSFGLLDPKLCYLLDGILFIYGVILTALFLRVKFSRSADAPAYQQGQNQLYNELNLGRREEYDVLDKRRGRDPEMGGKPQRRKNPQEGLYNELQKDKMAEAYSEIGMKGERRRGKGHDGLYQGLSTATKDTYDALHMQALPPRRAKRSGSGATNFSLLKQAGDVEENPGPTSMDWIWRILFLVGAATGAHSFEEVQLVESGGGLVQPGGSLRLSCAASGFTFSSYWMSWVRQAPGKGLEWVANIKQDGSEKYYVDSVKGRFTISRDNAKNSLYLRMNSLRAEDTAVYYCARAWGYSSYYFDYWGQGTLVTVSPASTKGPSVFPLAPSSKSTSGGTAALGCLVKDYFPEPVTVSWNSGALTSGVHTFPAVLQSSGLYSLSSVVTVPSSSLGTQTYICNVNHKPSNTKVDKRVEPKSCGTQSFGLLDPKLCYLLDGILFIYGVILTALFLRVKFSRSADAPAYQQGQNQLYNELNLGRREEYDVLDKRRGRDPEMGGKPQRRKNPQEGLYNELQKDKMAEAYSEIGMKGERRRGKGHDGLYQGLSTATKDTYDALHMQALPPRRAKRSGSGVKQTLNFDLLKLAGDVESNPGPSRGHMTEYKPTVRLATRDDVPRAVRTLAAAFADYPATRHTVDPDRHIERVTELQELFLTRVGLDIGKVWVADDGAAVAVWTTPESVEAGAVFAEIGPRMAELSGSRLAAQQQMEGLLAPHRPKEPAWFLATVGVSPDHQGKGLGSAVVLPGVEAAERAGVPAFLETSAPRNLPFYERLGFTVTADVEVPEGPRTWCMTRKPGA

SEQ ID NO: 20328 - protein, 816 aa, Artificial Sequence
  Synthetic Polypeptide
MALPVTALLLPLALLLHAARPELQMTQSPSSLSASVGDRVAITCRASQSISSHLNWYQQKPGKAPKLLIYAASSLQSGVPSRFSGSGSGTDFTLTISSLQPEDFATYYCQQSYSTPYTFGQGTKLEIKLEDLKNVFPPEVAVFEPSEAEISHTQKATLVCLATGFYPDHVELSWWVNGKEVHSGVSTDPQPLKEQPALNDSRYCLSSRLRVSATFWQNPRNHFRCQVQFYGLSENDEWTQDRAKPVTQIVSAEAWGRADCGSQSFGLLDPKLCYLLDGILFIYGVILTALFLRVKFSRSADAPAYQQGQNQLYNELNLGRREEYDVLDKRRGRDPEMGGKPQRRKNPQEGLYNELQKDKMAEAYSEIGMKGERRRGKGHDGLYQGLSTATKDTYDALHMQALPPRRAKRSGSGATNFSLLKQAGDVEENPGPTSMDWIWRILFLVGAATGAHSFEEVQLVESGGGLVQPGGSLRLSCAASGFTFSSYWMSWVRQAPGKGLEWVANIKQDGSEKYYVDSVKGRFTISRDNAKNSLYLRMNSLRAEDTAVYYCARAWGYSSYYFDYWGQGTLVTVSPTRIQNPDPAVYQLRDSKSSDKSVCLFTDFDSQTNVSQSKDSDVYITDKTVLDMRSMDFKSNSAVAWSNKSDFACANAFNNSIIPEDTFFPSPESSCGTQSFGLLDPKLCYLLDGILFIYGVILTALFLRVKFSRSADAPAYQQGQNQLYNELNLGRREEYDVLDKRRGRDPEMGGKPQRRKNPQEGLYNELQKDKMAEAYSEIGMKGERRRGKGHDGLYQGLSTATKDTYDALHMQALPPR

SEQ ID NO: 20329 - protein, 816 aa, Artificial Sequence
  Synthetic Polypeptide
MALPVTALLLPLALLLHAARPELQMTQSPSSLSASVGDRVAITCRASQSISSHLNWYQQKPGKAPKLLIYAASSLQSGVPSRFSGSGSGTDFTLTISSLQPEDFATYYCQQSYSTPYTFGQGTKLEIKLEDLKNVFPPEVAVFEPSKAEIAHTQKATLVCLATGFYPDHVELSWWVNGKEVHSGVCTDPQPLKEQPALNDSRYCLSSRLRVSATFWQNPRNHFRCQVQFYGLSENDEWTQDRAKPVTQIVSAEAWGRADCGSQSFGLLDPKLCYLLDGILFIYGVILTALFLRVKFSRSADAPAYQQGQNQLYNELNLGRREEYDVLDKRRGRDPEMGGKPQRRKNPQEGLYNELQKDKMAEAYSEIGMKGERRRGKGHDGLYQGLSTATKDTYDALHMQALPPRRAKRSGSGATNFSLLKQAGDVEENPGPTSMDWIWRILFLVGAATGAHSFEEVQLVESGGGLVQPGGSLRLSCAASGFTFSSYWMSWVRQAPGKGLEWVANIKQDGSEKYYVDSVKGRFTISRDNAKNSLYLRMNSLRAEDTAVYYCARAWGYSSYYFDYWGQGTLVTVSPTRIQNPDPAVYQLRDSKSSDKSVCLFTDFDSQTNVSQSKDSDVYITDKCVLDMRSMDFKSNSAVAWSNKSDFACANAFNNSIIPEDTFFPSSDVPCGTQSFGLLDPKLCYLLDGILFIYGVILTALFLRVKFSRSADAPAYQQGQNQLYNELNLGRREEYDVLDKRRGRDPEMGGKPQRRKNPQEGLYNELQKDKMAEAYSEIGMKGERRRGKGHDGLYQGLSTATKDTYDALHMQALPPR

SEQ ID NO: 20330 - protein, 887 aa, Artificial Sequence
  Synthetic Polypeptide
MALPVTALLLPLALLLHAARPELQMTQSPSSLSASVGDRVAITCRASQSISSHLNWYQQKPGKAPKLLIYAASSLQSGVPSRFSGSGSGTDFTLTISSLQPEDFATYYCQQSYSTPYTFGQGTKLEIKLEGKPIPNPLLGLDSTGSGEDLKNVFPPEVAVFEPSEAEISHTQKATLVCLATGFYPDHVELSWWVNGKEVHSGVSTDPQPLKEQPALNDSRYCLSSRLRVSATFWQNPRNHFRCQVQFYGLSENDEWTQDRAKPVTQIVSAEAWGRADCGSQSFGLLDPKLCYLLDGILFIYGVILTALFLRVKFSRSADAPAYQQGQNQLYNELNLGRREEYDVLDKRRGRDPEMGGKPQRRKNPQEGLYNELQKDKMAEAYSEIGMKGERRRGKGHDGLYQGLSTATKDTYDALHMQALPPRRAKRSGSGATNFSLLKQAGDVEENPGPTSMDWIWRILFLVGAATGAHSFEEVQLVESGGGLVQPGGSLRLSCAASGFTFSSYWMSWVRQAPGKGLEWVANIKQDGSEKYYVDSVKGRFTISRDNAKNSLYLRMNSLRAEDTAVYYCARAWGYSSYYFDYWGQGTLVTVSPTREQKLISEEDGSGIQNPDPAVYQLRDSKSSDKSVCLFTDFDSQTNVSQSKDSDVYITDKTVLDMRSMDFKSNSAVAWSNKSDFACANAFNNSIIPEDTFFPSPESSCGTQSFGLLDPKLCYLLDGILFIYGVILTALFLRSKRSRLLHSDYMNMTPRRPGPTRKHYQPYAPPRDFAAYRSRVKFSRSADAPAYQQGQNQLYNELNLGRREEYDVLDKRRGRDPEMGGKPQRRKNPQEGLYNELQKDKMAEAYSEIGMKGERRRGKGHDGLYQGLSTATKDTYDALHMQALPPR

SEQ ID NO: 20331 - protein, 928 aa, Artificial Sequence
  Synthetic Polypeptide
MALPVTALLLPLALLLHAARPELQMTQSPSSLSASVGDRVAITCRASQSISSHLNWYQQKPGKAPKLLIYAASSLQSGVPSRFSGSGSGTDFTLTISSLQPEDFATYYCQQSYSTPYTFGQGTKLEIKLEGKPIPNPLLGLDSTGSGEDLKNVFPPEVAVFEPSEAEISHTQKATLVCLATGFYPDHVELSWWVNGKEVHSGVSTDPQPLKEQPALNDSRYCLSSRLRVSATFWQNPRNHFRCQVQFYGLSENDEWTQDRAKPVTQIVSAEAWGRADCGSQSFGLLDPKLCYLLDGILFIYGVILTALFLRSKRSRLLHSDYMNMTPRRPGPTRKHYQPYAPPRDFAAYRSRVKFSRSADAPAYQQGQNQLYNELNLGRREEYDVLDKRRGRDPEMGGKPQRRKNPQEGLYNELQKDKMAEAYSEIGMKGERRRGKGHDGLYQGLSTATKDTYDALHMQALPPRRAKRSGSGATNFSLLKQAGDVEENPGPTSMDWIWRILFLVGAATGAHSFEEVQLVESGGGLVQPGGSLRLSCAASGFTFSSYWMSWVRQAPGKGLEWVANIKQDGSEKYYVDSVKGRFTISRDNAKNSLYLRMNSLRAEDTAVYYCARAWGYSSYYFDYWGQGTLVTVSPTREQKLISEEDGSGIQNPDPAVYQLRDSKSSDKSVCLFTDFDSQTNVSQSKDSDVYITDKTVLDMRSMDFKSNSAVAWSNKSDFACANAFNNSIIPEDTFFPSPESSCGTQSFGLLDPKLCYLLDGILFIYGVILTALFLRSKRSRLLHSDYMNMTPRRPGPTRKHYQPYAPPRDFAAYRSRVKFSRSADAPAYQQGQNQLYNELNLGRREEYDVLDKRRGRDPEMGGKPQRRKNPQEGLYNELQKDKMAEAYSEIGMKGERRRGKGHDGLYQGLSTATKDTYDALHMQALPPR

SEQ ID NO: 20332 - protein, 889 aa, Artificial Sequence
  Synthetic Polypeptide
MALPVTALLLPLALLLHAARPELQMTQSPSSLSASVGDRVAITCRASQSISSHLNWYQQKPGKAPKLLIYAASSLQSGVPSRFSGSGSGTDFTLTISSLQPEDFATYYCQQSYSTPYTFGQGTKLEIKLEGKPIPNPLLGLDSTGSGEDLKNVFPPEVAVFEPSEAEISHTQKATLVCLATGFYPDHVELSWWVNGKEVHSGVSTDPQPLKEQPALNDSRYCLSSRLRVSATFWQNPRNHFRCQVQFYGLSENDEWTQDRAKPVTQIVSAEAWGRADCGSQSFGLLDPKLCYLLDGILFIYGVILTALFLRVKFSRSADAPAYQQGQNQLYNELNLGRREEYDVLDKRRGRDPEMGGKPQRRKNPQEGLYNELQKDKMAEAYSEIGMKGERRRGKGHDGLYQGLSTATKDTYDALHMQALPPRRAKRSGSGATNFSLLKQAGDVEENPGPTSMDWIWRILFLVGAATGAHSFEEVQLVESGGGLVQPGGSLRLSCAASGFTFSSYWMSWVRQAPGKGLEWVANIKQDGSEKYYVDSVKGRFTISRDNAKNSLYLRMNSLRAEDTAVYYCARAWGYSSYYFDYWGQGTLVTVSPTREQKLISEEDLGSGIQNPDPAVYQLRDSKSSDKSVCLFTDFDSQTNVSQSKDSDVYITDKTVLDMRSMDFKSNSAVAWSNKSDFACANAFNNSIIPEDTFFPSPESSCGTQSFGLLDPKLCYLLDGILFIYGVILTALFLKRGRKKLLYIFKQPFMRPVQTTQEEDGCSCRFPEEEEGGCELRVKFSRSADAPAYQQGQNQLYNELNLGRREEYDVLDKRRGRDPEMGGKPQRRKNPQEGLYNELQKDKMAEAYSEIGMKGERRRGKGHDGLYQGLSTATKDTYDALHMQALPPR

SEQ ID NO: 20333 - protein, 931 aa, Artificial Sequence
  Synthetic Polypeptide
MALPVTALLLPLALLLHAARPELQMTQSPSSLSASVGDRVAITCRASQSISSHLNWYQQKPGKAPKLLIYAASSLQSGVPSRFSGSGSGTDFTLTISSLQPEDFATYYCQQSYSTPYTFGQGTKLEIKLEGKPIPNPLLGLDSTGSGEDLKNVFPPEVAVFEPSEAEISHTQKATLVCLATGFYPDHVELSWWVNGKEVHSGVSTDPQPLKEQPALNDSRYCLSSRLRVSATFWQNPRNHFRCQVQFYGLSENDEWTQDRAKPVTQIVSAEAWGRADCGSQSFGLLDPKLCYLLDGILFIYGVILTALFLKRGRKKLLYIFKQPFMRPVQTTQEEDGCSCRFPEEEEGGCELRVKFSRSADAPAYQQGQNQLYNELNLGRREEYDVLDKRRGRDPEMGGKPQRRKNPQEGLYNELQKDKMAEAYSEIGMKGERRRGKGHDGLYQGLSTATKDTYDALHMQALPPRRAKRSGSGATNFSLLKQAGDVEENPGPTSMDWIWRILFLVGAATGAHSFEEVQLVESGGGLVQPGGSLRLSCAASGFTFSSYWMSWVRQAPGKGLEWVANIKQDGSEKYYVDSVKGRFTISRDNAKNSLYLRMNSLRAEDTAVYYCARAWGYSSYYFDYWGQGTLVTVSPTREQKLISEEDLGSGIQNPDPAVYQLRDSKSSDKSVCLFTDFDSQTNVSQSKDSDVYITDKTVLDMRSMDFKSNSAVAWSNKSDFACANAFNNSIIPEDTFFPSPESSCGTQSFGLLDPKLCYLLDGILFIYGVILTALFLKRGRKKLLYIFKQPFMRPVQTTQEEDGCSCRFPEEEEGGCELRVKFSRSADAPAYQQGQNQLYNELNLGRREEYDVLDKRRGRDPEMGGKPQRRKNPQEGLYNELQKDKMAEAYSEIGMKGERRRGKGHDGLYQGLSTATKDTYDALHMQALPPR

SEQ ID NO: 20334 - protein, 821 aa, Artificial Sequence
  Synthetic Polypeptide
MALPVTALLLPLALLLHAARPELQMTQSPSSLSASVGDRVAITCRASQSISSHLNWYQQKPGKAPKLLIYAASSLQSGVPSRFSGSGSGTDFTLTISSLQPEDFATYYCQQSYSTPYTFGQGTKLEIKLEQSFGLLDPKLCYLLDGILFIYGVILTALFLRVKFSRSADAPAYQQGQNQLYNELNLGRREEYDVLDKRRGRDPEMGGKPQRRKNPQEGLYNELQKDKMAEAYSEIGMKGERRRGKGHDGLYQGLSTATKDTYDALHMQALPPRRAKRSGSGATNFSLLKQAGDVEENPGPTSMDWIWRILFLVGAATGAHSFEEVQLVESGGGLVQPGGSLRLSCAASGFTFSSYWMSWVRQAPGKGLEWVANIKQDGSEKYYVDSVKGRFTISRDNAKNSLYLRMNSLRAEDTAVYYCARAWGYSSYYFDYWGQGTLVTVSPTRQSFGLLDPKLCYLLDGILFIYGVILTALFLRVKFSRSADAPAYQQGQNQLYNELNLGRREEYDVLDKRRGRDPEMGGKPQRRKNPQEGLYNELQKDKMAEAYSEIGMKGERRRGKGHDGLYQGLSTATKDTYDALHMQALPPRRAKRSGSGVKQTLNFDLLKLAGDVESNPGPSRGHMTEYKPTVRLATRDDVPRAVRTLAAAFADYPATRHTVDPDRHIERVTELQELFLTRVGLDIGKVWVADDGAAVAVWTTPESVEAGAVFAEIGPRMAELSGSRLAAQQQMEGLLAPHRPKEPAWFLATVGVSPDHQGKGLGSAVVLPGVEAAERAGVPAFLETSAPRNLPFYERLGFTVTADVEVPEGPRTWCMTRKPGA

SEQ ID NO: 20335 - protein, 646 aa, Artificial Sequence
  Synthetic Polypeptide
MALPVTALLLPLALLLHAARPELQMTQSPSSLSASVGDRVAITCRASQSISSHLNWYQQKPGKAPKLLIYAASSLQSGVPSRFSGSGSGTDFTLTISSLQPEDFATYYCQQSYSTPYTFGQGTKLEIKLEGQPKANPTVTLFPPSSEELQANKATLVCLISDFYPGAVTVAWKADGSPVKAGVETTKPSKQSNNKYAASSYLSLTPEQWKSHRSYSCQVTHEGSTVEKTVAPTECSPIKTDVITMDPKDNCSKDANDTLLLQLTNTSAYYMYLLLLLKSVVYFAIITCCLLRRTAFCCNGEKSRAKRSGSGATNFSLLKQAGDVEENPGPTSMDWIWRILFLVGAATGAHSFEEVQLVESGGGLVQPGGSLRLSCAASGFTFSSYWMSWVRQAPGKGLEWVANIKQDGSEKYYVDSVKGRFTISRDNAKNSLYLRMNSLRAEDTAVYYCARAWGYSSYYFDYWGQGTLVTVSPTRASTKGPSVFPLAPSSKSTSGGTAALGCLVKDYFPEPVTVSWNSGALTSGVHTFPAVLQSSGLYSLSSVVTVPSSSLGTQTYICNVNHKPSNTKVDKRVEPKSCEVKTDSTDHVKPKETENTKQPSKSCHKPKAIVHTEKVNMMSLTVLGLRMLFAKTVAVNFLLTAKLFFL

SEQ ID NO: 20336 - protein, 624 aa, Artificial Sequence
  Synthetic Polypeptide
MALPVTALLLPLALLLHAARPELQMTQSPSSLSASVGDRVAITCRASQSISSHLNWYQQKPGKAPKLLIYAASSLQSGVPSRFSGSGSGTDFTLTISSLQPEDFATYYCQQSYSTPYTFGQGTKLEIKLEGQPKANPTVTLFPPSSEELQANKATLVCLISDFYPGAVTVAWKADGSPVKAGVETTKPSKQSNNKYAASSYLSLTPEQWKSHRSYSCQVTHEGSTVEKTVAPTECSGRADCGITSASYHQGVLSATILYEILLGKATLYAVLVSALVLMAMVKRKDSRGRAKRSGSGATNFSLLKQAGDVEENPGPTSMDWIWRILFLVGAATGAHSFEEVQLVESGGGLVQPGGSLRLSCAASGFTFSSYWMSWVRQAPGKGLEWVANIKQDGSEKYYVDSVKGRFTISRDNAKNSLYLRMNSLRAEDTAVYYCARAWGYSSYYFDYWGQGTLVTVSPTRASTKGPSVFPLAPSSKSTSGGTAALGCLVKDYFPEPVTVSWNSGALTSGVHTFPAVLQSSGLYSLSSVVTVPSSSLGTQTYICNVNHKPSNTKVDKRVEPKSCIPEDTFFPSSDVPCDVKLVEKSFETDTNLNFQNLSVIGFRILLLKVAGFNLLMTLRLWSS

SEQ ID NO: 20337 - protein, 624 aa, Artificial Sequence
  Synthetic Polypeptide
MALPVTALLLPLALLLHAARPELQMTQSPSSLSASVGDRVAITCRASQSISSHLNWYQQKPGKAPKLLIYAASSLQSGVPSRFSGSGSGTDFTLTISSLQPEDFATYYCQQSYSTPYTFGQGTKLEIKLEGQPKANPTVTLFPPSSEELQANKATLVCLISDFYPGAVTVAWKADGSPVKAGVETTKPSKQSNNKYAASSYLSLTPEQWKSHRSYSCQVTHEGSTVEKTVAPTECSGRADCGFTSESYQQGVLSATILYEILLGKATLYAVLVSALVLMAMVKRKDSRGRAKRSGSGATNFSLLKQAGDVEENPGPTSMDWIWRILFLVGAATGAHSFEEVQLVESGGGLVQPGGSLRLSCAASGFTFSSYWMSWVRQAPGKGLEWVANIKQDGSEKYYVDSVKGRFTISRDNAKNSLYLRMNSLRAEDTAVYYCARAWGYSSYYFDYWGQGTLVTVSPTRASTKGPSVFPLAPSSKSTSGGTAALGCLVKDYFPEPVTVSWNSGALTSGVHTFPAVLQSSGLYSLSSVVTVPSSSLGTQTYICNVNHKPSNTKVDKRVEPKSCIPEDTFFPSPESSCDVKLVEKSFETDTNLNFQNLSVIGFRILLLKVAGFNLLMTLRLWSS

SEQ ID NO: 20338 - protein, 450 aa, Artificial Sequence
  Synthetic Polypeptide
MALPVTALLLPLALLLHAARPELQMTQSPSSLSASVGDRVAITCRASQSISSHLNWYQQKPGKAPKLLIYAASSLQSGVPSRFSGSGSGTDFTLTISSLQPEDFATYYCQQSYSTPYTFGQGTKLEIKGGGGSGGGGSGGGGSEVQLVESGGGLVQPGGSLRLSCAASGFTFSSYWMSWVRQAPGKGLEWVANIKQDGSEKYYVDSVKGRFTISRDNAKNSLYLRMNSLRAEDTAVYYCARAWGYSSYYFDYWGQGTLVTVSPTRDGNEEMGGITQTPYKVSISGTTVILTCPQYPGSEILWQHNDKNIGGDEDDKNIGSDEDHLSLKEFSELEQSGYYVCYPRGSKPEDANFYLYLRARVCENCMEMDVMSVATIVIVDICITGGLLLLVYYWSKNRKAKAKPVTRGAGAGGRQRGQNKERPPPVPNPDYEPIRKGQRDLYSGLNQRRI

SEQ ID NO: 20339 - protein, 415 aa, Artificial Sequence
  Synthetic Polypeptide
MALPVTALLLPLALLLHAARPELQMTQSPSSLSASVGDRVAITCRASQSISSHLNWYQQKPGKAPKLLIYAASSLQSGVPSRFSGSGSGTDFTLTISSLQPEDFATYYCQQSYSTPYTFGQGTKLEIKGGGGSGGGGSGGGGSEVQLVESGGGLVQPGGSLRLSCAASGFTFSSYWMSWVRQAPGKGLEWVANIKQDGSEKYYVDSVKGRFTISRDNAKNSLYLRMNSLRAEDTAVYYCARAWGYSSYYFDYWGQGTLVTVSPTRFKIPIEELEDRVFVNCNTSITWVEGTVGTLLSDITRLDLGKRILDPRGIYRCNGTDIYKDKESTVQVHYRMCQSCVELDPATVAGIIVTDVIATLLLALGVFCFAGHETGRLSGAADTQALLRNDQVYQPLRDRDDAQYSHLGGNWARNK

SEQ ID NO: 20340 - protein, 425 aa, Artificial Sequence
  Synthetic Polypeptide
MALPVTALLLPLALLLHAARPELQMTQSPSSLSASVGDRVAITCRASQSISSHLNWYQQKPGKAPKLLIYAASSLQSGVPSRFSGSGSGTDFTLTISSLQPEDFATYYCQQSYSTPYTFGQGTKLEIKGGGGSGGGGSGGGGSEVQLVESGGGLVQPGGSLRLSCAASGFTFSSYWMSWVRQAPGKGLEWVANIKQDGSEKYYVDSVKGRFTISRDNAKNSLYLRMNSLRAEDTAVYYCARAWGYSSYYFDYWGQGTLVTVSPTRQSIKGNHLVKVYDYQEDGSVLLTCDAEAKNITWFKDGKMIGFLTEDKKKWNLGSNAKDPRGMYQCKGSQNKSKPLQVYYRMCQNCIELNAATISGFLFAEIVSIFVLAVGVYFIAGQDGVRQSRASDKQTLLPNDQLYQPLKDREDDQYSHLQGNQLRRN

SEQ ID NO: 20341 - protein, 408 aa, Artificial Sequence
  Synthetic Polypeptide
MALPVTALLLPLALLLHAARPELQMTQSPSSLSASVGDRVAITCRASQSISSHLNWYQQKPGKAPKLLIYAASSLQSGVPSRFSGSGSGTDFTLTISSLQPEDFATYYCQQSYSTPYTFGQGTKLEIKGGGGSGGGGSGGGGSEVQLVESGGGLVQPGGSLRLSCAASGFTFSSYWMSWVRQAPGKGLEWVANIKQDGSEKYYVDSVKGRFTISRDNAKNSLYLRMNSLRAEDTAVYYCARAWGYSSYYFDYWGQGTLVTVSPTRQSFGLLDPKLCYLLDGILFIYGVILTALFLRVKFSRSADAPAYQQGQNQLYNELNLGRREEYDVLDKRRGRDPEMGGKPQRRKNPQEGLYNELQKDKMAEAYSEIGMKGERRRGKGHDGLYQGLSTATKDTYDALHMQALPPR

SEQ ID NO: 20342 - protein, 450 aa, Artificial Sequence
  Synthetic Polypeptide
MALPVTALLLPLALLLHAARPEVQLVESGGGLVQPGGSLRLSCAASGFTFSSYWMSWVRQAPGKGLEWVANIKQDGSEKYYVDSVKGRFTISRDNAKNSLYLRMNSLRAEDTAVYYCARAWGYSSYYFDYWGQGTLVTVSPGGGGSGGGGSGGGGSELQMTQSPSSLSASVGDRVAITCRASQSISSHLNWYQQKPGKAPKLLIYAASSLQSGVPSRFSGSGSGTDFTLTISSLQPEDFATYYCQQSYSTPYTFGQGTKLEIKTRDGNEEMGGITQTPYKVSISGTTVILTCPQYPGSEILWQHNDKNIGGDEDDKNIGSDEDHLSLKEFSELEQSGYYVCYPRGSKPEDANFYLYLRARVCENCMEMDVMSVATIVIVDICITGGLLLLVYYWSKNRKAKAKPVTRGAGAGGRQRGQNKERPPPVPNPDYEPIRKGQRDLYSGLNQRRI

SEQ ID NO: 20343 - protein, 415 aa, Artificial Sequence
  Synthetic Polypeptide
MALPVTALLLPLALLLHAARPEVQLVESGGGLVQPGGSLRLSCAASGFTFSSYWMSWVRQAPGKGLEWVANIKQDGSEKYYVDSVKGRFTISRDNAKNSLYLRMNSLRAEDTAVYYCARAWGYSSYYFDYWGQGTLVTVSPGGGGSGGGGSGGGGSELQMTQSPSSLSASVGDRVAITCRASQSISSHLNWYQQKPGKAPKLLIYAASSLQSGVPSRFSGSGSGTDFTLTISSLQPEDFATYYCQQSYSTPYTFGQGTKLEIKTRFKIPIEELEDRVFVNCNTSITWVEGTVGTLLSDITRLDLGKRILDPRGIYRCNGTDIYKDKESTVQVHYRMCQSCVELDPATVAGIIVTDVIATLLLALGVFCFAGHETGRLSGAADTQALLRNDQVYQPLRDRDDAQYSHLGGNWARNK

SEQ ID NO: 20344 - protein, 425 aa, Artificial Sequence
  Synthetic Polypeptide
MALPVTALLLPLALLLHAARPEVQLVESGGGLVQPGGSLRLSCAASGFTFSSYWMSWVRQAPGKGLEWVANIKQDGSEKYYVDSVKGRFTISRDNAKNSLYLRMNSLRAEDTAVYYCARAWGYSSYYFDYWGQGTLVTVSPGGGGSGGGGSGGGGSELQMTQSPSSLSASVGDRVAITCRASQSISSHLNWYQQKPGKAPKLLIYAASSLQSGVPSRFSGSGSGTDFTLTISSLQPEDFATYYCQQSYSTPYTFGQGTKLEIKTRQSIKGNHLVKVYDYQEDGSVLLTCDAEAKNITWFKDGKMIGFLTEDKKKWNLGSNAKDPRGMYQCKGSQNKSKPLQVYYRMCQNCIELNAATISGFLFAEIVSIFVLAVGVYFIAGQDGVRQSRASDKQTLLPNDQLYQPLKDREDDQYSHLQGNQLRRN

SEQ ID NO: 20345 - protein, 408 aa, Artificial Sequence
  Synthetic Polypeptide
MALPVTALLLPLALLLHAARPEVQLVESGGGLVQPGGSLRLSCAASGFTFSSYWMSWVRQAPGKGLEWVANIKQDGSEKYYVDSVKGRFTISRDNAKNSLYLRMNSLRAEDTAVYYCARAWGYSSYYFDYWGQGTLVTVSPGGGGSGGGGSGGGGSELQMTQSPSSLSASVGDRVAITCRASQSISSHLNWYQQKPGKAPKLLIYAASSLQSGVPSRFSGSGSGTDFTLTISSLQPEDFATYYCQQSYSTPYTFGQGTKLEIKTRQSFGLLDPKLCYLLDGILFIYGVILTALFLRVKFSRSADAPAYQQGQNQLYNELNLGRREEYDVLDKRRGRDPEMGGKPQRRKNPQEGLYNELQKDKMAEAYSEIGMKGERRRGKGHDGLYQGLSTATKDTYDALHMQALPPR

SEQ ID NO: 20346 - protein, 641 aa, Artificial Sequence
  Synthetic Polypeptide
MALPVTALLLPLALLLHAARPELQMTQSPSSLSASVGDRVAITCRASQSISSHLNWYQQKPGKAPKLLIYAASSLQSGVPSRFSGSGSGTDFTLTISSLQPEDFATYYCQQSYSTPYTFGQGTKLEIKGGGGSGGGGSGGGGSEVQLVESGGGLVQPGGSLRLSCAASGFTFSSYWMSWVRQAPGKGLEWVANIKQDGSEKYYVDSVKGRFTISRDNAKNSLYLRMNSLRAEDTAVYYCARAWGYSSYYFDYWGQGTLVTVSPTRGSGIQNPDPAVYQLRDSKSSDKSVCLFTDFDSQTNVSQSKDSDVYITDKTVLDMRSMDFKSNSAVAWSNKSDFACANAFNNSIIPEDTFFPSPESSCDVKLVEKSFETDTNLNFQNLSVIGFRILLLKVAGFNLLMTLRLWSSRAKRSGSGVKQTLNFDLLKLAGDVESNPGPSRGHMTEYKPTVRLATRDDVPRAVRTLAAAFADYPATRHTVDPDRHIERVTELQELFLTRVGLDIGKVWVADDGAAVAVWTTPESVEAGAVFAEIGPRMAELSGSRLAAQQQMEGLLAPHRPKEPAWFLATVGVSPDHQGKGLGSAVVLPGVEAAERAGVPAFLETSAPRNLPFYERLGFTVTADVEVPEGPRTWCMTRKPGA

SEQ ID NO: 20347 - protein, 673 aa, Artificial Sequence
  Synthetic Polypeptide
MALPVTALLLPLALLLHAARPELQMTQSPSSLSASVGDRVAITCRASQSISSHLNWYQQKPGKAPKLLIYAASSLQSGVPSRFSGSGSGTDFTLTISSLQPEDFATYYCQQSYSTPYTFGQGTKLEIKGGGGSGGGGSGGGGSEVQLVESGGGLVQPGGSLRLSCAASGFTFSSYWMSWVRQAPGKGLEWVANIKQDGSEKYYVDSVKGRFTISRDNAKNSLYLRMNSLRAEDTAVYYCARAWGYSSYYFDYWGQGTLVTVSPLEDLKNVFPPEVAVFEPSEAEISHTQKATLVCLATGFYPDHVELSWWVNGKEVHSGVSTDPQPLKEQPALNDSRYCLSSRLRVSATFWQNPRNHFRCQVQFYGLSENDEWTQDRAKPVTQIVSAEAWGRADCGFTSESYQQGVLSATILYEILLGKATLYAVLVSALVLMAMVKRKDSRGRAKRSGSGATNFSLLKQAGDVEENPGPTRGHMTEYKPTVRLATRDDVPRAVRTLAAAFADYPATRHTVDPDRHIERVTELQELFLTRVGLDIGKVWVADDGAAVAVWTTPESVEAGAVFAEIGPRMAELSGSRLAAQQQMEGLLAPHRPKEPAWFLATVGVSPDHQGKGLGSAVVLPGVEAAERAGVPAFLETSAPRNLPFYERLGFTVTADVEVPEGPRTWCMTRKPGA

SEQ ID NO: 20348 - protein, 723 aa, Artificial Sequence
  Synthetic Polypeptide
MALPVTALLLPLALLLHAARPELQMTQSPSSLSASVGDRVAITCRASQSISSHLNWYQQKPGKAPKLLIYAASSLQSGVPSRFSGSGSGTDFTLTISSLQPEDFATYYCQQSYSTPYTFGQGTKLEIKGGGGSGGGGSGGGGSEVQLVESGGGLVQPGGSLRLSCAASGFTFSSYWMSWVRQAPGKGLEWVANIKQDGSEKYYVDSVKGRFTISRDNAKNSLYLRMNSLRAEDTAVYYCARAWGYSSYYFDYWGQGTLVTVSPTREQKLISEEDLGSGTPFPSLAPPIMLLVDGKQQMVVVCLVLDVAPPGLDSPIWFSAGNGSALDAFTYGPSPATDGTWTNLAHLSLPSEELASWEPLVCHTGPGAEGHSRSTQPMHLSGEASTARTCPQEPLRGTPGGALWLGVLRLLLFKLLLFDLLLTCSCLCDPAGPLPSPATTTRLRALGSHRLHPATETGGREATSSPRPQPRDRRWGDTPPGRKPGSPVRAKRSGSGVKQTLNFDLLKLAGDVESNPGPSRSRGHMTEYKPTVRLATRDDVPRAVRTLAAAFADYPATRHTVDPDRHIERVTELQELFLTRVGLDIGKVWVADDGAAVAVWTTPESVEAGAVFAEIGPRMAELSGSRLAAQQQMEGLLAPHRPKEPAWFLATVGVSPDHQGKGLGSAVVLPGVEAAERAGVPAFLETSAPRNLPFYERLGFTVTADVEVPEGPRTWCMTRKPGA

SEQ ID NO: 20349 - protein, 538 aa, Artificial Sequence
  Synthetic Polypeptide
MALPVTALLLPLALLLHAARPELQMTQSPSSLSASVGDRVAITCRASQSISSHLNWYQQKPGKAPKLLIYAASSLQSGVPSRFSGSGSGTDFTLTISSLQPEDFATYYCQQSYSTPYTFGQGTKLEIKLEDLKNVFPPEVAVFEPSEAEISHTQKATLVCLATGFYPDHVELSWWVNGKEVHSGVSTDPQPLKEQPALNDSRYCLSSRLRVSATFWQNPRNHFRCQVQFYGLSENDEWTQDRAKPVTQIVSAEAWGRADCGFTSESYQQGVLSATILYEILLGKATLYAVLVSALVLMAMVKRKDSRGRAKRSGSGATNFSLLKQAGDVEENPGPTRGHMTEYKPTVRLATRDDVPRAVRTLAAAFADYPATRHTVDPDRHIERVTELQELFLTRVGLDIGKVWVADDGAAVAVWTTPESVEAGAVFAEIGPRMAELSGSRLAAQQQMEGLLAPHRPKEPAWFLATVGVSPDHQGKGLGSAVVLPGVEAAERAGVPAFLETSAPRNLPFYERLGFTVTADVEVPEGPRTWCMTRKPGA

SEQ ID NO: 20350 - protein, 308 aa, Artificial Sequence
  Synthetic Polypeptide
MALPVTALLLPLALLLHAARPELQMTQSPSSLSASVGDRVAITCRASQSISSHLNWYQQKPGKAPKLLIYAASSLQSGVPSRFSGSGSGTDFTLTISSLQPEDFATYYCQQSYSTPYTFGQGTKLEIKLEDLKNVFPPEVAVFEPSEAEISHTQKATLVCLATGFYPDHVELSWWVNGKEVHSGVSTDPQPLKEQPALNDSRYCLSSRLRVSATFWQNPRNHFRCQVQFYGLSENDEWTQDRAKPVTQIVSAEAWGRADCGFTSESYQQGVLSATILYEILLGKATLYAVLVSALVLMAMVKRKDSRG

SEQ ID NO: 20351 - protein, 449 aa, Artificial Sequence
  Synthetic Polypeptide
MDWIWRILFLVGAATGAHSFEEVQLVESGGGLVQPGGSLRLSCAASGFTFSSYWMSWVRQAPGKGLEWVANIKQDGSEKYYVDSVKGRFTISRDNAKNSLYLRMNSLRAEDTAVYYCARAWGYSSYYFDYWGQGTLVTVSPTRIQNPDPAVYQLRDSKSSDKSVCLFTDFDSQTNVSQSKDSDVYITDKTVLDMRSMDFKSNSAVAWSNKSDFACANAFNNSIIPEDTFFPSPESSCDVKLVEKSFETDTNLNFQNLSVIGFRILLLKVAGFNLLMTLRLWSSRAKRSGSGVKQTLNFDLLKLAGDVESNPGPSRGHMAKPLSQEESTLIERATATINSIPISEDYSVASAALSSDGRIFTGVNVYHFTGGPCAELVVLGTAAAAAAGNLTCIVAIGNENRGILSPCGRCRQVLLDLHPGIKAIVKDSDGQPTAVGIRELLPSGYVWEG

SEQ ID NO: 20352 - protein, 283 aa, Artificial Sequence
  Synthetic Polypeptide
MDWIWRILFLVGAATGAHSFEEVQLVESGGGLVQPGGSLRLSCAASGFTFSSYWMSWVRQAPGKGLEWVANIKQDGSEKYYVDSVKGRFTISRDNAKNSLYLRMNSLRAEDTAVYYCARAWGYSSYYFDYWGQGTLVTVSPTRIQNPDPAVYQLRDSKSSDKSVCLFTDFDSQTNVSQSKDSDVYITDKTVLDMRSMDFKSNSAVAWSNKSDFACANAFNNSIIPEDTFFPSPESSCDVKLVEKSFETDTNLNFQNLSVIGFRILLLKVAGFNLLMTLRLWSS

SEQ ID NO: 20353 - protein, 556 aa, Artificial Sequence
  Synthetic Polypeptide
MALPVTALLLPLALLLHAARPELQMTQSPSSLSASVGDRVAITCRASQSISSHLNWYQQKPGKAPKLLIYAASSLQSGVPSRFSGSGSGTDFTLTISSLQPEDFATYYCQQSYSTPYTFGQGTKLEIKLEGKPIPNPLLGLDSTGSGEDLKNVFPPEVAVFEPSEAEISHTQKATLVCLATGFYPDHVELSWWVNGKEVHSGVCTDPQPLKEQPALNDSRYCLSSRLRVSATFWQNPRNHFRCQVQFYGLSENDEWTQDRAKPVTQIVSAEAWGRADCGFTSESYQQGVLSATILYEILLGKATLYAVLVSALVLMAMVKRKDSRGRAKRSGSGATNFSLLKQAGDVEENPGPTRGHMTEYKPTVRLATRDDVPRAVRTLAAAFADYPATRHTVDPDRHIERVTELQELFLTRVGLDIGKVWVADDGAAVAVWTTPESVEAGAVFAEIGPRMAELSGSRLAAQQQMEGLLAPHRPKEPAWFLATVGVSPDHQGKGLGSAVVLPGVEAAERAGVPAFLETSAPRNLPFYERLGFTVTADVEVPEGPRTWCMTRKPGA

SEQ ID NO: 20354 - protein, 326 aa, Artificial Sequence
  Synthetic Polypeptide
MALPVTALLLPLALLLHAARPELQMTQSPSSLSASVGDRVAITCRASQSISSHLNWYQQKPGKAPKLLIYAASSLQSGVPSRFSGSGSGTDFTLTISSLQPEDFATYYCQQSYSTPYTFGQGTKLEIKLEGKPIPNPLLGLDSTGSGEDLKNVFPPEVAVFEPSEAEISHTQKATLVCLATGFYPDHVELSWWVNGKEVHSGVCTDPQPLKEQPALNDSRYCLSSRLRVSATFWQNPRNHFRCQVQFYGLSENDEWTQDRAKPVTQIVSAEAWGRADCGFTSESYQQGVLSATILYEILLGKATLYAVLVSALVLMAMVKRKDSRG

SEQ ID NO: 20355 - protein, 461 aa, Artificial Sequence
  Synthetic Polypeptide
MDWIWRILFLVGAATGAHSFEEVQLVESGGGLVQPGGSLRLSCAASGFTFSSYWMSWVRQAPGKGLEWVANIKQDGSEKYYVDSVKGRFTISRDNAKNSLYLRMNSLRAEDTAVYYCARAWGYSSYYFDYWGQGTLVTVSPTREQKLISEEDGSGIQNPDPAVYQLRDSKSSDKSVCLFTDFDSQTNVSQSKDSDVYITDKCVLDMRSMDFKSNSAVAWSNKSDFACANAFNNSIIPEDTFFPSPESSCDVKLVEKSFETDTNLNFQNLSVIGFRILLLKVAGFNLLMTLRLWSSRAKRSGSGVKQTLNFDLLKLAGDVESNPGPSRGHMAKPLSQEESTLIERATATINSIPISEDYSVASAALSSDGRIFTGVNVYHFTGGPCAELVVLGTAAAAAAGNLTCIVAIGNENRGILSPCGRCRQVLLDLHPGIKAIVKDSDGQPTAVGIRELLPSGYVWEG

SEQ ID NO: 20356 - protein, 295 aa, Artificial Sequence
  Synthetic Polypeptide
MDWIWRILFLVGAATGAHSFEEVQLVESGGGLVQPGGSLRLSCAASGFTFSSYWMSWVRQAPGKGLEWVANIKQDGSEKYYVDSVKGRFTISRDNAKNSLYLRMNSLRAEDTAVYYCARAWGYSSYYFDYWGQGTLVTVSPTREQKLISEEDGSGIQNPDPAVYQLRDSKSSDKSVCLFTDFDSQTNVSQSKDSDVYITDKCVLDMRSMDFKSNSAVAWSNKSDFACANAFNNSIIPEDTFFPSPESSCDVKLVEKSFETDTNLNFQNLSVIGFRILLLKVAGFNLLMTLRLWSS

SEQ ID NO: 20357 - protein, 641 aa, Artificial Sequence
  Synthetic Polypeptide
MALPVTALLLPLALLLHAARPELQMTQSPSSLSASVGDRVAITCRASQSISSHLNWYQQKPGKAPKLLIYAASSLQSGVPSRFSGSGSGTDFTLTISSLQPEDFATYYCQQSYSTPYTFGQGTKLEIKGGGGSGGGGSGGGGSEVQLVESGGGLVQPGGSLRLSCAASGFTFSSYWMSWVRQAPGKGLEWVANIKQDGSEKYYVDSVKGRFTISRDNAKNSLYLRMNSLRAEDTAVYYCARAWGYSSYYFDYWGQGTLVTVSPTRGSGIQNPDPAVYQLRDSKSSDKSVCLFTDFDSQTNVSQSKDSDVYITDKTVLDMRSMDFKSNSAVAWSNKSDFACANAFNNSIIPEDTFFPSSDVPCDVKLVEKSFETDTNLNFQNLSVIGFRILLLKVAGFNLLMTLRLWSSRAKRSGSGVKQTLNFDLLKLAGDVESNPGPSRGHMTEYKPTVRLATRDDVPRAVRTLAAAFADYPATRHTVDPDRHIERVTELQELFLTRVGLDIGKVWVADDGAAVAVWTTPESVEAGAVFAEIGPRMAELSGSRLAAQQQMEGLLAPHRPKEPAWFLATVGVSPDHQGKGLGSAVVLPGVEAAERAGVPAFLETSAPRNLPFYERLGFTVTADVEVPEGPRTWCMTRKPGA

SEQ ID NO: 20358 - protein, 673 aa, Artificial Sequence
  Synthetic Polypeptide
MALPVTALLLPLALLLHAARPELQMTQSPSSLSASVGDRVAITCRASQSISSHLNWYQQKPGKAPKLLIYAASSLQSGVPSRFSGSGSGTDFTLTISSLQPEDFATYYCQQSYSTPYTFGQGTKLEIKGGGGSGGGGSGGGGSEVQLVESGGGLVQPGGSLRLSCAASGFTFSSYWMSWVRQAPGKGLEWVANIKQDGSEKYYVDSVKGRFTISRDNAKNSLYLRMNSLRAEDTAVYYCARAWGYSSYYFDYWGQGTLVTVSPLEDLKNVFPPEVAVFEPSKAEIAHTQKATLVCLATGFYPDHVELSWWVNGKEVHSGVSTDPQPLKEQPALNDSRYCLSSRLRVSATFWQNPRNHFRCQVQFYGLSENDEWTQDRAKPVTQIVSAEAWGRADCGITSASYHQGVLSATILYEILLGKATLYAVLVSALVLMAMVKRKDSRGRAKRSGSGATNFSLLKQAGDVEENPGPTRGHMTEYKPTVRLATRDDVPRAVRTLAAAFADYPATRHTVDPDRHIERVTELQELFLTRVGLDIGKVWVADDGAAVAVWTTPESVEAGAVFAEIGPRMAELSGSRLAAQQQMEGLLAPHRPKEPAWFLATVGVSPDHQGKGLGSAVVLPGVEAAERAGVPAFLETSAPRNLPFYERLGFTVTADVEVPEGPRTWCMTRKPGA

SEQ ID NO: 20359 - protein, 696 aa, Artificial Sequence
  Synthetic Polypeptide
MALPVTALLLPLALLLHAARPELQMTQSPSSLSASVGDRVAITCRASQSISSHLNWYQQKPGKAPKLLIYAASSLQSGVPSRFSGSGSGTDFTLTISSLQPEDFATYYCQQSYSTPYTFGQGTKLEIKGGGGSGGGGSGGGGSEVQLVESGGGLVQPGGSLRLSCAASGFTFSSYWMSWVRQAPGKGLEWVANIKQDGSEKYYVDSVKGRFTISRDNAKNSLYLRMNSLRAEDTAVYYCARAWGYSSYYFDYWGQGTLVTVSPTRGSGGGGSGGGGSGDGNEEMGGITQTPYKVSISGTTVILTCPQYPGSEILWQHNDKNIGGDEDDKNIGSDEDHLSLKEFSELEQSGYYVCYPRGSKPEDANFYLYLRARVCENCMEMDVMSVATIVIVDICITGGLLLLVYYWSKNRKAKAKPVTRGAGAGGRQRGQNKERPPPVPNPDYEPIRKGQRDLYSGLNQRRIRAKRSGSGVKQTLNFDLLKLAGDVESNPGPSRGHMTEYKPTVRLATRDDVPRAVRTLAAAFADYPATRHTVDPDRHIERVTELQELFLTRVGLDIGKVWVADDGAAVAVWTTPESVEAGAVFAEIGPRMAELSGSRLAAQQQMEGLLAPHRPKEPAWFLATVGVSPDHQGKGLGSAVVLPGVEAAERAGVPAFLETSAPRNLPFYERLGFTVTADVEVPEGPRTWCMTRKPGA

SEQ ID NO: 20360 - protein, 661 aa, Artificial Sequence
  Synthetic Polypeptide
MALPVTALLLPLALLLHAARPELQMTQSPSSLSASVGDRVAITCRASQSISSHLNWYQQKPGKAPKLLIYAASSLQSGVPSRFSGSGSGTDFTLTISSLQPEDFATYYCQQSYSTPYTFGQGTKLEIKGGGGSGGGGSGGGGSEVQLVESGGGLVQPGGSLRLSCAASGFTFSSYWMSWVRQAPGKGLEWVANIKQDGSEKYYVDSVKGRFTISRDNAKNSLYLRMNSLRAEDTAVYYCARAWGYSSYYFDYWGQGTLVTVSPTRGSGGGGSGGGGSGFKIPIEELEDRVFVNCNTSITWVEGTVGTLLSDITRLDLGKRILDPRGIYRCNGTDIYKDKESTVQVHYRMCQSCVELDPATVAGIIVTDVIATLLLALGVFCFAGHETGRLSGAADTQALLRNDQVYQPLRDRDDAQYSHLGGNWARNKRAKRSGSGVKQTLNFDLLKLAGDVESNPGPSRGHMTEYKPTVRLATRDDVPRAVRTLAAAFADYPATRHTVDPDRHIERVTELQELFLTRVGLDIGKVWVADDGAAVAVWTTPESVEAGAVFAEIGPRMAELSGSRLAAQQQMEGLLAPHRPKEPAWFLATVGVSPDHQGKGLGSAVVLPGVEAAERAGVPAFLETSAPRNLPFYERLGFTVTADVEVPEGPRTWCMTRKPGA

SEQ ID NO: 20361 - protein, 671 aa, Artificial Sequence
  Synthetic Polypeptide
MALPVTALLLPLALLLHAARPELQMTQSPSSLSASVGDRVAITCRASQSISSHLNWYQQKPGKAPKLLIYAASSLQSGVPSRFSGSGSGTDFTLTISSLQPEDFATYYCQQSYSTPYTFGQGTKLEIKGGGGSGGGGSGGGGSEVQLVESGGGLVQPGGSLRLSCAASGFTFSSYWMSWVRQAPGKGLEWVANIKQDGSEKYYVDSVKGRFTISRDNAKNSLYLRMNSLRAEDTAVYYCARAWGYSSYYFDYWGQGTLVTVSPTRGSGGGGSGGGGSGQSIKGNHLVKVYDYQEDGSVLLTCDAEAKNITWFKDGKMIGFLTEDKKKWNLGSNAKDPRGMYQCKGSQNKSKPLQVYYRMCQNCIELNAATISGFLFAEIVSIFVLAVGVYFIAGQDGVRQSRASDKQTLLPNDQLYQPLKDREDDQYSHLQGNQLRRNRAKRSGSGVKQTLNFDLLKLAGDVESNPGPSRGHMTEYKPTVRLATRDDVPRAVRTLAAAFADYPATRHTVDPDRHIERVTELQELFLTRVGLDIGKVWVADDGAAVAVWTTPESVEAGAVFAEIGPRMAELSGSRLAAQQQMEGLLAPHRPKEPAWFLATVGVSPDHQGKGLGSAVVLPGVEAAERAGVPAFLETSAPRNLPFYERLGFTVTADVEVPEGPRTWCMTRKPGA

SEQ ID NO: 20362 - protein, 654 aa, Artificial Sequence
  Synthetic Polypeptide
MALPVTALLLPLALLLHAARPELQMTQSPSSLSASVGDRVAITCRASQSISSHLNWYQQKPGKAPKLLIYAASSLQSGVPSRFSGSGSGTDFTLTISSLQPEDFATYYCQQSYSTPYTFGQGTKLEIKGGGGSGGGGSGGGGSEVQLVESGGGLVQPGGSLRLSCAASGFTFSSYWMSWVRQAPGKGLEWVANIKQDGSEKYYVDSVKGRFTISRDNAKNSLYLRMNSLRAEDTAVYYCARAWGYSSYYFDYWGQGTLVTVSPTRGSGGGGSGGGGSGQSFGLLDPKLCYLLDGILFIYGVILTALFLRVKFSRSADAPAYQQGQNQLYNELNLGRREEYDVLDKRRGRDPEMGGKPQRRKNPQEGLYNELQKDKMAEAYSEIGMKGERRRGKGHDGLYQGLSTATKDTYDALHMQALPPRRAKRSGSGVKQTLNFDLLKLAGDVESNPGPSRGHMTEYKPTVRLATRDDVPRAVRTLAAAFADYPATRHTVDPDRHIERVTELQELFLTRVGLDIGKVWVADDGAAVAVWTTPESVEAGAVFAEIGPRMAELSGSRLAAQQQMEGLLAPHRPKEPAWFLATVGVSPDHQGKGLGSAVVLPGVEAAERAGVPAFLETSAPRNLPFYERLGFTVTADVEVPEGPRTWCMTRKPGA

SEQ ID NO: 20363 - protein, 755 aa, Artificial Sequence
  Synthetic Polypeptide
MALPVTALLLPLALLLHAARPEVQLVESGGGLVQPGGSLRLSCAASGFSFSDFWMSWVRQAPGKGLEWVATISQAGSEKDYVDSVKGRFTISRDNAKKSLYLQMNSLRAEDTAVYYCASGVYSFDYRGQGTLVTVSSGTGGGGSGGGGSGGGGSEFELQMTQSPSSLSASVGDRVAITCRASQSISSHLNWYQQKPGKAPKLLIYAASSLQSGVPSRFSGSGSGTDFTLTISSLQPEDFATYYCQQSYSTPYTFGQGTKLEIKLEDLKNVFPPEVAVFEPSEAEISHTQKATLVCLATGFYPDHVELSWWVNGKEVHSGVCTDPQPLKEQPALNDSRYCLSSRLRVSATFWQNPRNHFRCQVQFYGLSENDEWTQDRAKPVTQIVSAEAWGRADCGFTSESYQQGVLSATILYEILLGKATLYAVLVSALVLMAMVKRKDSRGRAKRSGSGATNFSLLKQAGDVEENPGPTSMDWIWRILFLVGAATGAHSFEEVQLVESGGGLVQPGGSLRLSCAASGFTFSSYWMSWVRQAPGKGLEWVANIKQDGSEKYYVDSVKGRFTISRDNAKNSLYLRMNSLRAEDTAVYYCARAWGYSSYYFDYWGQGTLVTVSPTRIQNPDPAVYQLRDSKSSDKSVCLFTDFDSQTNVSQSKDSDVYITDKCVLDMRSMDFKSNSAVAWSNKSDFACANAFNNSIIPEDTFFPSPESSCDVKLVEKSFETDTNLNFQNLSVIGFRILLLKVAGFNLLMTLRLWSS

SEQ ID NO: 20364 - protein, 759 aa, Artificial Sequence
  Synthetic Polypeptide
MALPVTALLLPLALLLHAARPEVQLVESGGGLVQPGGSLRLSCAASGFSFSDFWMSWVRQAPGKGLEWVATISQAGSEKDYVDSVKGRFTISRDNAKKSLYLQMNSLRAEDTAVYYCASGVYSFDYRGQGTLVTVSSGTGGGGSGGGGSGGGGSEFELQMTQSPSSLSASVGDRVAITCRASQSISSHLNWYQQKPGKAPKLLIYAASSLQSGVPSRFSGSGSGTDFTLTISSLQPEDFATYYCQQSYSTPYTFGQGTKLEIKLEIQNPDPAVYQLRDSKSSDKSVCLFTDFDSQTNVSQSKDSDVYITDKCVLDMRSMDFKSNSAVAWSNKSDFACANAFNNSIIPEDTFFPSPESSCDVKLVEKSFETDTNLNFQNLSVIGFRILLLKVAGFNLLMTLRLWSSRAKRSGSGVKQTLNFDLLKLAGDVESNPGPTSMDWIWRILFLVGAATGAHSFEEVQLVESGGGLVQPGGSLRLSCAASGFTFSSYWMSWVRQAPGKGLEWVANIKQDGSEKYYVDSVKGRFTISRDNAKNSLYLRMNSLRAEDTAVYYCARAWGYSSYYFDYWGQGTLVTVSPTREDLKNVFPPEVAVFEPSEAEISHTQKATLVCLATGFYPDHVELSWWVNGKEVHSGVCTDPQPLKEQPALNDSRYCLSSRLRVSATFWQNPRNHFRCQVQFYGLSENDEWTQDRAKPVTQIVSAEAWGRADCGFTSESYQQGVLSATILYEILLGKATLYAVLVSALVLMAMVKRKDSRG

SEQ ID NO: 20365 - protein, 951 aa, Artificial Sequence
  Synthetic Polypeptide
MALPVTALLLPLALLLHAARPEVQLVESGGGLVQPGGSLRLSCAASGFSFSDFWMSWVRQAPGKGLEWVATISQAGSEKDYVDSVKGRFTISRDNAKKSLYLQMNSLRAEDTAVYYCASGVYSFDYRGQGTLVTVSSGTGGGGSGGGGSGGGGSEFELQMTQSPSSLSASVGDRVAITCRASQSISSHLNWYQQKPGKAPKLLIYAASSLQSGVPSRFSGSGSGTDFTLTISSLQPEDFATYYCQQSYSTPYTFGQGTKLEIKLEDLKNVFPPEVAVFEPSEAEISHTQKATLVCLATGFYPDHVELSWWVNGKEVHSGVSTDPQPLKEQPALNDSRYCLSSRLRVSATFWQNPRNHFRCQVQFYGLSENDEWTQDRAKPVTQIVSAEAWGRADCGSQSFGLLDPKLCYLLDGILFIYGVILTALFLRVKFSRSADAPAYQQGQNQLYNELNLGRREEYDVLDKRRGRDPEMGGKPQRRKNPQEGLYNELQKDKMAEAYSEIGMKGERRRGKGHDGLYQGLSTATKDTYDALHMQALPPRRAKRSGSGATNFSLLKQAGDVEENPGPTSMDWIWRILFLVGAATGAHSFEEVQLVESGGGLVQPGGSLRLSCAASGFTFSSYWMSWVRQAPGKGLEWVANIKQDGSEKYYVDSVKGRFTISRDNAKNSLYLRMNSLRAEDTAVYYCARAWGYSSYYFDYWGQGTLVTVSPTRIQNPDPAVYQLRDSKSSDKSVCLFTDFDSQTNVSQSKDSDVYITDKTVLDMRSMDFKSNSAVAWSNKSDFACANAFNNSIIPEDTFFPSPESSCGTQSFGLLDPKLCYLLDGILFIYGVILTALFLRVKFSRSADAPAYQQGQNQLYNELNLGRREEYDVLDKRRGRDPEMGGKPQRRKNPQEGLYNELQKDKMAEAYSEIGMKGERRRGKGHDGLYQGLSTATKDTYDALHMQALPPR

SEQ ID NO: 20366 - protein, 781 aa, Artificial Sequence
  Synthetic Polypeptide
MALPVTALLLPLALLLHAARPEVQLVESGGGLVQPGGSLRLSCAASGFSFSDFWMSWVRQAPGKGLEWVATISQAGSEKDYVDSVKGRFTISRDNAKKSLYLQMNSLRAEDTAVYYCASGVYSFDYRGQGTLVTVSSGTGGGGSGGGGSGGGGSEFELQMTQSPSSLSASVGDRVAITCRASQSISSHLNWYQQKPGKAPKLLIYAASSLQSGVPSRFSGSGSGTDFTLTISSLQPEDFATYYCQQSYSTPYTFGQGTKLEIKLEGQPKANPTVTLFPPSSEELQANKATLVCLISDFYPGAVTVAWKADGSPVKAGVETTKPSKQSNNKYAASSYLSLTPEQWKSHRSYSCQVTHEGSTVEKTVAPTECSPIKTDVITMDPKDNCSKDANDTLLLQLTNTSAYYMYLLLLLKSVVYFAIITCCLLRRTAFCCNGEKSRAKRSGSGATNFSLLKQAGDVEENPGPTSMDWIWRILFLVGAATGAHSFEEVQLVESGGGLVQPGGSLRLSCAASGFTFSSYWMSWVRQAPGKGLEWVANIKQDGSEKYYVDSVKGRFTISRDNAKNSLYLRMNSLRAEDTAVYYCARAWGYSSYYFDYWGQGTLVTVSPTRASTKGPSVFPLAPSSKSTSGGTAALGCLVKDYFPEPVTVSWNSGALTSGVHTFPAVLQSSGLYSLSSVVTVPSSSLGTQTYICNVNHKPSNTKVDKRVEPKSCEVKTDSTDHVKPKETENTKQPSKSCHKPKAIVHTEKVNMMSLTVLGLRMLFAKTVAVNFLLTAKLFFL

SEQ ID NO: 20367 - protein, 762 aa, Artificial Sequence
  Synthetic Polypeptide
MALPVTALLLPLALLLHAARPEVQLVESGGGLVQPGGSLRLSCAASGFSFSDFWMSWVRQAPGKGLEWVATISQAGSEKDYVDSVKGRFTISRDNAKKSLYLQMNSLRAEDTAVYYCASGVYSFDYRGQGTLVTVSSGTGGGGSGGGGSGGGGSEFELQMTQSPSSLSASVGDRVAITCRASQSISSHLNWYQQKPGKAPKLLIYAASSLQSGVPSRFSGSGSGTDFTLTISSLQPEDFATYYCQQSYSTPYTFGQGTKLEIKLEGQPKANPTVTLFPPSSEELQANKATLVCLISDFYPGAVTVAWKADGSPVKAGVETTKPSKQSNNKYAASSYLSLTPEQWKSHRSYSCQVTHEGSTVEKTVAPTECSGRADCGFTSESYQQGVLSATILYEILLGKATLYAVLVSALVLMAMVKRKDSRGRAKRSGSGVKQTLNFDLLKLAGDVESNPGPTSMDWIWRILFLVGAATGAHSFEEVQLVESGGGLVQPGGSLRLSCAASGFTFSSYWMSWVRQAPGKGLEWVANIKQDGSEKYYVDSVKGRFTISRDNAKNSLYLRMNSLRAEDTAVYYCARAWGYSSYYFDYWGQGTLVTVSPTRASTKGPSVFPLAPSSKSTSGGTAALGCLVKDYFPEPVTVSWNSGALTSGVHTFPAVLQSSGLYSLSSVVTVPSSSLGTQTYICNVNHKPSNTKVDKRVEPKSCIPEDTFFPSPESSCDVKLVEKSFETDTNLNFQNLSVIGFRILLLKVAGFNLLMTLRLWSS

SEQ ID NO: 20368 - protein, 896 aa, Artificial Sequence
  Synthetic Polypeptide
MALPVTALLLPLALLLHAARPEVQLVESGGGLVQPGGSLRLSCAASGFSFSDFWMSWVRQAPGKGLEWVATISQAGSEKDYVDSVKGRFTISRDNAKKSLYLQMNSLRAEDTAVYYCASGVYSFDYRGQGTLVTVSSGTGGGGSGGGGSGGGGSEFELQMTQSPSSLSASVGDRVAITCRASQSISSHLNWYQQKPGKAPKLLIYAASSLQSGVPSRFSGSGSGTDFTLTISSLQPEDFATYYCQQSYSTPYTFGQGTKLEIKLEIQNPDPAVYQLRDSKSSDKSVCLFTDFDSQTNVSQSKDSDVYITDKCVLDMRSMDFKSNSAVAWSNKSDFACANAFNNSIIPEDTFFPSPESSCDVKLVEKSFETDTNLNFQNLSVIGFRILLLKVAGFNLLMTLRLWSSRAKRSGSGVKQTLNFDLLKLAGDVESNPGPTSMDWIWRILFLVGAATGAHSGPQLQLQESGPGLVKPSETLSLTCTVSGDSISSGDYYWGWIRQPPGKGLEWIGHIYYSGVTYYNPSLKSRVTISVDTSRNQFSLKLSSVTAADTAVYYCTREDSSNWRSRGQGTLVTVSSGSGGGGSGGGGSGGGGSFEEVQLVESGGGLVQPGGSLRLSCAASGFTFSSYWMSWVRQAPGKGLEWVANIKQDGSEKYYVDSVKGRFTISRDNAKNSLYLRMNSLRAEDTAVYYCARAWGYSSYYFDYWGQGTLVTVSPTREDLKNVFPPEVAVFEPSEAEISHTQKATLVCLATGFYPDHVELSWWVNGKEVHSGVCTDPQPLKEQPALNDSRYCLSSRLRVSATFWQNPRNHFRCQVQFYGLSENDEWTQDRAKPVTQIVSAEAWGRADCGFTSESYQQGVLSATILYEILLGKATLYAVLVSALVLMAMVKRKDSRG

SEQ ID NO: 20369 - protein, 1088 aa, Artificial Sequence
  Synthetic Polypeptide
MALPVTALLLPLALLLHAARPEVQLVESGGGLVQPGGSLRLSCAASGFSFSDFWMSWVRQAPGKGLEWVATISQAGSEKDYVDSVKGRFTISRDNAKKSLYLQMNSLRAEDTAVYYCASGVYSFDYRGQGTLVTVSSGTGGGGSGGGGSGGGGSEFELQMTQSPSSLSASVGDRVAITCRASQSISSHLNWYQQKPGKAPKLLIYAASSLQSGVPSRFSGSGSGTDFTLTISSLQPEDFATYYCQQSYSTPYTFGQGTKLEIKLEDLKNVFPPEVAVFEPSEAEISHTQKATLVCLATGFYPDHVELSWWVNGKEVHSGVSTDPQPLKEQPALNDSRYCLSSRLRVSATFWQNPRNHFRCQVQFYGLSENDEWTQDRAKPVTQIVSAEAWGRADCGSQSFGLLDPKLCYLLDGILFIYGVILTALFLRVKFSRSADAPAYQQGQNQLYNELNLGRREEYDVLDKRRGRDPEMGGKPQRRKNPQEGLYNELQKDKMAEAYSEIGMKGERRRGKGHDGLYQGLSTATKDTYDALHMQALPPRRAKRSGSGATNFSLLKQAGDVEENPGPTSMDWIWRILFLVGAATGAHSGPQLQLQESGPGLVKPSETLSLTCTVSGDSISSGDYYWGWIRQPPGKGLEWIGHIYYSGVTYYNPSLKSRVTISVDTSRNQFSLKLSSVTAADTAVYYCTREDSSNWRSRGQGTLVTVSSGSGGGGSGGGGSGGGGSFEEVQLVESGGGLVQPGGSLRLSCAASGFTFSSYWMSWVRQAPGKGLEWVANIKQDGSEKYYVDSVKGRFTISRDNAKNSLYLRMNSLRAEDTAVYYCARAWGYSSYYFDYWGQGTLVTVSPTRIQNPDPAVYQLRDSKSSDKSVCLFTDFDSQTNVSQSKDSDVYITDKTVLDMRSMDFKSNSAVAWSNKSDFACANAFNNSIIPEDTFFPSPESSCGTQSFGLLDPKLCYLLDGILFIYGVILTALFLRVKFSRSADAPAYQQGQNQLYNELNLGRREEYDVLDKRRGRDPEMGGKPQRRKNPQEGLYNELQKDKMAEAYSEIGMKGERRRGKGHDGLYQGLSTATKDTYDALHMQALPPR

SEQ ID NO: 20370 - protein, 918 aa, Artificial Sequence
  Synthetic Polypeptide
MALPVTALLLPLALLLHAARPEVQLVESGGGLVQPGGSLRLSCAASGFSFSDFWMSWVRQAPGKGLEWVATISQAGSEKDYVDSVKGRFTISRDNAKKSLYLQMNSLRAEDTAVYYCASGVYSFDYRGQGTLVTVSSGTGGGGSGGGGSGGGGSEFELQMTQSPSSLSASVGDRVAITCRASQSISSHLNWYQQKPGKAPKLLIYAASSLQSGVPSRFSGSGSGTDFTLTISSLQPEDFATYYCQQSYSTPYTFGQGTKLEIKLEGQPKANPTVTLFPPSSEELQANKATLVCLISDFYPGAVTVAWKADGSPVKAGVETTKPSKQSNNKYAASSYLSLTPEQWKSHRSYSCQVTHEGSTVEKTVAPTECSPIKTDVITMDPKDNCSKDANDTLLLQLTNTSAYYMYLLLLLKSVVYFAIITCCLLRRTAFCCNGEKSRAKRSGSGATNFSLLKQAGDVEENPGPTSMDWIWRILFLVGAATGAHSGPQLQLQESGPGLVKPSETLSLTCTVSGDSISSGDYYWGWIRQPPGKGLEWIGHIYYSGVTYYNPSLKSRVTISVDTSRNQFSLKLSSVTAADTAVYYCTREDSSNWRSRGQGTLVTVSSGSGGGGSGGGGSGGGGSFEEVQLVESGGGLVQPGGSLRLSCAASGFTFSSYWMSWVRQAPGKGLEWVANIKQDGSEKYYVDSVKGRFTISRDNAKNSLYLRMNSLRAEDTAVYYCARAWGYSSYYFDYWGQGTLVTVSPTRASTKGPSVFPLAPSSKSTSGGTAALGCLVKDYFPEPVTVSWNSGALTSGVHTFPAVLQSSGLYSLSSVVTVPSSSLGTQTYICNVNHKPSNTKVDKRVEPKSCEVKTDSTDHVKPKETENTKQPSKSCHKPKAIVHTEKVNMMSLTVLGLRMLFAKTVAVNFLLTAKLFFL

SEQ ID NO: 20371 - protein, 899 aa, Artificial Sequence
  Synthetic Polypeptide
MALPVTALLLPLALLLHAARPEVQLVESGGGLVQPGGSLRLSCAASGFSFSDFWMSWVRQAPGKGLEWVATISQAGSEKDYVDSVKGRFTISRDNAKKSLYLQMNSLRAEDTAVYYCASGVYSFDYRGQGTLVTVSSGTGGGGSGGGGSGGGGSEFELQMTQSPSSLSASVGDRVAITCRASQSISSHLNWYQQKPGKAPKLLIYAASSLQSGVPSRFSGSGSGTDFTLTISSLQPEDFATYYCQQSYSTPYTFGQGTKLEIKLEGQPKANPTVTLFPPSSEELQANKATLVCLISDFYPGAVTVAWKADGSPVKAGVETTKPSKQSNNKYAASSYLSLTPEQWKSHRSYSCQVTHEGSTVEKTVAPTECSGRADCGFTSESYQQGVLSATILYEILLGKATLYAVLVSALVLMAMVKRKDSRGRAKRSGSGVKQTLNFDLLKLAGDVESNPGPTSMDWIWRILFLVGAATGAHSGPQLQLQESGPGLVKPSETLSLTCTVSGDSISSGDYYWGWIRQPPGKGLEWIGHIYYSGVTYYNPSLKSRVTISVDTSRNQFSLKLSSVTAADTAVYYCTREDSSNWRSRGQGTLVTVSSGSGGGGSGGGGSGGGGSFEEVQLVESGGGLVQPGGSLRLSCAASGFTFSSYWMSWVRQAPGKGLEWVANIKQDGSEKYYVDSVKGRFTISRDNAKNSLYLRMNSLRAEDTAVYYCARAWGYSSYYFDYWGQGTLVTVSPTRASTKGPSVFPLAPSSKSTSGGTAALGCLVKDYFPEPVTVSWNSGALTSGVHTFPAVLQSSGLYSLSSVVTVPSSSLGTQTYICNVNHKPSNTKVDKRVEPKSCIPEDTFFPSPESSCDVKLVEKSFETDTNLNFQNLSVIGFRILLLKVAGFNLLMTLRLWSS

SEQ ID NO: 20372 - protein, 756 aa, Artificial Sequence
  Synthetic Polypeptide
MALPVTALLLPLALLLHAARPEVQVLESGGGLVQPGGSLRLSCAASGFTFSNFAMSWVRQAPGKGLEWVSTISGSAGTTDYADSVKGRFTISRDNSKKTLYLQMNSLRVEDTAVYYCADGRGPFFDYRGQGTLVTVSSGTGGGGSGGGGSGGGGSEFELQMTQSPSSLSASVGDRVAITCRASQSISSHLNWYQQKPGKAPKLLIYAASSLQSGVPSRFSGSGSGTDFTLTISSLQPEDFATYYCQQSYSTPYTFGQGTKLEIKLEDLKNVFPPEVAVFEPSEAEISHTQKATLVCLATGFYPDHVELSWWVNGKEVHSGVCTDPQPLKEQPALNDSRYCLSSRLRVSATFWQNPRNHFRCQVQFYGLSENDEWTQDRAKPVTQIVSAEAWGRADCGFTSESYQQGVLSATILYEILLGKATLYAVLVSALVLMAMVKRKDSRGRAKRSGSGATNFSLLKQAGDVEENPGPTSMDWIWRILFLVGAATGAHSFEEVQLVESGGGLVQPGGSLRLSCAASGFTFSSYWMSWVRQAPGKGLEWVANIKQDGSEKYYVDSVKGRFTISRDNAKNSLYLRMNSLRAEDTAVYYCARAWGYSSYYFDYWGQGTLVTVSPTRIQNPDPAVYQLRDSKSSDKSVCLFTDFDSQTNVSQSKDSDVYITDKCVLDMRSMDFKSNSAVAWSNKSDFACANAFNNSIIPEDTFFPSPESSCDVKLVEKSFETDTNLNFQNLSVIGFRILLLKVAGFNLLMTLRLWSS

SEQ ID NO: 20373 - protein, 757 aa, Artificial Sequence
  Synthetic Polypeptide
MALPVTALLLPLALLLHAARPELQMTQSPSSLSASVGDRVAITCRASQSISSHLNWYQQKPGKAPKLLIYAASSLQSGVPSRFSGSGSGTDFTLTISSLQPEDFATYYCQQSYSTPYTFGQGTKLEIKLEDLKNVFPPEVAVFEPSEAEISHTQKATLVCLATGFYPDHVELSWWVNGKEVHSGVCTDPQPLKEQPALNDSRYCLSSRLRVSATFWQNPRNHFRCQVQFYGLSENDEWTQDRAKPVTQIVSAEAWGRADCGFTSESYQQGVLSATILYEILLGKATLYAVLVSALVLMAMVKRKDSRGRAKRSGSGATNFSLLKQAGDVEENPGPTSMDWIWRILFLVGAATGAHSGPEVQLVESGGGLVQAGGSLRLSCAASGRTFSMGWFRQAPGKEREFVAAITYSGGSPYYADSVKGRFTISRDNAKNTVYLQMNSLKPEDTAVYYCAANPTYGSDWNAENWGQGTQVTVSSGSGGGGSGGGGSGGGGSFEEVQLVESGGGLVQPGGSLRLSCAASGFTFSSYWMSWVRQAPGKGLEWVANIKQDGSEKYYVDSVKGRFTISRDNAKNSLYLRMNSLRAEDTAVYYCARAWGYSSYYFDYWGQGTLVTVSPTRIQNPDPAVYQLRDSKSSDKSVCLFTDFDSQTNVSQSKDSDVYITDKCVLDMRSMDFKSNSAVAWSNKSDFACANAFNNSIIPEDTFFPSPESSCDVKLVEKSFETDTNLNFQNLSVIGFRILLLKVAGFNLLMTLRLWSS

SEQ ID NO: 20374 - protein, 884 aa, Artificial Sequence
  Synthetic Polypeptide
MALPVTALLLPLALLLHAARPELQMTQSPSSLSASVGDRVAITCRASQSISSHLNWYQQKPGKAPKLLIYAASSLQSGVPSRFSGSGSGTDFTLTISSLQPEDFATYYCQQSYSTPYTFGQGTKLEIKLEDLKNVFPPEVAVFEPSEAEISHTQKATLVCLATGFYPDHVELSWWVNGKEVHSGVCTDPQPLKEQPALNDSRYCLSSRLRVSATFWQNPRNHFRCQVQFYGLSENDEWTQDRAKPVTQIVSAEAWGRADCGFTSESYQQGVLSATILYEILLGKATLYAVLVSALVLMAMVKRKDSRGRAKRSGSGATNFSLLKQAGDVEENPGPTSMDWIWRILFLVGAATGAHSQLQLQESGPGLVKPSETLSLTCTVSGGSISSGDYYWGWIRQPPGKGLEWIGSISYSGSTYYNPSLKSRVTISVDTSRNQFSLKLSSVTAADTAVYYCTREDSSNWRSRGQGTLVTVSSSGGGGSGGGGSEVQLVESGGGLVQAGGSLRLSCAASGRTFSMGWFRQAPGKEREFVAAITYSGGSPYYADSVKGRFTISRDNAKNTVYLQMNSLKPEDTAVYYCAANPTYGSDWNAENWGQGTQVTVSSGSGGGGSGGGGSGGGGSFEEVQLVESGGGLVQPGGSLRLSCAASGFTFSSYWMSWVRQAPGKGLEWVANIKQDGSEKYYVDSVKGRFTISRDNAKNSLYLRMNSLRAEDTAVYYCARAWGYSSYYFDYWGQGTLVTVSPTRIQNPDPAVYQLRDSKSSDKSVCLFTDFDSQTNVSQSKDSDVYITDKCVLDMRSMDFKSNSAVAWSNKSDFACANAFNNSIIPEDTFFPSPESSCDVKLVEKSFETDTNLNFQNLSVIGFRILLLKVAGFNLLMTLRLWSS

SEQ ID NO: 20375 - protein, 893 aa, Artificial Sequence
  Synthetic Polypeptide
MALPVTALLLPLALLLHAARPEVQVLESGGGLVQPGGSLRLSCAASGFTFSNFAMSWVRQAPGKGLEWVSTISGSAGTTDYADSVKGRFTISRDNSKKTLYLQMNSLRVEDTAVYYCADGRGPFFDYRGQGTLVTVSSGTGGGGSGGGGSGGGGSEFELQMTQSPSSLSASVGDRVAITCRASQSISSHLNWYQQKPGKAPKLLIYAASSLQSGVPSRFSGSGSGTDFTLTISSLQPEDFATYYCQQSYSTPYTFGQGTKLEIKLEDLKNVFPPEVAVFEPSEAEISHTQKATLVCLATGFYPDHVELSWWVNGKEVHSGVCTDPQPLKEQPALNDSRYCLSSRLRVSATFWQNPRNHFRCQVQFYGLSENDEWTQDRAKPVTQIVSAEAWGRADCGFTSESYQQGVLSATILYEILLGKATLYAVLVSALVLMAMVKRKDSRGRAKRSGSGATNFSLLKQAGDVEENPGPTSMDWIWRILFLVGAATGAHSGPEVQLVESGGGLVQAGGSLRLSCAASGRTFSMGWFRQAPGKEREFVAAITYSGGSPYYASSVRGRFTISRDNAKNTVYLQMNSLKPEDTAVYYCAANPTYGSDWNAENWGQGTQVTVSSGSGGGGSGGGGSGGGGSFEEVQLVESGGGLVQPGGSLRLSCAASGFTFSSYWMSWVRQAPGKGLEWVANIKQDGSEKYYVDSVKGRFTISRDNAKNSLYLRMNSLRAEDTAVYYCARAWGYSSYYFDYWGQGTLVTVSPTRIQNPDPAVYQLRDSKSSDKSVCLFTDFDSQTNVSQSKDSDVYITDKCVLDMRSMDFKSNSAVAWSNKSDFACANAFNNSIIPEDTFFPSPESSCDVKLVEKSFETDTNLNFQNLSVIGFRILLLKVAGFNLLMTLRLWSS

SEQ ID NO: 20376 - protein, 720 aa, Artificial Sequence
  Synthetic Polypeptide
MALPVTALLLPLALLLHAARPDIVMTQSHKFMSTSVGDRVSIICKASQDVGTAVDWYQQKPGQSPKLLIYWASTRHTGVPDRFTGSGSGTDFTLAITNVQSEDLADYFCQQYNSYPLTFGAGTKLEIKRGGGGSGGGGSGGGGSEVQLQQSGPELVKPGTSVRISCKTSGYTFTEYTIHWVKQSHGKSLEWIGNINPNNGGTTYNQKFEDKATLTVDKSSSTAYMELRSLTSEDSAVYYCAAGWNFDYWGQGTTLTVSSTREQKLISEEDLAKPTTTPAPRPPTPAPTIASQPLSLRPEACRPAAGGAVHTRGLDFACDIYIWAPLAGTCGVLLLSLVITLYCKRGRKKLLYIFKQPFMRPVQTTQEEDGCSCRFPEEEEGGCELRVKFSRSADAPAYQQGQNQLYNELNLGRREEYDVLDKRRGRDPEMGGKPRRKNPQEGLYNELQKDKMAEAYSEIGMKGERRRGKGHDGLYQGLSTATKDTYDALHMQALPPRSSGSGEGRGSLLTCGDVEENPGPHMTEYKPTVRLATRDDVPRAVRTLAAAFADYPATRHTVDPDRHIERVTELQELFLTRVGLDIGKVWVADDGAAVAVWTTPESVEAGAVFAEIGPRMAELSGSRLAAQQQMEGLLAPHRPKEPAWFLATVGVSPDHQGKGLGSAVVLPGVEAAERAGVPAFLETSAPRNLPFYERLGFTVTADVEVPEGPRTWCMTRKPGA

SEQ ID NO: 20377 - protein, 714 aa, Artificial Sequence
  Synthetic Polypeptide
MALPVTALLLPLALLLHAARPDIVMTQSHKFMSTSVGDRVSIICKASQDVGTAVDWYQQKPGQSPKLLIYWASTRHTGVPDRFTGSGSGTDFTLAITNVQSEDLADYFCQQYNSYPLTFGAGTKLEIKRGGGGSGGGGSGGGGSEVQLQQSGPELVKPGTSVRISCKTSGYTFTEYTIHWVKQSHGKSLEWIGNINPNNGGTTYNQKFEDKATLTVDKSSSTAYMELRSLTSEDSAVYYCAAGWNFDYWGQGTTLTVSSTREQKLISEEDLKIEVMYPPPYLDNEKSNGTIIHVKGKHLCPSPLFPGPSKPFWVLVVVGGVLACYSLLVTVAFIIFWVRSKRSRLLHSDYMNMTPRRPGPTRKHYQPYAPPRDFAAYRSRVKFSRSADAPAYQQGQNQLYNELNLGRREEYDVLDKRRGRDPEMGGKPRRKNPQEGLYNELQKDKMAEAYSEIGMKGERRRGKGHDGLYQGLSTATKDTYDALHMQALPPRSSGSGEGRGSLLTCGDVEENPGPHMTEYKPTVRLATRDDVPRAVRTLAAAFADYPATRHTVDPDRHIERVTELQELFLTRVGLDIGKVWVADDGAAVAVWTTPESVEAGAVFAEIGPRMAELSGSRLAAQQQMEGLLAPHRPKEPAWFLATVGVSPDHQGKGLGSAVVLPGVEAAERAGVPAFLETSAPRNLPFYERLGFTVTADVEVPEGPRTWCMTRKPGA

SEQ ID NO: 20378 - protein, 491 aa, Artificial Sequence
  Synthetic Polypeptide
MALPVTALLLPLALLLHAARPDIVMTQSHKFMSTSVGDRVSIICKASQDVGTAVDWYQQKPGQSPKLLIYWASTRHTGVPDRFTGSGSGTDFTLAITNVQSEDLADYFCQQYNSYPLTFGAGTKLEIKRGGGGSGGGGSGGGGSEVQLQQSGPELVKPGTSVRISCKTSGYTFTEYTIHWVKQSHGKSLEWIGNINPNNGGTTYNQKFEDKATLTVDKSSSTAYMELRSLTSEDSAVYYCAAGWNFDYWGQGTTLTVSSTREQKLISEEDLKIEVMYPPPYLDNEKSNGTIIHVKGKHLCPSPLFPGPSKPFWVLVVVGGVLACYSLLVTVAFIIFWVRSKRSRLLHSDYMNMTPRRPGPTRKHYQPYAPPRDFAAYRSRVKFSRSADAPAYQQGQNQLYNELNLGRREEYDVLDKRRGRDPEMGGKPRRKNPQEGLYNELQKDKMAEAYSEIGMKGERRRGKGHDGLYQGLSTATKDTYDALHMQALPPR

SEQ ID NO: 20379 - protein, 497 aa, Artificial Sequence
  Synthetic Polypeptide
MALPVTALLLPLALLLHAARPDIVMTQSHKFMSTSVGDRVSIICKASQDVGTAVDWYQQKPGQSPKLLIYWASTRHTGVPDRFTGSGSGTDFTLAITNVQSEDLADYFCQQYNSYPLTFGAGTKLEIKRGGGGSGGGGSGGGGSEVQLQQSGPELVKPGTSVRISCKTSGYTFTEYTIHWVKQSHGKSLEWIGNINPNNGGTTYNQKFEDKATLTVDKSSSTAYMELRSLTSEDSAVYYCAAGWNFDYWGQGTTLTVSSTREQKLISEEDLAKPTTTPAPRPPTPAPTIASQPLSLRPEACRPAAGGAVHTRGLDFACDIYIWAPLAGTCGVLLLSLVITLYCKRGRKKLLYIFKQPFMRPVQTTQEEDGCSCRFPEEEEGGCELRVKFSRSADAPAYQQGQNQLYNELNLGRREEYDVLDKRRGRDPEMGGKPRRKNPQEGLYNELQKDKMAEAYSEIGMKGERRRGKGHDGLYQGLSTATKDTYDALHMQALPPR

SEQ ID NO: 20380 - protein, 497 aa, Artificial Sequence
  Synthetic Polypeptide
MALPVTALLLPLALLLHAARPEVQLQQSGPELVKPGTSVRISCKTSGYTFTEYTIHWVKQSHGKSLEWIGNINPNNGGTTYNQKFEDKATLTVDKSSSTAYMELRSLTSEDSAVYYCAAGWNFDYWGQGTTLTVSSGGGGSGGGGSGGGGSDIVMTQSHKFMSTSVGDRVSIICKASQDVGTAVDWYQQKPGQSPKLLIYWASTRHTGVPDRFTGSGSGTDFTLAITNVQSEDLADYFCQQYNSYPLTFGAGTKLEIKRTREQKLISEEDLAKPTTTPAPRPPTPAPTIASQPLSLRPEACRPAAGGAVHTRGLDFACDIYIWAPLAGTCGVLLLSLVITLYCKRGRKKLLYIFKQPFMRPVQTTQEEDGCSCRFPEEEEGGCELRVKFSRSADAPAYQQGQNQLYNELNLGRREEYDVLDKRRGRDPEMGGKPRRKNPQEGLYNELQKDKMAEAYSEIGMKGERRRGKGHDGLYQGLSTATKDTYDALHMQALPPR

SEQ ID NO: 20381 - protein, 910 aa, Artificial Sequence
  Synthetic Polypeptide
MALPVTALLLPLALLLHAARPDIVMTQSHKFMSTSVGDRVSIICKASQDVGTAVDWYQQKPGQSPKLLIYWASTRHTGVPDRFTGSGSGTDFTLAITNVQSEDLADYFCQQYNSYPLTFGAGTKLEIKRGGGGSGGGGSGGGGSEVQLQQSGPELVKPGTSVRISCKTSGYTFTEYTIHWVKQSHGKSLEWIGNINPNNGGTTYNQKFEDKATLTVDKSSSTAYMELRSLTSEDSAVYYCAAGWNFDYWGQGTTLTVSSTREQKLISEEDLAKPTTTPAPRPPTPAPTIASQPLSLRPEACRPAAGGAVHTRGLDFACDIYIWAPLAGTCGVLLLSLVITLYCGRARVKFSRSADAPAYQQGQNQLYNELNLGRREEYDVLDKRRGRDPEMGGKPRRKNPQEGLYNELQKDKMAEAYSEIGMKGERRRGKGHDGLYQGLSTATKDTYDALHMQALPPRSRGSGATNFSLLKQAGDVEENPGPGIHMATYEVLCEVARKLGTDDREVVLFLLNVFIPQPTLAQLIGALRALKEEGRLTFPLLAECLFRAGRRDLLRDLLHLDPRFLERHLAGTMSYFSPYQLTVLHVDGELCARDIRSLIFLSKDTIGSRSTPQTFLHWVYCMENLDLLGPTDVDALMSMLRSLSRVDLQRQVQTLMGLHLSGPSHSQHYRHTPLETDFYDYKDDDDKTSGSGEGRGSLLTCGDVEENPGPHMTEYKPTVRLATRDDVPRAVRTLAAAFADYPATRHTVDPDRHIERVTELQELFLTRVGLDIGKVWVADDGAAVAVWTTPESVEAGAVFAEIGPRMAELSGSRLAAQQQMEGLLAPHRPKEPAWFLATVGVSPDHQGKGLGSAVVLPGVEAAERAGVPAFLETSAPRNLPFYERLGFTVTADVEVPEGPRTWCMTRKPGA

SEQ ID NO: 20382 - protein, 850 aa, Artificial Sequence
  Synthetic Polypeptide
MALPVTALLLPLALLLHAARPDIVMTQSHKFMSTSVGDRVSIICKASQDVGTAVDWYQQKPGQSPKLLIYWASTRHTGVPDRFTGSGSGTDFTLAITNVQSEDLADYFCQQYNSYPLTFGAGTKLEIKRLEIQNPDPAVYQLRDSKSSDKSVCLFTDFDSQTNVSQSKDSDVYITDKCVLDMRSMDFKSNSAVAWSNKSDFACANAFNNSIIPEDTFFPSSDVPCDVKLVEKSFETDTNLNFQNLSVIGFRILLLKVAGFNLLMTLRLWSSRAKRSGSGVKQTLNFDLLKLAGDVESNPGPTSMDWIWRILFLVGAATGAHSFEEVQLQQSGPELVKPGTSVRISCKTSGYTFTEYTIHWVKQSHGKSLEWIGNINPNNGGTTYNQKFEDKATLTVDKSSSTAYMELRSLTSEDSAVYYCAAGWNFDYWGQGTTLTVSSTREDLKNVFPPEVAVFEPSKAEIAHTQKATLVCLATGFYPDHVELSWWVNGKEVHSGVCTDPQPLKEQPALNDSRYCLSSRLRVSATFWQNPRNHFRCQVQFYGLSENDEWTQDRAKPVTQIVSAEAWGRADCGITSASYHQGVLSATILYEILLGKATLYAVLVSALVLMAMVKRKDSRGRAKRSGSGATNFSLLKQAGDVEENPGPSRGHMTEYKPTVRLATRDDVPRAVRTLAAAFADYPATRHTVDPDRHIERVTELQELFLTRVGLDIGKVWVADDGAAVAVWTTPESVEAGAVFAEIGPRMAELSGSRLAAQQQMEGLLAPHRPKEPAWFLATVGVSPDHQGKGLGSAVVLPGVEAAERAGVPAFLETSAPRNLPFYERLGFTVTADVEVPEGPRTWCMTRKPGA

SEQ ID NO: 20383 - protein, 849 aa, Artificial Sequence
  Synthetic Polypeptide
MALPVTALLLPLALLLHAARPDIVMTQSHKFMSTSVGDRVSIICKASQDVGTAVDWYQQKPGQSPKLLIYWASTRHTGVPDRFTGSGSGTDFTLAITNVQSEDLADYFCQQYNSYPLTFGAGTKLEIKRLEDLKNVFPPEVAVFEPSKAEIAHTQKATLVCLATGFYPDHVELSWWVNGKEVHSGVCTDPQPLKEQPALNDSRYCLSSRLRVSATFWQNPRNHFRCQVQFYGLSENDEWTQDRAKPVTQIVSAEAWGRADCGITSASYHQGVLSATILYEILLGKATLYAVLVSALVLMAMVKRKDSRGRAKRSGSGATNFSLLKQAGDVEENPGPTSMDWIWRILFLVGAATGAHSFEEVQLQQSGPELVKPGTSVRISCKTSGYTFTEYTIHWVKQSHGKSLEWIGNINPNNGGTTYNQKFEDKATLTVDKSSSTAYMELRSLTSEDSAVYYCAAGWNFDYWGQGTTLTVSSTRIQNPDPAVYQLRDSKSSDKSVCLFTDFDSQTNVSQSKDSDVYITDKCVLDMRSMDFKSNSAVAWSNKSDFACANAFNNSIIPEDTFFPSSDVPCDVKLVEKSFETDTNLNFQNLSVIGFRILLLKVAGFNLLMTLRLWSSRAKRSGSGVKQTLNFDLLKLAGDVESNPGPSRGHMTEYKPTVRLATRDDVPRAVRTLAAAFADYPATRHTVDPDRHIERVTELQELFLTRVGLDIGKVWVADDGAAVAVWTTPESVEAGAVFAEIGPRMAELSGSRLAAQQQMEGLLAPHRPKEPAWFLATVGVSPDHQGKGLGSAVVLPGVEAAERAGVPAFLETSAPRNLPFYERLGFTVTADVEVPEGPRTWCMTRKPGA

SEQ ID NO: 20384 - protein, 616 aa, Artificial Sequence
  Synthetic Polypeptide
MALPVTALLLPLALLLHAARPDIVMTQSHKFMSTSVGDRVSIICKASQDVGTAVDWYQQKPGQSPKLLIYWASTRHTGVPDRFTGSGSGTDFTLAITNVQSEDLADYFCQQYNSYPLTFGAGTKLEIKRLEDLKNVFPPEVAVFEPSEAEISHTQKATLVCLATGFYPDHVELSWWVNGKEVHSGVCTDPQPLKEQPALNDSRYCLSSRLRVSATFWQNPRNHFRCQVQFYGLSENDEWTQDRAKPVTQIVSAEAWGRADCGFTSESYQQGVLSATILYEILLGKATLYAVLVSALVLMAMVKRKDSRGRAKRSGSGATNFSLLKQAGDVEENPGPTSMDWIWRILFLVGAATGAHSFEEVQLQQSGPELVKPGTSVRISCKTSGYTFTEYTIHWVKQSHGKSLEWIGNINPNNGGTTYNQKFEDKATLTVDKSSSTAYMELRSLTSEDSAVYYCAAGWNFDYWGQGTTLTVSSTRIQNPDPAVYQLRDSKSSDKSVCLFTDFDSQTNVSQSKDSDVYITDKCVLDMRSMDFKSNSAVAWSNKSDFACANAFNNSIIPEDTFFPSPESSCDVKLVEKSFETDTNLNFQNLSVIGFRILLLKVAGFNLLMTLRLWSS

SEQ ID NO: 20385 - protein, 841 aa, Artificial Sequence
  Synthetic Polypeptide
MALPVTALLLPLALLLHAARPDIVMTQSHKFMSTSVGDRVSIICKASQDVGTAVDWYQQKPGQSPKLLIYWASTRHTGVPDRFTGSGSGTDFTLAITNVQSEDLADYFCQQYNSYPLTFGAGTKLEIKRLEDLKNVFPPEVAVFEPSEAEISHTQKATLVCLATGFYPDHVELSWWVNGKEVHSGVCTDPQPLKEQPALNDSRYCLSSRLRVSATFWQNPRNHFRCQVQFYGLSENDEWTQDRAKPVTQIVSAEAWGRADCGFTSESYQQGVLSATILYEILLGKATLYAVLVSALVLMAMVKRKDSRGRAKRSGSGATNFSLLKQAGDVEENPGPTSMDWIWRILFLVGAATGAHSFEEVQLQQSGPELVKPGTSVRISCKTSGYTFTEYTIHWVKQSHGKSLEWIGNINPNNGGTTYNQKFEDKATLTVDKSSSTAYMELRSLTSEDSAVYYCAAGWNFDYWGQGTTLTVSSTRIQNPDPAVYQLRDSKSSDKSVCLFTDFDSQTNVSQSKDSDVYITDKCVLDMRSMDFKSNSAVAWSNKSDFACANAFNNSIIPEDTFFPSPESSCDVKLVEKSFETDTNLNFQNLSVIGFRILLLKVAGFNLLMTLRLWSSRAKRSGSGVKQTLNFDLLKLAGDVESNPGPSRGGIHTMATYEVLCEVARKLGTDDREVVLFLLNVFIPQPTLAQLIGALRALKEEGRLTFPLLAECLFRAGRRDLLRDLLHLDPRFLERHLAGTMSYFSPYQLTVLHVDGELCARDIRSLIFLSKDTIGSRSTPQTFLHWVYCMENLDLLGPTDVDALMSMLRSLSRVDLQRQVQTLMGLHLSGPSHSQHYRHTP

SEQ ID NO: 20386 - protein, 620 aa, Artificial Sequence
  Synthetic Polypeptide
MALPVTALLLPLALLLHAARPDIVMTQSHKFMSTSVGDRVSIICKASQDVGTAVDWYQQKPGQSPKLLIYWASTRHTGVPDRFTGSGSGTDFTLAITNVQSEDLADYFCQQYNSYPLTFGAGTKLEIKRLEIQNPDPAVYQLRDSKSSDKSVCLFTDFDSQTNVSQSKDSDVYITDKCVLDMRSMDFKSNSAVAWSNKSDFACANAFNNSIIPEDTFFPSPESSCDVKLVEKSFETDTNLNFQNLSVIGFRILLLKVAGFNLLMTLRLWSSRAKRSGSGVKQTLNFDLLKLAGDVESNPGPTSMDWIWRILFLVGAATGAHSFEEVQLQQSGPELVKPGTSVRISCKTSGYTFTEYTIHWVKQSHGKSLEWIGNINPNNGGTTYNQKFEDKATLTVDKSSSTAYMELRSLTSEDSAVYYCAAGWNFDYWGQGTTLTVSSTREDLKNVFPPEVAVFEPSEAEISHTQKATLVCLATGFYPDHVELSWWVNGKEVHSGVCTDPQPLKEQPALNDSRYCLSSRLRVSATFWQNPRNHFRCQVQFYGLSENDEWTQDRAKPVTQIVSAEAWGRADCGFTSESYQQGVLSATILYEILLGKATLYAVLVSALVLMAMVKRKDSRG

SEQ ID NO: 20387 - protein, 842 aa, Artificial Sequence
  Synthetic Polypeptide
MALPVTALLLPLALLLHAARPDIVMTQSHKFMSTSVGDRVSIICKASQDVGTAVDWYQQKPGQSPKLLIYWASTRHTGVPDRFTGSGSGTDFTLAITNVQSEDLADYFCQQYNSYPLTFGAGTKLEIKRLEIQNPDPAVYQLRDSKSSDKSVCLFTDFDSQTNVSQSKDSDVYITDKCVLDMRSMDFKSNSAVAWSNKSDFACANAFNNSIIPEDTFFPSPESSCDVKLVEKSFETDTNLNFQNLSVIGFRILLLKVAGFNLLMTLRLWSSRAKRSGSGVKQTLNFDLLKLAGDVESNPGPTSMDWIWRILFLVGAATGAHSFEEVQLQQSGPELVKPGTSVRISCKTSGYTFTEYTIHWVKQSHGKSLEWIGNINPNNGGTTYNQKFEDKATLTVDKSSSTAYMELRSLTSEDSAVYYCAAGWNFDYWGQGTTLTVSSTREDLKNVFPPEVAVFEPSEAEISHTQKATLVCLATGFYPDHVELSWWVNGKEVHSGVCTDPQPLKEQPALNDSRYCLSSRLRVSATFWQNPRNHFRCQVQFYGLSENDEWTQDRAKPVTQIVSAEAWGRADCGFTSESYQQGVLSATILYEILLGKATLYAVLVSALVLMAMVKRKDSRGRAKRSGSGATNFSLLKQAGDVEENPGPSRGGIHTMATYEVLCEVARKLGTDDREVVLFLLNVFIPQPTLAQLIGALRALKEEGRLTFPLLAECLFRAGRRDLLRDLLHLDPRFLERHLAGTMSYFSPYQLTVLHVDGELCARDIRSLIFLSKDTIGSRSTPQTFLHWVYCMENLDLLGPTDVDALMSMLRSLSRVDLQRQVQTLMGLHLSGPSHSQHYRHTP

SEQ ID NO: 20388 - protein, 894 aa, Artificial Sequence
  Synthetic Polypeptide
MALPVTALLLPLALLLHAARPLEGKPIPNPLLGLDSTGSGEDLKNVFPPEVAVFEPSKAEIAHTQKATLVCLATGFYPDHVELSWWVNGKEVHSGVCTDPQPLKEQPALNDSRYCLSSRLRVSATFWQNPRNHFRCQVQFYGLSENDEWTQDRAKPVTQIVSAEAWGRADCGITSASYHQGVLSATILYEILLGKATLYAVLVSALVLMAMVKRKDSRGRAKRSGSGATNFSLLKQAGDVEENPGPTSMALPVTALLLPLALLLHAARPDIVMTQSHKFMSTSVGDRVSIICKASQDVGTAVDWYQQKPGQSPKLLIYWASTRHTGVPDRFTGSGSGTDFTLAITNVQSEDLADYFCQQYNSYPLTFGAGTKLEIKRGGGGSGGGGSGGGGSEVQLQQSGPELVKPGTSVRISCKTSGYTFTEYTIHWVKQSHGKSLEWIGNINPNNGGTTYNQKFEDKATLTVDKSSSTAYMELRSLTSEDSAVYYCAAGWNFDYWGQGTTLTVSSTREQKLISEEDGSGIQNPDPAVYQLRDSKSSDKSVCLFTDFDSQTNVSQSKDSDVYITDKCVLDMRSMDFKSNSAVAWSNKSDFACANAFNNSIIPEDTFFPSSDVPCDVKLVEKSFETDTNLNFQNLSVIGFRILLLKVAGFNLLMTLRLWSSRAKRSGSGVKQTLNFDLLKLAGDVESNPGPSRGHMTEYKPTVRLATRDDVPRAVRTLAAAFADYPATRHTVDPDRHIERVTELQELFLTRVGLDIGKVWVADDGAAVAVWTTPESVEAGAVFAEIGPRMAELSGSRLAAQQQMEGLLAPHRPKEPAWFLATVGVSPDHQGKGLGSAVVLPGVEAAERAGVPAFLETSAPRNLPFYERLGFTVTADVEVPEGPRTWCMTRKPGA

SEQ ID NO: 20389 - protein, 895 aa, Artificial Sequence
  Synthetic Polypeptide
MALPVTALLLPLALLLHAARPLEQKLISEEDLGSGDRPDPAVYQLRDSKSSDKSVCLFTDFDSQTNVSQSKDSDVYITDKCVLDMRSMDFKSNSAVAWSNKSDFACANAFNNSIIPEDTFFPSPESSCDVKLVEKSFETDTNLNFQNLSVIGFRILLLKVAGFNLLMTLRLWSSSSRAKRSGSGVKQTLNFDLLKLAGDVESNPGPTSMALPVTALLLPLALLLHAARPDIVMTQSHKFMSTSVGDRVSIICKASQDVGTAVDWYQQKPGQSPKLLIYWASTRHTGVPDRFTGSGSGTDFTLAITNVQSEDLADYFCQQYNSYPLTFGAGTKLEIKRGGGGSGGGGSGGGGSEVQLQQSGPELVKPGTSVRISCKTSGYTFTEYTIHWVKQSHGKSLEWIGNINPNNGGTTYNQKFEDKATLTVDKSSSTAYMELRSLTSEDSAVYYCAAGWNFDYWGQGTTLTVSSTRGKPIPNPLLGLDSTGSGEDLKNVFPPEVAVFEPSEAEISHTQKATLVCLATGFYPDHVELSWWVNGKEVHSGVCTDPQPLKEQPALNDSRYCLSSRLRVSATFWQNPRNHFRCQVQFYGLSENDEWTQDRAKPVTQIVSAEAWGRADCGFTSESYQQGVLSATILYEILLGKATLYAVLVSALVLMAMVKRKDSRGRAKRSGSGATNFSLLKQAGDVEENPGPSRGHMTEYKPTVRLATRDDVPRAVRTLAAAFADYPATRHTVDPDRHIERVTELQELFLTRVGLDIGKVWVADDGAAVAVWTTPESVEAGAVFAEIGPRMAELSGSRLAAQQQMEGLLAPHRPKEPAWFLATVGVSPDHQGKGLGSAVVLPGVEAAERAGVPAFLETSAPRNLPFYERLGFTVTADVEVPEGPRTWCMTRKPGA

SEQ ID NO: 20390 - protein, 849 aa, Artificial Sequence
  Synthetic Polypeptide
MALPVTALLLPLALLLHAARPDIVMTQSHKFMSTSVGDRVSIICKASQDVGTAVDWYQQKPGQSPKLLIYWASTRHTGVPDRFTGSGSGTDFTLAITNVQSEDLADYFCQQYNSYPLTFGAGTKLEIKRLEDLKNVFPPEVAVFEPSEAEISHTQKATLVCLATGFYPDHVELSWWVNGKEVHSGVSTDPQPLKEQPALNDSRYCLSSRLRVSATFWQNPRNHFRCQVQFYGLSENDEWTQDRAKPVTQIVSAEAWGRADCGFTSESYQQGVLSATILYEILLGKATLYAVLVSALVLMAMVKRKDSRGRAKRSGSGATNFSLLKQAGDVEENPGPTSMDWIWRILFLVGAATGAHSFEEVQLQQSGPELVKPGTSVRISCKTSGYTFTEYTIHWVKQSHGKSLEWIGNINPNNGGTTYNQKFEDKATLTVDKSSSTAYMELRSLTSEDSAVYYCAAGWNFDYWGQGTTLTVSSTRIQNPDPAVYQLRDSKSSDKSVCLFTDFDSQTNVSQSKDSDVYITDKTVLDMRSMDFKSNSAVAWSNKSDFACANAFNNSIIPEDTFFPSPESSCDVKLVEKSFETDTNLNFQNLSVIGFRILLLKVAGFNLLMTLRLWSSRAKRSGSGVKQTLNFDLLKLAGDVESNPGPSRGHMTEYKPTVRLATRDDVPRAVRTLAAAFADYPATRHTVDPDRHIERVTELQELFLTRVGLDIGKVWVADDGAAVAVWTTPESVEAGAVFAEIGPRMAELSGSRLAAQQQMEGLLAPHRPKEPAWFLATVGVSPDHQGKGLGSAVVLPGVEAAERAGVPAFLETSAPRNLPFYERLGFTVTADVEVPEGPRTWCMTRKPGA

SEQ ID NO: 20391 - protein, 931 aa, Artificial Sequence
  Synthetic Polypeptide
MALPVTALLLPLALLLHAARPDIVMTQSHKFMSTSVGDRVSIICKASQDVGTAVDWYQQKPGQSPKLLIYWASTRHTGVPDRFTGSGSGTDFTLAITNVQSEDLADYFCQQYNSYPLTFGAGTKLEIKRLEDLKNVFPPEVAVFEPSEAEISHTQKATLVCLATGFYPDHVELSWWVNGKEVHSGVSTDPQPLKEQPALNDSRYCLSSRLRVSATFWQNPRNHFRCQVQFYGLSENDEWTQDRAKPVTQIVSAEAWGRADCGFTSESYQQGVLSATILYEILLGKATLYAVLVSALVLMAMVKRKDSRGRAKRSGSGATNFSLLKQAGDVEENPGPTSMDWIWRILFLVGAATGAHSFEEVQLQQSGPELVKPGTSVRISCKTSGYTFTEYTIHWVKQSHGKSLEWIGNINPNNGGTTYNQKFEDKATLTVDKSSSTAYMELRSLTSEDSAVYYCAAGWNFDYWGQGTTLTVSSTREQKLISEEDGSGTPFPSLAPPIMLLVDGKQQMVVVCLVLDVAPPGLDSPIWFSAGNGSALDAFTYGPSPATDGTWTNLAHLSLPSEELASWEPLVCHTGPGAEGHSRSTQPMHLSGEASTARTCPQEPLRGTPGGALWLGVLRLLLFKLLLFDLLLTCSCLCDPAGPLPSPATTTRLRALGSHRLHPATETGGREATSSPRPQPRDRRWGDTPPGRKPGSPVRAKRSGSGVKQTLNFDLLKLAGDVESNPGPSRGHMTEYKPTVRLATRDDVPRAVRTLAAAFADYPATRHTVDPDRHIERVTELQELFLTRVGLDIGKVWVADDGAAVAVWTTPESVEAGAVFAEIGPRMAELSGSRLAAQQQMEGLLAPHRPKEPAWFLATVGVSPDHQGKGLGSAVVLPGVEAAERAGVPAFLETSAPRNLPFYERLGFTVTADVEVPEGPRTWCMTRKPGA

SEQ ID NO: 20392 - protein, 949 aa, Artificial Sequence
  Synthetic Polypeptide
MALPVTALLLPLALLLHAARPLEDLKNVFPPEVAVFEPSEAEISHTQKATLVCLATGFYPDHVELSWWVNGKEVHSGVSTDPQPLKEQPALNDSRYCLSSRLRVSATFWQNPRNHFRCQVQFYGLSENDEWTQDRAKPVTQIVSAEAWGRADCGFTSESYQQGVLSATILYEILLGKATLYAVLVSALVLMAMVKRKDSRGRAKRSGSGATNFSLLKQAGDVEENPGPTSMALPVTALLLPLALLLHAARPDIVMTQSHKFMSTSVGDRVSIICKASQDVGTAVDWYQQKPGQSPKLLIYWASTRHTGVPDRFTGSGSGTDFTLAITNVQSEDLADYFCQQYNSYPLTFGAGTKLEIKRGGGGSGGGGSGGGGSEVQLQQSGPELVKPGTSVRISCKTSGYTFTEYTIHWVKQSHGKSLEWIGNINPNNGGTTYNQKFEDKATLTVDKSSSTAYMELRSLTSEDSAVYYCAAGWNFDYWGQGTTLTVSSTREQKLISEEDLGSGTPFPSLAPPIMLLVDGKQQMVVVCLVLDVAPPGLDSPIWFSAGNGSALDAFTYGPSPATDGTWTNLAHLSLPSEELASWEPLVCHTGPGAEGHSRSTQPMHLSGEASTARTCPQEPLRGTPGGALWLGVLRLLLFKLLLFDLLLTCSCLCDPAGPLPSPATTTRLRALGSHRLHPATETGGREATSSPRPQPRDRRWGDTPPGRKPGSPVRAKRSGSGVKQTLNFDLLKLAGDVESNPGPSRSRGHMTEYKPTVRLATRDDVPRAVRTLAAAFADYPATRHTVDPDRHIERVTELQELFLTRVGLDIGKVWVADDGAAVAVWTTPESVEAGAVFAEIGPRMAELSGSRLAAQQQMEGLLAPHRPKEPAWFLATVGVSPDHQGKGLGSAVVLPGVEAAERAGVPAFLETSAPRNLPFYERLGFTVTADVEVPEGPRTWCMTRKPGA

SEQ ID NO: 20393 - protein, 886 aa, Artificial Sequence
  Synthetic Polypeptide
MALPVTALLLPLALLLHAARPDIVMTQSHKFMSTSVGDRVSIICKASQDVGTAVDWYQQKPGQSPKLLIYWASTRHTGVPDRFTGSGSGTDFTLAITNVQSEDLADYFCQQYNSYPLTFGAGTKLEIKRLEGKPIPNPLLGLDSTGSGDKQLDADVSPKPTIFLPSIAETKLQKAGTYLCLLEKFFPDVIKIHWQEKKSNTILGSQEGNTMKTNDTYMKFSWLTVPEKSLDKEHRCIVRHENNKNGVDQEIIFPPIKTDVITMDPKDNCSKDANDTLLLQLTNTSAYYMYLLLLLKSVVYFAIITCCLLRRTAFCCNGEKSRAKRSGSGATNFSLLKQAGDVEENPGPTSMDWIWRILFLVGAATGAHSFEEVQLQQSGPELVKPGTSVRISCKTSGYTFTEYTIHWVKQSHGKSLEWIGNINPNNGGTTYNQKFEDKATLTVDKSSSTAYMELRSLTSEDSAVYYCAAGWNFDYWGQGTTLTVSSTREQKLISEEDGSGSQPHTKPSVFVMKNGTNVACLVKEFYPKDIRINLVSSKKITEFDPAIVISPSGKYNAVKLGKYEDSNSVTCSVQHDNKTVHSTDFEVKTDSTDHVKPKETENTKQPSKSCHKPKAIVHTEKVNMMSLTVLGLRMLFAKTVAVNFLLTAKLFFLRAKRSGSGVKQTLNFDLLKLAGDVESNPGPSRGHMTEYKPTVRLATRDDVPRAVRTLAAAFADYPATRHTVDPDRHIERVTELQELFLTRVGLDIGKVWVADDGAAVAVWTTPESVEAGAVFAEIGPRMAELSGSRLAAQQQMEGLLAPHRPKEPAWFLATVGVSPDHQGKGLGSAVVLPGVEAAERAGVPAFLETSAPRNLPFYERLGFTVTADVEVPEGPRTWCMTRKPGA

SEQ ID NO: 20394 - protein, 624 aa, Artificial Sequence
  Synthetic Polypeptide
MALPVTALLLPLALLLHAARPDIVMTQSHKFMSTSVGDRVSIICKASQDVGTAVDWYQQKPGQSPKLLIYWASTRHTGVPDRFTGSGSGTDFTLAITNVQSEDLADYFCQQYNSYPLTFGAGTKLEIKRLESQPHTKPSVFVMKNGTNVACLVKEFYPKDIRINLVSSKKITEFDPAIVISPSGKYNAVKLGKYEDSNSVTCSVQHDNKTVHSTDFEVKTDSTDHVKPKETENTKQPSKSCHKPKAIVHTEKVNMMSLTVLGLRMLFAKTVAVNFLLTAKLFFLRAKRSGSGATNFSLLKQAGDVEENPGPTSMDWIWRILFLVGAATGAHSFEEVQLQQSGPELVKPGTSVRISCKTSGYTFTEYTIHWVKQSHGKSLEWIGNINPNNGGTTYNQKFEDKATLTVDKSSSTAYMELRSLTSEDSAVYYCAAGWNFDYWGQGTTLTVSSTRDKQLDADVSPKPTIFLPSIAETKLQKAGTYLCLLEKFFPDVIKIHWQEKKSNTILGSQEGNTMKTNDTYMKFSWLTVPEKSLDKEHRCIVRHENNKNGVDQEIIFPPIKTDVITMDPKDNCSKDANDTLLLQLTNTSAYYMYLLLLLKSVVYFAIITCCLLRRTAFCCNGEKS

SEQ ID NO: 20395 - protein, 901 aa, Artificial Sequence
  Synthetic Polypeptide
MALPVTALLLPLALLLHAARPLEGKPIPNPLLGLDSTGSGDKQLDADVSPKPTIFLPSIAETKLQKAGTYLCLLEKFFPDVIKIHWQEKKSNTILGSQEGNTMKTNDTYMKFSWLTVPEKSLDKEHRCIVRHENNKNGVDQEIIFPPIKTDVITMDPKDNCSKDANDTLLLQLTNTSAYYMYLLLLLKSVVYFAIITCCLLRRTAFCCNGEKSRAKRSGSGATNFSLLKQAGDVEENPGPTSMALPVTALLLPLALLLHAARPDIVMTQSHKFMSTSVGDRVSIICKASQDVGTAVDWYQQKPGQSPKLLIYWASTRHTGVPDRFTGSGSGTDFTLAITNVQSEDLADYFCQQYNSYPLTFGAGTKLEIKRGGGGSGGGGSGGGGSEVQLQQSGPELVKPGTSVRISCKTSGYTFTEYTIHWVKQSHGKSLEWIGNINPNNGGTTYNQKFEDKATLTVDKSSSTAYMELRSLTSEDSAVYYCAAGWNFDYWGQGTTLTVSSTREQKLISEEDGSGSQPHTKPSVFVMKNGTNVACLVKEFYPKDIRINLVSSKKITEFDPAIVISPSGKYNAVKLGKYEDSNSVTCSVQHDNKTVHSTDFEVKTDSTDHVKPKETENTKQPSKSCHKPKAIVHTEKVNMMSLTVLGLRMLFAKTVAVNFLLTAKLFFLRAKRSGSGVKQTLNFDLLKLAGDVESNPGPSRGHMTEYKPTVRLATRDDVPRAVRTLAAAFADYPATRHTVDPDRHIERVTELQELFLTRVGLDIGKVWVADDGAAVAVWTTPESVEAGAVFAEIGPRMAELSGSRLAAQQQMEGLLAPHRPKEPAWFLATVGVSPDHQGKGLGSAVVLPGVEAAERAGVPAFLETSAPRNLPFYERLGFTVTADVEVPEGPRTWCMTRKPGA

SEQ ID NO: 20396 - protein, 1026 aa, Artificial Sequence
  Synthetic Polypeptide
MALPVTALLLPLALLLHAARPDIVMTQSHKFMSTSVGDRVSIICKASQDVGTAVDWYQQKPGQSPKLLIYWASTRHTGVPDRFTGSGSGTDFTLAITNVQSEDLADYFCQQYNSYPLTFGAGTKLEIKRGQPKANPTVTLFPPSSEELQANKATLVCLISDFYPGAVTVAWKADGSPVKAGVETTKPSKQSNNKYAASSYLSLTPEQWKSHRSYSCQVTHEGSTVEKTVAPTECSGSQSFGLLDPKLCYLLDGILFIYGVILTALFLRVKFSRSADAPAYQQGQNQLYNELNLGRREEYDVLDKRRGRDPEMGGKPQRRKNPQEGLYNELQKDKMAEAYSEIGMKGERRRGKGHDGLYQGLSTATKDTYDALHMQALPPRRAKRSGSGATNFSLLKQAGDVEENPGPTSMDWIWRILFLVGAATGAHSFEEVQLQQSGPELVKPGTSVRISCKTSGYTFTEYTIHWVKQSHGKSLEWIGNINPNNGGTTYNQKFEDKATLTVDKSSSTAYMELRSLTSEDSAVYYCAAGWNFDYWGQGTTLTVSSASTKGPSVFPLAPSSKSTSGGTAALGCLVKDYFPEPVTVSWNSGALTSGVHTFPAVLQSSGLYSLSSVVTVPSSSLGTQTYICNVNHKPSNTKVDKRVEPKSCGTQSFGLLDPKLCYLLDGILFIYGVILTALFLRVKFSRSADAPAYQQGQNQLYNELNLGRREEYDVLDKRRGRDPEMGGKPQRRKNPQEGLYNELQKDKMAEAYSEIGMKGERRRGKGHDGLYQGLSTATKDTYDALHMQALPPRRAKRSGSGVKQTLNFDLLKLAGDVESNPGPSRGHMTEYKPTVRLATRDDVPRAVRTLAAAFADYPATRHTVDPDRHIERVTELQELFLTRVGLDIGKVWVADDGAAVAVWTTPESVEAGAVFAEIGPRMAELSGSRLAAQQQMEGLLAPHRPKEPAWFLATVGVSPDHQGKGLGSAVVLPGVEAAERAGVPAFLETSAPRNLPFYERLGFTVTADVEVPEGPRTWCMTRKPGA

SEQ ID NO: 20397 - protein, 812 aa, Artificial Sequence
  Synthetic Polypeptide
MALPVTALLLPLALLLHAARPDIVMTQSHKFMSTSVGDRVSIICKASQDVGTAVDWYQQKPGQSPKLLIYWASTRHTGVPDRFTGSGSGTDFTLAITNVQSEDLADYFCQQYNSYPLTFGAGTKLEIKRLEDLKNVFPPEVAVFEPSEAEISHTQKATLVCLATGFYPDHVELSWWVNGKEVHSGVSTDPQPLKEQPALNDSRYCLSSRLRVSATFWQNPRNHFRCQVQFYGLSENDEWTQDRAKPVTQIVSAEAWGRADCGSQSFGLLDPKLCYLLDGILFIYGVILTALFLRVKFSRSADAPAYQQGQNQLYNELNLGRREEYDVLDKRRGRDPEMGGKPQRRKNPQEGLYNELQKDKMAEAYSEIGMKGERRRGKGHDGLYQGLSTATKDTYDALHMQALPPRRAKRSGSGATNFSLLKQAGDVEENPGPTSMDWIWRILFLVGAATGAHSFEEVQLQQSGPELVKPGTSVRISCKTSGYTFTEYTIHWVKQSHGKSLEWIGNINPNNGGTTYNQKFEDKATLTVDKSSSTAYMELRSLTSEDSAVYYCAAGWNFDYWGQGTTLTVSSTRIQNPDPAVYQLRDSKSSDKSVCLFTDFDSQTNVSQSKDSDVYITDKTVLDMRSMDFKSNSAVAWSNKSDFACANAFNNSIIPEDTFFPSPESSCGTQSFGLLDPKLCYLLDGILFIYGVILTALFLRVKFSRSADAPAYQQGQNQLYNELNLGRREEYDVLDKRRGRDPEMGGKPQRRKNPQEGLYNELQKDKMAEAYSEIGMKGERRRGKGHDGLYQGLSTATKDTYDALHMQALPPR

SEQ ID NO: 20398 - protein, 812 aa, Artificial Sequence
  Synthetic Polypeptide
MALPVTALLLPLALLLHAARPDIVMTQSHKFMSTSVGDRVSIICKASQDVGTAVDWYQQKPGQSPKLLIYWASTRHTGVPDRFTGSGSGTDFTLAITNVQSEDLADYFCQQYNSYPLTFGAGTKLEIKRLEDLKNVFPPEVAVFEPSKAEIAHTQKATLVCLATGFYPDHVELSWWVNGKEVHSGVCTDPQPLKEQPALNDSRYCLSSRLRVSATFWQNPRNHFRCQVQFYGLSENDEWTQDRAKPVTQIVSAEAWGRADCGSQSFGLLDPKLCYLLDGILFIYGVILTALFLRVKFSRSADAPAYQQGQNQLYNELNLGRREEYDVLDKRRGRDPEMGGKPQRRKNPQEGLYNELQKDKMAEAYSEIGMKGERRRGKGHDGLYQGLSTATKDTYDALHMQALPPRRAKRSGSGATNFSLLKQAGDVEENPGPTSMDWIWRILFLVGAATGAHSFEEVQLQQSGPELVKPGTSVRISCKTSGYTFTEYTIHWVKQSHGKSLEWIGNINPNNGGTTYNQKFEDKATLTVDKSSSTAYMELRSLTSEDSAVYYCAAGWNFDYWGQGTTLTVSSTRIQNPDPAVYQLRDSKSSDKSVCLFTDFDSQTNVSQSKDSDVYITDKCVLDMRSMDFKSNSAVAWSNKSDFACANAFNNSIIPEDTFFPSSDVPCGTQSFGLLDPKLCYLLDGILFIYGVILTALFLRVKFSRSADAPAYQQGQNQLYNELNLGRREEYDVLDKRRGRDPEMGGKPQRRKNPQEGLYNELQKDKMAEAYSEIGMKGERRRGKGHDGLYQGLSTATKDTYDALHMQALPPR

SEQ ID NO: 20399 - protein, 883 aa, Artificial Sequence
  Synthetic Polypeptide
MALPVTALLLPLALLLHAARPDIVMTQSHKFMSTSVGDRVSIICKASQDVGTAVDWYQQKPGQSPKLLIYWASTRHTGVPDRFTGSGSGTDFTLAITNVQSEDLADYFCQQYNSYPLTFGAGTKLEIKRLEGKPIPNPLLGLDSTGSGEDLKNVFPPEVAVFEPSEAEISHTQKATLVCLATGFYPDHVELSWWVNGKEVHSGVSTDPQPLKEQPALNDSRYCLSSRLRVSATFWQNPRNHFRCQVQFYGLSENDEWTQDRAKPVTQIVSAEAWGRADCGSQSFGLLDPKLCYLLDGILFIYGVILTALFLRVKFSRSADAPAYQQGQNQLYNELNLGRREEYDVLDKRRGRDPEMGGKPQRRKNPQEGLYNELQKDKMAEAYSEIGMKGERRRGKGHDGLYQGLSTATKDTYDALHMQALPPRRAKRSGSGATNFSLLKQAGDVEENPGPTSMDWIWRILFLVGAATGAHSFEEVQLQQSGPELVKPGTSVRISCKTSGYTFTEYTIHWVKQSHGKSLEWIGNINPNNGGTTYNQKFEDKATLTVDKSSSTAYMELRSLTSEDSAVYYCAAGWNFDYWGQGTTLTVSSTREQKLISEEDGSGIQNPDPAVYQLRDSKSSDKSVCLFTDFDSQTNVSQSKDSDVYITDKTVLDMRSMDFKSNSAVAWSNKSDFACANAFNNSIIPEDTFFPSPESSCGTQSFGLLDPKLCYLLDGILFIYGVILTALFLRSKRSRLLHSDYMNMTPRRPGPTRKHYQPYAPPRDFAAYRSRVKFSRSADAPAYQQGQNQLYNELNLGRREEYDVLDKRRGRDPEMGGKPQRRKNPQEGLYNELQKDKMAEAYSEIGMKGERRRGKGHDGLYQGLSTATKDTYDALHMQALPPR

SEQ ID NO: 20400 - protein, 924 aa, Artificial Sequence
  Synthetic Polypeptide
MALPVTALLLPLALLLHAARPDIVMTQSHKFMSTSVGDRVSIICKASQDVGTAVDWYQQKPGQSPKLLIYWASTRHTGVPDRFTGSGSGTDFTLAITNVQSEDLADYFCQQYNSYPLTFGAGTKLEIKRLEGKPIPNPLLGLDSTGSGEDLKNVFPPEVAVFEPSEAEISHTQKATLVCLATGFYPDHVELSWWVNGKEVHSGVSTDPQPLKEQPALNDSRYCLSSRLRVSATFWQNPRNHFRCQVQFYGLSENDEWTQDRAKPVTQIVSAEAWGRADCGSQSFGLLDPKLCYLLDGILFIYGVILTALFLRSKRSRLLHSDYMNMTPRRPGPTRKHYQPYAPPRDFAAYRSRVKFSRSADAPAYQQGQNQLYNELNLGRREEYDVLDKRRGRDPEMGGKPQRRKNPQEGLYNELQKDKMAEAYSEIGMKGERRRGKGHDGLYQGLSTATKDTYDALHMQALPPRRAKRSGSGATNFSLLKQAGDVEENPGPTSMDWIWRILFLVGAATGAHSFEEVQLQQSGPELVKPGTSVRISCKTSGYTFTEYTIHWVKQSHGKSLEWIGNINPNNGGTTYNQKFEDKATLTVDKSSSTAYMELRSLTSEDSAVYYCAAGWNFDYWGQGTTLTVSSTREQKLISEEDGSGIQNPDPAVYQLRDSKSSDKSVCLFTDFDSQTNVSQSKDSDVYITDKTVLDMRSMDFKSNSAVAWSNKSDFACANAFNNSIIPEDTFFPSPESSCGTQSFGLLDPKLCYLLDGILFIYGVILTALFLRSKRSRLLHSDYMNMTPRRPGPTRKHYQPYAPPRDFAAYRSRVKFSRSADAPAYQQGQNQLYNELNLGRREEYDVLDKRRGRDPEMGGKPQRRKNPQEGLYNELQKDKMAEAYSEIGMKGERRRGKGHDGLYQGLSTATKDTYDALHMQALPPR

SEQ ID NO: 20401 - protein, 885 aa, Artificial Sequence
  Synthetic Polypeptide
MALPVTALLLPLALLLHAARPDIVMTQSHKFMSTSVGDRVSIICKASQDVGTAVDWYQQKPGQSPKLLIYWASTRHTGVPDRFTGSGSGTDFTLAITNVQSEDLADYFCQQYNSYPLTFGAGTKLEIKRLEGKPIPNPLLGLDSTGSGEDLKNVFPPEVAVFEPSEAEISHTQKATLVCLATGFYPDHVELSWWVNGKEVHSGVSTDPQPLKEQPALNDSRYCLSSRLRVSATFWQNPRNHFRCQVQFYGLSENDEWTQDRAKPVTQIVSAEAWGRADCGSQSFGLLDPKLCYLLDGILFIYGVILTALFLRVKFSRSADAPAYQQGQNQLYNELNLGRREEYDVLDKRRGRDPEMGGKPQRRKNPQEGLYNELQKDKMAEAYSEIGMKGERRRGKGHDGLYQGLSTATKDTYDALHMQALPPRRAKRSGSGATNFSLLKQAGDVEENPGPTSMDWIWRILFLVGAATGAHSFEEVQLQQSGPELVKPGTSVRISCKTSGYTFTEYTIHWVKQSHGKSLEWIGNINPNNGGTTYNQKFEDKATLTVDKSSSTAYMELRSLTSEDSAVYYCAAGWNFDYWGQGTTLTVSSTREQKLISEEDLGSGIQNPDPAVYQLRDSKSSDKSVCLFTDFDSQTNVSQSKDSDVYITDKTVLDMRSMDFKSNSAVAWSNKSDFACANAFNNSIIPEDTFFPSPESSCGTQSFGLLDPKLCYLLDGILFIYGVILTALFLKRGRKKLLYIFKQPFMRPVQTTQEEDGCSCRFPEEEEGGCELRVKFSRSADAPAYQQGQNQLYNELNLGRREEYDVLDKRRGRDPEMGGKPQRRKNPQEGLYNELQKDKMAEAYSEIGMKGERRRGKGHDGLYQGLSTATKDTYDALHMQALPPR

SEQ ID NO: 20402 - protein, 927 aa, Artificial Sequence
  Synthetic Polypeptide
MALPVTALLLPLALLLHAARPDIVMTQSHKFMSTSVGDRVSIICKASQDVGTAVDWYQQKPGQSPKLLIYWASTRHTGVPDRFTGSGSGTDFTLAITNVQSEDLADYFCQQYNSYPLTFGAGTKLEIKRLEGKPIPNPLLGLDSTGSGEDLKNVFPPEVAVFEPSEAEISHTQKATLVCLATGFYPDHVELSWWVNGKEVHSGVSTDPQPLKEQPALNDSRYCLSSRLRVSATFWQNPRNHFRCQVQFYGLSENDEWTQDRAKPVTQIVSAEAWGRADCGSQSFGLLDPKLCYLLDGILFIYGVILTALFLKRGRKKLLYIFKQPFMRPVQTTQEEDGCSCRFPEEEEGGCELRVKFSRSADAPAYQQGQNQLYNELNLGRREEYDVLDKRRGRDPEMGGKPQRRKNPQEGLYNELQKDKMAEAYSEIGMKGERRRGKGHDGLYQGLSTATKDTYDALHMQALPPRRAKRSGSGATNFSLLKQAGDVEENPGPTSMDWIWRILFLVGAATGAHSFEEVQLQQSGPELVKPGTSVRISCKTSGYTFTEYTIHWVKQSHGKSLEWIGNINPNNGGTTYNQKFEDKATLTVDKSSSTAYMELRSLTSEDSAVYYCAAGWNFDYWGQGTTLTVSSTREQKLISEEDLGSGIQNPDPAVYQLRDSKSSDKSVCLFTDFDSQTNVSQSKDSDVYITDKTVLDMRSMDFKSNSAVAWSNKSDFACANAFNNSIIPEDTFFPSPESSCGTQSFGLLDPKLCYLLDGILFIYGVILTALFLKRGRKKLLYIFKQPFMRPVQTTQEEDGCSCRFPEEEEGGCELRVKFSRSADAPAYQQGQNQLYNELNLGRREEYDVLDKRRGRDPEMGGKPQRRKNPQEGLYNELQKDKMAEAYSEIGMKGERRRGKGHDGLYQGLSTATKDTYDALHMQALPPR

SEQ ID NO: 20403 - protein, 817 aa, Artificial Sequence
  Synthetic Polypeptide
MALPVTALLLPLALLLHAARPDIVMTQSHKFMSTSVGDRVSIICKASQDVGTAVDWYQQKPGQSPKLLIYWASTRHTGVPDRFTGSGSGTDFTLAITNVQSEDLADYFCQQYNSYPLTFGAGTKLEIKRLEQSFGLLDPKLCYLLDGILFIYGVILTALFLRVKFSRSADAPAYQQGQNQLYNELNLGRREEYDVLDKRRGRDPEMGGKPQRRKNPQEGLYNELQKDKMAEAYSEIGMKGERRRGKGHDGLYQGLSTATKDTYDALHMQALPPRRAKRSGSGATNFSLLKQAGDVEENPGPTSMDWIWRILFLVGAATGAHSFEEVQLQQSGPELVKPGTSVRISCKTSGYTFTEYTIHWVKQSHGKSLEWIGNINPNNGGTTYNQKFEDKATLTVDKSSSTAYMELRSLTSEDSAVYYCAAGWNFDYWGQGTTLTVSSTRQSFGLLDPKLCYLLDGILFIYGVILTALFLRVKFSRSADAPAYQQGQNQLYNELNLGRREEYDVLDKRRGRDPEMGGKPQRRKNPQEGLYNELQKDKMAEAYSEIGMKGERRRGKGHDGLYQGLSTATKDTYDALHMQALPPRRAKRSGSGVKQTLNFDLLKLAGDVESNPGPSRGHMTEYKPTVRLATRDDVPRAVRTLAAAFADYPATRHTVDPDRHIERVTELQELFLTRVGLDIGKVWVADDGAAVAVWTTPESVEAGAVFAEIGPRMAELSGSRLAAQQQMEGLLAPHRPKEPAWFLATVGVSPDHQGKGLGSAVVLPGVEAAERAGVPAFLETSAPRNLPFYERLGFTVTADVEVPEGPRTWCMTRKPGA

SEQ ID NO: 20404 - protein, 642 aa, Artificial Sequence
  Synthetic Polypeptide
MALPVTALLLPLALLLHAARPDIVMTQSHKFMSTSVGDRVSIICKASQDVGTAVDWYQQKPGQSPKLLIYWASTRHTGVPDRFTGSGSGTDFTLAITNVQSEDLADYFCQQYNSYPLTFGAGTKLEIKRLEGQPKANPTVTLFPPSSEELQANKATLVCLISDFYPGAVTVAWKADGSPVKAGVETTKPSKQSNNKYAASSYLSLTPEQWKSHRSYSCQVTHEGSTVEKTVAPTECSPIKTDVITMDPKDNCSKDANDTLLLQLTNTSAYYMYLLLLLKSVVYFAIITCCLLRRTAFCCNGEKSRAKRSGSGATNFSLLKQAGDVEENPGPTSMDWIWRILFLVGAATGAHSFEEVQLQQSGPELVKPGTSVRISCKTSGYTFTEYTIHWVKQSHGKSLEWIGNINPNNGGTTYNQKFEDKATLTVDKSSSTAYMELRSLTSEDSAVYYCAAGWNFDYWGQGTTLTVSSTRASTKGPSVFPLAPSSKSTSGGTAALGCLVKDYFPEPVTVSWNSGALTSGVHTFPAVLQSSGLYSLSSVVTVPSSSLGTQTYICNVNHKPSNTKVDKRVEPKSCEVKTDSTDHVKPKETENTKQPSKSCHKPKAIVHTEKVNMMSLTVLGLRMLFAKTVAVNFLLTAKLFFL

SEQ ID NO: 20405 - protein, 620 aa, Artificial Sequence
  Synthetic Polypeptide
MALPVTALLLPLALLLHAARPDIVMTQSHKFMSTSVGDRVSIICKASQDVGTAVDWYQQKPGQSPKLLIYWASTRHTGVPDRFTGSGSGTDFTLAITNVQSEDLADYFCQQYNSYPLTFGAGTKLEIKRLEGQPKANPTVTLFPPSSEELQANKATLVCLISDFYPGAVTVAWKADGSPVKAGVETTKPSKQSNNKYAASSYLSLTPEQWKSHRSYSCQVTHEGSTVEKTVAPTECSGRADCGITSASYHQGVLSATILYEILLGKATLYAVLVSALVLMAMVKRKDSRGRAKRSGSGATNFSLLKQAGDVEENPGPTSMDWIWRILFLVGAATGAHSFEEVQLQQSGPELVKPGTSVRISCKTSGYTFTEYTIHWVKQSHGKSLEWIGNINPNNGGTTYNQKFEDKATLTVDKSSSTAYMELRSLTSEDSAVYYCAAGWNFDYWGQGTTLTVSSTRASTKGPSVFPLAPSSKSTSGGTAALGCLVKDYFPEPVTVSWNSGALTSGVHTFPAVLQSSGLYSLSSVVTVPSSSLGTQTYICNVNHKPSNTKVDKRVEPKSCIPEDTFFPSSDVPCDVKLVEKSFETDTNLNFQNLSVIGFRILLLKVAGFNLLMTLRLWSS

SEQ ID NO: 20406 - protein, 620 aa, Artificial Sequence
  Synthetic Polypeptide
MALPVTALLLPLALLLHAARPDIVMTQSHKFMSTSVGDRVSIICKASQDVGTAVDWYQQKPGQSPKLLIYWASTRHTGVPDRFTGSGSGTDFTLAITNVQSEDLADYFCQQYNSYPLTFGAGTKLEIKRLEGQPKANPTVTLFPPSSEELQANKATLVCLISDFYPGAVTVAWKADGSPVKAGVETTKPSKQSNNKYAASSYLSLTPEQWKSHRSYSCQVTHEGSTVEKTVAPTECSGRADCGFTSESYQQGVLSATILYEILLGKATLYAVLVSALVLMAMVKRKDSRGRAKRSGSGATNFSLLKQAGDVEENPGPTSMDWIWRILFLVGAATGAHSFEEVQLQQSGPELVKPGTSVRISCKTSGYTFTEYTIHWVKQSHGKSLEWIGNINPNNGGTTYNQKFEDKATLTVDKSSSTAYMELRSLTSEDSAVYYCAAGWNFDYWGQGTTLTVSSTRASTKGPSVFPLAPSSKSTSGGTAALGCLVKDYFPEPVTVSWNSGALTSGVHTFPAVLQSSGLYSLSSVVTVPSSSLGTQTYICNVNHKPSNTKVDKRVEPKSCIPEDTFFPSPESSCDVKLVEKSFETDTNLNFQNLSVIGFRILLLKVAGFNLLMTLRLWSS

SEQ ID NO: 20407 - protein, 446 aa, Artificial Sequence
  Synthetic Polypeptide
MALPVTALLLPLALLLHAARPDIVMTQSHKFMSTSVGDRVSIICKASQDVGTAVDWYQQKPGQSPKLLIYWASTRHTGVPDRFTGSGSGTDFTLAITNVQSEDLADYFCQQYNSYPLTFGAGTKLEIKRGGGGSGGGGSGGGGSEVQLQQSGPELVKPGTSVRISCKTSGYTFTEYTIHWVKQSHGKSLEWIGNINPNNGGTTYNQKFEDKATLTVDKSSSTAYMELRSLTSEDSAVYYCAAGWNFDYWGQGTTLTVSSTRDGNEEMGGITQTPYKVSISGTTVILTCPQYPGSEILWQHNDKNIGGDEDDKNIGSDEDHLSLKEFSELEQSGYYVCYPRGSKPEDANFYLYLRARVCENCMEMDVMSVATIVIVDICITGGLLLLVYYWSKNRKAKAKPVTRGAGAGGRQRGQNKERPPPVPNPDYEPIRKGQRDLYSGLNQRRI

SEQ ID NO: 20408 - protein, 411 aa, Artificial Sequence
  Synthetic Polypeptide
MALPVTALLLPLALLLHAARPDIVMTQSHKFMSTSVGDRVSIICKASQDVGTAVDWYQQKPGQSPKLLIYWASTRHTGVPDRFTGSGSGTDFTLAITNVQSEDLADYFCQQYNSYPLTFGAGTKLEIKRGGGGSGGGGSGGGGSEVQLQQSGPELVKPGTSVRISCKTSGYTFTEYTIHWVKQSHGKSLEWIGNINPNNGGTTYNQKFEDKATLTVDKSSSTAYMELRSLTSEDSAVYYCAAGWNFDYWGQGTTLTVSSTRFKIPIEELEDRVFVNCNTSITWVEGTVGTLLSDITRLDLGKRILDPRGIYRCNGTDIYKDKESTVQVHYRMCQSCVELDPATVAGIIVTDVIATLLLALGVFCFAGHETGRLSGAADTQALLRNDQVYQPLRDRDDAQYSHLGGNWARNK

SEQ ID NO: 20409 - protein, 421 aa, Artificial Sequence
  Synthetic Polypeptide
MALPVTALLLPLALLLHAARPDIVMTQSHKFMSTSVGDRVSIICKASQDVGTAVDWYQQKPGQSPKLLIYWASTRHTGVPDRFTGSGSGTDFTLAITNVQSEDLADYFCQQYNSYPLTFGAGTKLEIKRGGGGSGGGGSGGGGSEVQLQQSGPELVKPGTSVRISCKTSGYTFTEYTIHWVKQSHGKSLEWIGNINPNNGGTTYNQKFEDKATLTVDKSSSTAYMELRSLTSEDSAVYYCAAGWNFDYWGQGTTLTVSSTRQSIKGNHLVKVYDYQEDGSVLLTCDAEAKNITWFKDGKMIGFLTEDKKKWNLGSNAKDPRGMYQCKGSQNKSKPLQVYYRMCQNCIELNAATISGFLFAEIVSIFVLAVGVYFIAGQDGVRQSRASDKQTLLPNDQLYQPLKDREDDQYSHLQGNQLRRN

SEQ ID NO: 20410 - protein, 404 aa, Artificial Sequence
  Synthetic Polypeptide
MALPVTALLLPLALLLHAARPDIVMTQSHKFMSTSVGDRVSIICKASQDVGTAVDWYQQKPGQSPKLLIYWASTRHTGVPDRFTGSGSGTDFTLAITNVQSEDLADYFCQQYNSYPLTFGAGTKLEIKRGGGGSGGGGSGGGGSEVQLQQSGPELVKPGTSVRISCKTSGYTFTEYTIHWVKQSHGKSLEWIGNINPNNGGTTYNQKFEDKATLTVDKSSSTAYMELRSLTSEDSAVYYCAAGWNFDYWGQGTTLTVSSTRQSFGLLDPKLCYLLDGILFIYGVILTALFLRVKFSRSADAPAYQQGQNQLYNELNLGRREEYDVLDKRRGRDPEMGGKPQRRKNPQEGLYNELQKDKMAEAYSEIGMKGERRRGKGHDGLYQGLSTATKDTYDALHMQALPPR

SEQ ID NO: 20411 - protein, 446 aa, Artificial Sequence
  Synthetic Polypeptide
MALPVTALLLPLALLLHAARPEVQLQQSGPELVKPGTSVRISCKTSGYTFTEYTIHWVKQSHGKSLEWIGNINPNNGGTTYNQKFEDKATLTVDKSSSTAYMELRSLTSEDSAVYYCAAGWNFDYWGQGTTLTVSSGGGGSGGGGSGGGGSDIVMTQSHKFMSTSVGDRVSIICKASQDVGTAVDWYQQKPGQSPKLLIYWASTRHTGVPDRFTGSGSGTDFTLAITNVQSEDLADYFCQQYNSYPLTFGAGTKLEIKRTRDGNEEMGGITQTPYKVSISGTTVILTCPQYPGSEILWQHNDKNIGGDEDDKNIGSDEDHLSLKEFSELEQSGYYVCYPRGSKPEDANFYLYLRARVCENCMEMDVMSVATIVIVDICITGGLLLLVYYWSKNRKAKAKPVTRGAGAGGRQRGQNKERPPPVPNPDYEPIRKGQRDLYSGLNQRRI

SEQ ID NO: 20412 - protein, 411 aa, Artificial Sequence
  Synthetic Polypeptide
MALPVTALLLPLALLLHAARPEVQLQQSGPELVKPGTSVRISCKTSGYTFTEYTIHWVKQSHGKSLEWIGNINPNNGGTTYNQKFEDKATLTVDKSSSTAYMELRSLTSEDSAVYYCAAGWNFDYWGQGTTLTVSSGGGGSGGGGSGGGGSDIVMTQSHKFMSTSVGDRVSIICKASQDVGTAVDWYQQKPGQSPKLLIYWASTRHTGVPDRFTGSGSGTDFTLAITNVQSEDLADYFCQQYNSYPLTFGAGTKLEIKRTRFKIPIEELEDRVFVNCNTSITWVEGTVGTLLSDITRLDLGKRILDPRGIYRCNGTDIYKDKESTVQVHYRMCQSCVELDPATVAGIIVTDVIATLLLALGVFCFAGHETGRLSGAADTQALLRNDQVYQPLRDRDDAQYSHLGGNWARNK

SEQ ID NO: 20413 - protein, 421 aa, Artificial Sequence
  Synthetic Polypeptide
MALPVTALLLPLALLLHAARPEVQLQQSGPELVKPGTSVRISCKTSGYTFTEYTIHWVKQSHGKSLEWIGNINPNNGGTTYNQKFEDKATLTVDKSSSTAYMELRSLTSEDSAVYYCAAGWNFDYWGQGTTLTVSSGGGGSGGGGSGGGGSDIVMTQSHKFMSTSVGDRVSIICKASQDVGTAVDWYQQKPGQSPKLLIYWASTRHTGVPDRFTGSGSGTDFTLAITNVQSEDLADYFCQQYNSYPLTFGAGTKLEIKRTRQSIKGNHLVKVYDYQEDGSVLLTCDAEAKNITWFKDGKMIGFLTEDKKKWNLGSNAKDPRGMYQCKGSQNKSKPLQVYYRMCQNCIELNAATISGFLFAEIVSIFVLAVGVYFIAGQDGVRQSRASDKQTLLPNDQLYQPLKDREDDQYSHLQGNQLRRN

SEQ ID NO: 20414 - protein, 404 aa, Artificial Sequence
  Synthetic Polypeptide
MALPVTALLLPLALLLHAARPEVQLQQSGPELVKPGTSVRISCKTSGYTFTEYTIHWVKQSHGKSLEWIGNINPNNGGTTYNQKFEDKATLTVDKSSSTAYMELRSLTSEDSAVYYCAAGWNFDYWGQGTTLTVSSGGGGSGGGGSGGGGSDIVMTQSHKFMSTSVGDRVSIICKASQDVGTAVDWYQQKPGQSPKLLIYWASTRHTGVPDRFTGSGSGTDFTLAITNVQSEDLADYFCQQYNSYPLTFGAGTKLEIKRTRQSFGLLDPKLCYLLDGILFIYGVILTALFLRVKFSRSADAPAYQQGQNQLYNELNLGRREEYDVLDKRRGRDPEMGGKPQRRKNPQEGLYNELQKDKMAEAYSEIGMKGERRRGKGHDGLYQGLSTATKDTYDALHMQALPPR

SEQ ID NO: 20415 - protein, 637 aa, Artificial Sequence
  Synthetic Polypeptide
MALPVTALLLPLALLLHAARPDIVMTQSHKFMSTSVGDRVSIICKASQDVGTAVDWYQQKPGQSPKLLIYWASTRHTGVPDRFTGSGSGTDFTLAITNVQSEDLADYFCQQYNSYPLTFGAGTKLEIKRGGGGSGGGGSGGGGSEVQLQQSGPELVKPGTSVRISCKTSGYTFTEYTIHWVKQSHGKSLEWIGNINPNNGGTTYNQKFEDKATLTVDKSSSTAYMELRSLTSEDSAVYYCAAGWNFDYWGQGTTLTVSSTRGSGIQNPDPAVYQLRDSKSSDKSVCLFTDFDSQTNVSQSKDSDVYITDKTVLDMRSMDFKSNSAVAWSNKSDFACANAFNNSIIPEDTFFPSPESSCDVKLVEKSFETDTNLNFQNLSVIGFRILLLKVAGFNLLMTLRLWSSRAKRSGSGVKQTLNFDLLKLAGDVESNPGPSRGHMTEYKPTVRLATRDDVPRAVRTLAAAFADYPATRHTVDPDRHIERVTELQELFLTRVGLDIGKVWVADDGAAVAVWTTPESVEAGAVFAEIGPRMAELSGSRLAAQQQMEGLLAPHRPKEPAWFLATVGVSPDHQGKGLGSAVVLPGVEAAERAGVPAFLETSAPRNLPFYERLGFTVTADVEVPEGPRTWCMTRKPGA

SEQ ID NO: 20416 - protein, 669 aa, Artificial Sequence
  Synthetic Polypeptide
MALPVTALLLPLALLLHAARPDIVMTQSHKFMSTSVGDRVSIICKASQDVGTAVDWYQQKPGQSPKLLIYWASTRHTGVPDRFTGSGSGTDFTLAITNVQSEDLADYFCQQYNSYPLTFGAGTKLEIKRGGGGSGGGGSGGGGSEVQLQQSGPELVKPGTSVRISCKTSGYTFTEYTIHWVKQSHGKSLEWIGNINPNNGGTTYNQKFEDKATLTVDKSSSTAYMELRSLTSEDSAVYYCAAGWNFDYWGQGTTLTVSSLEDLKNVFPPEVAVFEPSEAEISHTQKATLVCLATGFYPDHVELSWWVNGKEVHSGVSTDPQPLKEQPALNDSRYCLSSRLRVSATFWQNPRNHFRCQVQFYGLSENDEWTQDRAKPVTQIVSAEAWGRADCGFTSESYQQGVLSATILYEILLGKATLYAVLVSALVLMAMVKRKDSRGRAKRSGSGATNFSLLKQAGDVEENPGPTRGHMTEYKPTVRLATRDDVPRAVRTLAAAFADYPATRHTVDPDRHIERVTELQELFLTRVGLDIGKVWVADDGAAVAVWTTPESVEAGAVFAEIGPRMAELSGSRLAAQQQMEGLLAPHRPKEPAWFLATVGVSPDHQGKGLGSAVVLPGVEAAERAGVPAFLETSAPRNLPFYERLGFTVTADVEVPEGPRTWCMTRKPGA

SEQ ID NO: 20417 - protein, 719 aa, Artificial Sequence
  Synthetic Polypeptide
MALPVTALLLPLALLLHAARPDIVMTQSHKFMSTSVGDRVSIICKASQDVGTAVDWYQQKPGQSPKLLIYWASTRHTGVPDRFTGSGSGTDFTLAITNVQSEDLADYFCQQYNSYPLTFGAGTKLEIKRGGGGSGGGGSGGGGSEVQLQQSGPELVKPGTSVRISCKTSGYTFTEYTIHWVKQSHGKSLEWIGNINPNNGGTTYNQKFEDKATLTVDKSSSTAYMELRSLTSEDSAVYYCAAGWNFDYWGQGTTLTVSSTREQKLISEEDLGSGTPFPSLAPPIMLLVDGKQQMVVVCLVLDVAPPGLDSPIWFSAGNGSALDAFTYGPSPATDGTWTNLAHLSLPSEELASWEPLVCHTGPGAEGHSRSTQPMHLSGEASTARTCPQEPLRGTPGGALWLGVLRLLLFKLLLFDLLLTCSCLCDPAGPLPSPATTTRLRALGSHRLHPATETGGREATSSPRPQPRDRRWGDTPPGRKPGSPVRAKRSGSGVKQTLNFDLLKLAGDVESNPGPSRSRGHMTEYKPTVRLATRDDVPRAVRTLAAAFADYPATRHTVDPDRHIERVTELQELFLTRVGLDIGKVWVADDGAAVAVWTTPESVEAGAVFAEIGPRMAELSGSRLAAQQQMEGLLAPHRPKEPAWFLATVGVSPDHQGKGLGSAVVLPGVEAAERAGVPAFLETSAPRNLPFYERLGFTVTADVEVPEGPRTWCMTRKPGA

SEQ ID NO: 20418 - protein, 539 aa, Artificial Sequence
  Synthetic Polypeptide
MALPVTALLLPLALLLHAARPDIVMTQSHKFMSTSVGDRVSIICKASQDVGTAVDWYQQKPGQSPKLLIYWASTRHTGVPDRFTGSGSGTDFTLAITNVQSEDLADYFCQQYNSYPLTFGAGTKLEIKRLEDLKNVFPPEVAVFEPSEAEISHTQKATLVCLATGFYPDHVELSWWVNGKEVHSGVSTDPQPLKEQPALNDSRYCLSSRLRVSATFWQNPRNHFRCQVQFYGLSENDEWTQDRAKPVTQIVSAEAWGRADCGFTSESYQQGVLSATILYEILLGKATLYAVLVSALVLMAMVKRKDSRGRAKRSGSGATNFSLLKQAGDVEENPGPTRGHMTEYKPTVRLATRDDVPRAVRTLAAAFADYPATRHTVDPDRHIERVTELQELFLTRVGLDIGKVWVADDGAAVAVWTTPESVEAGAVFAEIGPRMAELSGSRLAAQQQMEGLLAPHRPKEPAWFLATVGVSPDHQGKGLGSAVVLPGVEAAERAGVPAFLETSAPRNLPFYERLGFTVTADVEVPEGPRTWCMTRKPGA

SEQ ID NO: 20419 - protein, 309 aa, Artificial Sequence
  Synthetic Polypeptide
MALPVTALLLPLALLLHAARPDIVMTQSHKFMSTSVGDRVSIICKASQDVGTAVDWYQQKPGQSPKLLIYWASTRHTGVPDRFTGSGSGTDFTLAITNVQSEDLADYFCQQYNSYPLTFGAGTKLEIKRLEDLKNVFPPEVAVFEPSEAEISHTQKATLVCLATGFYPDHVELSWWVNGKEVHSGVSTDPQPLKEQPALNDSRYCLSSRLRVSATFWQNPRNHFRCQVQFYGLSENDEWTQDRAKPVTQIVSAEAWGRADCGFTSESYQQGVLSATILYEILLGKATLYAVLVSALVLMAMVKRKDSRG

SEQ ID NO: 20420 - protein, 444 aa, Artificial Sequence
  Synthetic Polypeptide
MDWIWRILFLVGAATGAHSFEEVQLQQSGPELVKPGTSVRISCKTSGYTFTEYTIHWVKQSHGKSLEWIGNINPNNGGTTYNQKFEDKATLTVDKSSSTAYMELRSLTSEDSAVYYCAAGWNFDYWGQGTTLTVSSTRIQNPDPAVYQLRDSKSSDKSVCLFTDFDSQTNVSQSKDSDVYITDKTVLDMRSMDFKSNSAVAWSNKSDFACANAFNNSIIPEDTFFPSPESSCDVKLVEKSFETDTNLNFQNLSVIGFRILLLKVAGFNLLMTLRLWSSRAKRSGSGVKQTLNFDLLKLAGDVESNPGPSRGHMAKPLSQEESTLIERATATINSIPISEDYSVASAALSSDGRIFTGVNVYHFTGGPCAELVVLGTAAAAAAGNLTCIVAIGNENRGILSPCGRCRQVLLDLHPGIKAIVKDSDGQPTAVGIRELLPSGYVWEG

SEQ ID NO: 20421 - protein, 278 aa, Artificial Sequence
  Synthetic Polypeptide
MDWIWRILFLVGAATGAHSFEEVQLQQSGPELVKPGTSVRISCKTSGYTFTEYTIHWVKQSHGKSLEWIGNINPNNGGTTYNQKFEDKATLTVDKSSSTAYMELRSLTSEDSAVYYCAAGWNFDYWGQGTTLTVSSTRIQNPDPAVYQLRDSKSSDKSVCLFTDFDSQTNVSQSKDSDVYITDKTVLDMRSMDFKSNSAVAWSNKSDFACANAFNNSIIPEDTFFPSPESSCDVKLVEKSFETDTNLNFQNLSVIGFRILLLKVAGFNLLMTLRLWSS

SEQ ID NO: 20422 - protein, 557 aa, Artificial Sequence
  Synthetic Polypeptide
MALPVTALLLPLALLLHAARPDIVMTQSHKFMSTSVGDRVSIICKASQDVGTAVDWYQQKPGQSPKLLIYWASTRHTGVPDRFTGSGSGTDFTLAITNVQSEDLADYFCQQYNSYPLTFGAGTKLEIKRLEGKPIPNPLLGLDSTGSGEDLKNVFPPEVAVFEPSEAEISHTQKATLVCLATGFYPDHVELSWWVNGKEVHSGVCTDPQPLKEQPALNDSRYCLSSRLRVSATFWQNPRNHFRCQVQFYGLSENDEWTQDRAKPVTQIVSAEAWGRADCGFTSESYQQGVLSATILYEILLGKATLYAVLVSALVLMAMVKRKDSRGRAKRSGSGATNFSLLKQAGDVEENPGPTRGHMTEYKPTVRLATRDDVPRAVRTLAAAFADYPATRHTVDPDRHIERVTELQELFLTRVGLDIGKVWVADDGAAVAVWTTPESVEAGAVFAEIGPRMAELSGSRLAAQQQMEGLLAPHRPKEPAWFLATVGVSPDHQGKGLGSAVVLPGVEAAERAGVPAFLETSAPRNLPFYERLGFTVTADVEVPEGPRTWCMTRKPGA

SEQ ID NO: 20423 - protein, 327 aa, Artificial Sequence
  Synthetic Polypeptide
MALPVTALLLPLALLLHAARPDIVMTQSHKFMSTSVGDRVSIICKASQDVGTAVDWYQQKPGQSPKLLIYWASTRHTGVPDRFTGSGSGTDFTLAITNVQSEDLADYFCQQYNSYPLTFGAGTKLEIKRLEGKPIPNPLLGLDSTGSGEDLKNVFPPEVAVFEPSEAEISHTQKATLVCLATGFYPDHVELSWWVNGKEVHSGVCTDPQPLKEQPALNDSRYCLSSRLRVSATFWQNPRNHFRCQVQFYGLSENDEWTQDRAKPVTQIVSAEAWGRADCGFTSESYQQGVLSATILYEILLGKATLYAVLVSALVLMAMVKRKDSRG

SEQ ID NO: 20424 - protein, 456 aa, Artificial Sequence
  Synthetic Polypeptide
MDWIWRILFLVGAATGAHSFEEVQLQQSGPELVKPGTSVRISCKTSGYTFTEYTIHWVKQSHGKSLEWIGNINPNNGGTTYNQKFEDKATLTVDKSSSTAYMELRSLTSEDSAVYYCAAGWNFDYWGQGTTLTVSSTREQKLISEEDGSGIQNPDPAVYQLRDSKSSDKSVCLFTDFDSQTNVSQSKDSDVYITDKCVLDMRSMDFKSNSAVAWSNKSDFACANAFNNSIIPEDTFFPSPESSCDVKLVEKSFETDTNLNFQNLSVIGFRILLLKVAGFNLLMTLRLWSSRAKRSGSGVKQTLNFDLLKLAGDVESNPGPSRGHMAKPLSQEESTLIERATATINSIPISEDYSVASAALSSDGRIFTGVNVYHFTGGPCAELVVLGTAAAAAAGNLTCIVAIGNENRGILSPCGRCRQVLLDLHPGIKAIVKDSDGQPTAVGIRELLPSGYVWEG

SEQ ID NO: 20425 - protein, 290 aa, Artificial Sequence
  Synthetic Polypeptide
MDWIWRILFLVGAATGAHSFEEVQLQQSGPELVKPGTSVRISCKTSGYTFTEYTIHWVKQSHGKSLEWIGNINPNNGGTTYNQKFEDKATLTVDKSSSTAYMELRSLTSEDSAVYYCAAGWNFDYWGQGTTLTVSSTREQKLISEEDGSGIQNPDPAVYQLRDSKSSDKSVCLFTDFDSQTNVSQSKDSDVYITDKCVLDMRSMDFKSNSAVAWSNKSDFACANAFNNSIIPEDTFFPSPESSCDVKLVEKSFETDTNLNFQNLSVIGFRILLLKVAGFNLLMTLRLWSS

SEQ ID NO: 20426 - protein, 637 aa, Artificial Sequence
  Synthetic Polypeptide
MALPVTALLLPLALLLHAARPDIVMTQSHKFMSTSVGDRVSIICKASQDVGTAVDWYQQKPGQSPKLLIYWASTRHTGVPDRFTGSGSGTDFTLAITNVQSEDLADYFCQQYNSYPLTFGAGTKLEIKRGGGGSGGGGSGGGGSEVQLQQSGPELVKPGTSVRISCKTSGYTFTEYTIHWVKQSHGKSLEWIGNINPNNGGTTYNQKFEDKATLTVDKSSSTAYMELRSLTSEDSAVYYCAAGWNFDYWGQGTTLTVSSTRGSGIQNPDPAVYQLRDSKSSDKSVCLFTDFDSQTNVSQSKDSDVYITDKTVLDMRSMDFKSNSAVAWSNKSDFACANAFNNSIIPEDTFFPSSDVPCDVKLVEKSFETDTNLNFQNLSVIGFRILLLKVAGFNLLMTLRLWSSRAKRSGSGVKQTLNFDLLKLAGDVESNPGPSRGHMTEYKPTVRLATRDDVPRAVRTLAAAFADYPATRHTVDPDRHIERVTELQELFLTRVGLDIGKVWVADDGAAVAVWTTPESVEAGAVFAEIGPRMAELSGSRLAAQQQMEGLLAPHRPKEPAWFLATVGVSPDHQGKGLGSAVVLPGVEAAERAGVPAFLETSAPRNLPFYERLGFTVTADVEVPEGPRTWCMTRKPGA

SEQ ID NO: 20427 - protein, 669 aa, Artificial Sequence
  Synthetic Polypeptide
MALPVTALLLPLALLLHAARPDIVMTQSHKFMSTSVGDRVSIICKASQDVGTAVDWYQQKPGQSPKLLIYWASTRHTGVPDRFTGSGSGTDFTLAITNVQSEDLADYFCQQYNSYPLTFGAGTKLEIKRGGGGSGGGGSGGGGSEVQLQQSGPELVKPGTSVRISCKTSGYTFTEYTIHWVKQSHGKSLEWIGNINPNNGGTTYNQKFEDKATLTVDKSSSTAYMELRSLTSEDSAVYYCAAGWNFDYWGQGTTLTVSSLEDLKNVFPPEVAVFEPSKAEIAHTQKATLVCLATGFYPDHVELSWWVNGKEVHSGVSTDPQPLKEQPALNDSRYCLSSRLRVSATFWQNPRNHFRCQVQFYGLSENDEWTQDRAKPVTQIVSAEAWGRADCGITSASYHQGVLSATILYEILLGKATLYAVLVSALVLMAMVKRKDSRGRAKRSGSGATNFSLLKQAGDVEENPGPTRGHMTEYKPTVRLATRDDVPRAVRTLAAAFADYPATRHTVDPDRHIERVTELQELFLTRVGLDIGKVWVADDGAAVAVWTTPESVEAGAVFAEIGPRMAELSGSRLAAQQQMEGLLAPHRPKEPAWFLATVGVSPDHQGKGLGSAVVLPGVEAAERAGVPAFLETSAPRNLPFYERLGFTVTADVEVPEGPRTWCMTRKPGA

SEQ ID NO: 20428 - protein, 692 aa, Artificial Sequence
  Synthetic Polypeptide
MALPVTALLLPLALLLHAARPDIVMTQSHKFMSTSVGDRVSIICKASQDVGTAVDWYQQKPGQSPKLLIYWASTRHTGVPDRFTGSGSGTDFTLAITNVQSEDLADYFCQQYNSYPLTFGAGTKLEIKRGGGGSGGGGSGGGGSEVQLQQSGPELVKPGTSVRISCKTSGYTFTEYTIHWVKQSHGKSLEWIGNINPNNGGTTYNQKFEDKATLTVDKSSSTAYMELRSLTSEDSAVYYCAAGWNFDYWGQGTTLTVSSTRGSGGGGSGGGGSGDGNEEMGGITQTPYKVSISGTTVILTCPQYPGSEILWQHNDKNIGGDEDDKNIGSDEDHLSLKEFSELEQSGYYVCYPRGSKPEDANFYLYLRARVCENCMEMDVMSVATIVIVDICITGGLLLLVYYWSKNRKAKAKPVTRGAGAGGRQRGQNKERPPPVPNPDYEPIRKGQRDLYSGLNQRRIRAKRSGSGVKQTLNFDLLKLAGDVESNPGPSRGHMTEYKPTVRLATRDDVPRAVRTLAAAFADYPATRHTVDPDRHIERVTELQELFLTRVGLDIGKVWVADDGAAVAVWTTPESVEAGAVFAEIGPRMAELSGSRLAAQQQMEGLLAPHRPKEPAWFLATVGVSPDHQGKGLGSAVVLPGVEAAERAGVPAFLETSAPRNLPFYERLGFTVTADVEVPEGPRTWCMTRKPGA

SEQ ID NO: 20429 - protein, 657 aa, Artificial Sequence
  Synthetic Polypeptide
MALPVTALLLPLALLLHAARPDIVMTQSHKFMSTSVGDRVSIICKASQDVGTAVDWYQQKPGQSPKLLIYWASTRHTGVPDRFTGSGSGTDFTLAITNVQSEDLADYFCQQYNSYPLTFGAGTKLEIKRGGGGSGGGGSGGGGSEVQLQQSGPELVKPGTSVRISCKTSGYTFTEYTIHWVKQSHGKSLEWIGNINPNNGGTTYNQKFEDKATLTVDKSSSTAYMELRSLTSEDSAVYYCAAGWNFDYWGQGTTLTVSSTRGSGGGGSGGGGSGFKIPIEELEDRVFVNCNTSITWVEGTVGTLLSDITRLDLGKRILDPRGIYRCNGTDIYKDKESTVQVHYRMCQSCVELDPATVAGIIVTDVIATLLLALGVFCFAGHETGRLSGAADTQALLRNDQVYQPLRDRDDAQYSHLGGNWARNKRAKRSGSGVKQTLNFDLLKLAGDVESNPGPSRGHMTEYKPTVRLATRDDVPRAVRTLAAAFADYPATRHTVDPDRHIERVTELQELFLTRVGLDIGKVWVADDGAAVAVWTTPESVEAGAVFAEIGPRMAELSGSRLAAQQQMEGLLAPHRPKEPAWFLATVGVSPDHQGKGLGSAVVLPGVEAAERAGVPAFLETSAPRNLPFYERLGFTVTADVEVPEGPRTWCMTRKPGA

SEQ ID NO: 20430 - protein, 667 aa, Artificial Sequence
  Synthetic Polypeptide
MALPVTALLLPLALLLHAARPDIVMTQSHKFMSTSVGDRVSIICKASQDVGTAVDWYQQKPGQSPKLLIYWASTRHTGVPDRFTGSGSGTDFTLAITNVQSEDLADYFCQQYNSYPLTFGAGTKLEIKRGGGGSGGGGSGGGGSEVQLQQSGPELVKPGTSVRISCKTSGYTFTEYTIHWVKQSHGKSLEWIGNINPNNGGTTYNQKFEDKATLTVDKSSSTAYMELRSLTSEDSAVYYCAAGWNFDYWGQGTTLTVSSTRGSGGGGSGGGGSGQSIKGNHLVKVYDYQEDGSVLLTCDAEAKNITWFKDGKMIGFLTEDKKKWNLGSNAKDPRGMYQCKGSQNKSKPLQVYYRMCQNCIELNAATISGFLFAEIVSIFVLAVGVYFIAGQDGVRQSRASDKQTLLPNDQLYQPLKDREDDQYSHLQGNQLRRNRAKRSGSGVKQTLNFDLLKLAGDVESNPGPSRGHMTEYKPTVRLATRDDVPRAVRTLAAAFADYPATRHTVDPDRHIERVTELQELFLTRVGLDIGKVWVADDGAAVAVWTTPESVEAGAVFAEIGPRMAELSGSRLAAQQQMEGLLAPHRPKEPAWFLATVGVSPDHQGKGLGSAVVLPGVEAAERAGVPAFLETSAPRNLPFYERLGFTVTADVEVPEGPRTWCMTRKPGA

SEQ ID NO: 20431 - protein, 650 aa, Artificial Sequence
  Synthetic Polypeptide
MALPVTALLLPLALLLHAARPDIVMTQSHKFMSTSVGDRVSIICKASQDVGTAVDWYQQKPGQSPKLLIYWASTRHTGVPDRFTGSGSGTDFTLAITNVQSEDLADYFCQQYNSYPLTFGAGTKLEIKRGGGGSGGGGSGGGGSEVQLQQSGPELVKPGTSVRISCKTSGYTFTEYTIHWVKQSHGKSLEWIGNINPNNGGTTYNQKFEDKATLTVDKSSSTAYMELRSLTSEDSAVYYCAAGWNFDYWGQGTTLTVSSTRGSGGGGSGGGGSGQSFGLLDPKLCYLLDGILFIYGVILTALFLRVKFSRSADAPAYQQGQNQLYNELNLGRREEYDVLDKRRGRDPEMGGKPQRRKNPQEGLYNELQKDKMAEAYSEIGMKGERRRGKGHDGLYQGLSTATKDTYDALHMQALPPRRAKRSGSGVKQTLNFDLLKLAGDVESNPGPSRGHMTEYKPTVRLATRDDVPRAVRTLAAAFADYPATRHTVDPDRHIERVTELQELFLTRVGLDIGKVWVADDGAAVAVWTTPESVEAGAVFAEIGPRMAELSGSRLAAQQQMEGLLAPHRPKEPAWFLATVGVSPDHQGKGLGSAVVLPGVEAAERAGVPAFLETSAPRNLPFYERLGFTVTADVEVPEGPRTWCMTRKPGA

SEQ ID NO: 20432 - protein, 751 aa, Artificial Sequence
  Synthetic Polypeptide
MALPVTALLLPLALLLHAARPEVQLVESGGGLVQPGGSLRLSCAASGFSFSDFWMSWVRQAPGKGLEWVATISQAGSEKDYVDSVKGRFTISRDNAKKSLYLQMNSLRAEDTAVYYCASGVYSFDYRGQGTLVTVSSGTGGGGSGGGGSGGGGSEFDIVMTQSHKFMSTSVGDRVSIICKASQDVGTAVDWYQQKPGQSPKLLIYWASTRHTGVPDRFTGSGSGTDFTLAITNVQSEDLADYFCQQYNSYPLTFGAGTKLEIKRLEDLKNVFPPEVAVFEPSEAEISHTQKATLVCLATGFYPDHVELSWWVNGKEVHSGVCTDPQPLKEQPALNDSRYCLSSRLRVSATFWQNPRNHFRCQVQFYGLSENDEWTQDRAKPVTQIVSAEAWGRADCGFTSESYQQGVLSATILYEILLGKATLYAVLVSALVLMAMVKRKDSRGRAKRSGSGATNFSLLKQAGDVEENPGPTSMDWIWRILFLVGAATGAHSFEEVQLQQSGPELVKPGTSVRISCKTSGYTFTEYTIHWVKQSHGKSLEWIGNINPNNGGTTYNQKFEDKATLTVDKSSSTAYMELRSLTSEDSAVYYCAAGWNFDYWGQGTTLTVSSTRIQNPDPAVYQLRDSKSSDKSVCLFTDFDSQTNVSQSKDSDVYITDKCVLDMRSMDFKSNSAVAWSNKSDFACANAFNNSIIPEDTFFPSPESSCDVKLVEKSFETDTNLNFQNLSVIGFRILLLKVAGFNLLMTLRLWSS

SEQ ID NO: 20433 - protein, 755 aa, Artificial Sequence
  Synthetic Polypeptide
MALPVTALLLPLALLLHAARPEVQLVESGGGLVQPGGSLRLSCAASGFSFSDFWMSWVRQAPGKGLEWVATISQAGSEKDYVDSVKGRFTISRDNAKKSLYLQMNSLRAEDTAVYYCASGVYSFDYRGQGTLVTVSSGTGGGGSGGGGSGGGGSEFDIVMTQSHKFMSTSVGDRVSIICKASQDVGTAVDWYQQKPGQSPKLLIYWASTRHTGVPDRFTGSGSGTDFTLAITNVQSEDLADYFCQQYNSYPLTFGAGTKLEIKRLEIQNPDPAVYQLRDSKSSDKSVCLFTDFDSQTNVSQSKDSDVYITDKCVLDMRSMDFKSNSAVAWSNKSDFACANAFNNSIIPEDTFFPSPESSCDVKLVEKSFETDTNLNFQNLSVIGFRILLLKVAGFNLLMTLRLWSSRAKRSGSGVKQTLNFDLLKLAGDVESNPGPTSMDWIWRILFLVGAATGAHSFEEVQLQQSGPELVKPGTSVRISCKTSGYTFTEYTIHWVKQSHGKSLEWIGNINPNNGGTTYNQKFEDKATLTVDKSSSTAYMELRSLTSEDSAVYYCAAGWNFDYWGQGTTLTVSSTREDLKNVFPPEVAVFEPSEAEISHTQKATLVCLATGFYPDHVELSWWVNGKEVHSGVCTDPQPLKEQPALNDSRYCLSSRLRVSATFWQNPRNHFRCQVQFYGLSENDEWTQDRAKPVTQIVSAEAWGRADCGFTSESYQQGVLSATILYEILLGKATLYAVLVSALVLMAMVKRKDSRG

SEQ ID NO: 20434 - protein, 947 aa, Artificial Sequence
  Synthetic Polypeptide
MALPVTALLLPLALLLHAARPEVQLVESGGGLVQPGGSLRLSCAASGFSFSDFWMSWVRQAPGKGLEWVATISQAGSEKDYVDSVKGRFTISRDNAKKSLYLQMNSLRAEDTAVYYCASGVYSFDYRGQGTLVTVSSGTGGGGSGGGGSGGGGSEFDIVMTQSHKFMSTSVGDRVSIICKASQDVGTAVDWYQQKPGQSPKLLIYWASTRHTGVPDRFTGSGSGTDFTLAITNVQSEDLADYFCQQYNSYPLTFGAGTKLEIKRLEDLKNVFPPEVAVFEPSEAEISHTQKATLVCLATGFYPDHVELSWWVNGKEVHSGVSTDPQPLKEQPALNDSRYCLSSRLRVSATFWQNPRNHFRCQVQFYGLSENDEWTQDRAKPVTQIVSAEAWGRADCGSQSFGLLDPKLCYLLDGILFIYGVILTALFLRVKFSRSADAPAYQQGQNQLYNELNLGRREEYDVLDKRRGRDPEMGGKPQRRKNPQEGLYNELQKDKMAEAYSEIGMKGERRRGKGHDGLYQGLSTATKDTYDALHMQALPPRRAKRSGSGATNFSLLKQAGDVEENPGPTSMDWIWRILFLVGAATGAHSFEEVQLQQSGPELVKPGTSVRISCKTSGYTFTEYTIHWVKQSHGKSLEWIGNINPNNGGTTYNQKFEDKATLTVDKSSSTAYMELRSLTSEDSAVYYCAAGWNFDYWGQGTTLTVSSTRIQNPDPAVYQLRDSKSSDKSVCLFTDFDSQTNVSQSKDSDVYITDKTVLDMRSMDFKSNSAVAWSNKSDFACANAFNNSIIPEDTFFPSPESSCGTQSFGLLDPKLCYLLDGILFIYGVILTALFLRVKFSRSADAPAYQQGQNQLYNELNLGRREEYDVLDKRRGRDPEMGGKPQRRKNPQEGLYNELQKDKMAEAYSEIGMKGERRRGKGHDGLYQGLSTATKDTYDALHMQALPPR

SEQ ID NO: 20435 - protein, 777 aa, Artificial Sequence
  Synthetic Polypeptide
MALPVTALLLPLALLLHAARPEVQLVESGGGLVQPGGSLRLSCAASGFSFSDFWMSWVRQAPGKGLEWVATISQAGSEKDYVDSVKGRFTISRDNAKKSLYLQMNSLRAEDTAVYYCASGVYSFDYRGQGTLVTVSSGTGGGGSGGGGSGGGGSEFDIVMTQSHKFMSTSVGDRVSIICKASQDVGTAVDWYQQKPGQSPKLLIYWASTRHTGVPDRFTGSGSGTDFTLAITNVQSEDLADYFCQQYNSYPLTFGAGTKLEIKRLEGQPKANPTVTLFPPSSEELQANKATLVCLISDFYPGAVTVAWKADGSPVKAGVETTKPSKQSNNKYAASSYLSLTPEQWKSHRSYSCQVTHEGSTVEKTVAPTECSPIKTDVITMDPKDNCSKDANDTLLLQLTNTSAYYMYLLLLLKSVVYFAIITCCLLRRTAFCCNGEKSRAKRSGSGATNFSLLKQAGDVEENPGPTSMDWIWRILFLVGAATGAHSFEEVQLQQSGPELVKPGTSVRISCKTSGYTFTEYTIHWVKQSHGKSLEWIGNINPNNGGTTYNQKFEDKATLTVDKSSSTAYMELRSLTSEDSAVYYCAAGWNFDYWGQGTTLTVSSTRASTKGPSVFPLAPSSKSTSGGTAALGCLVKDYFPEPVTVSWNSGALTSGVHTFPAVLQSSGLYSLSSVVTVPSSSLGTQTYICNVNHKPSNTKVDKRVEPKSCEVKTDSTDHVKPKETENTKQPSKSCHKPKAIVHTEKVNMMSLTVLGLRMLFAKTVAVNFLLTAKLFFL

SEQ ID NO: 20436 - protein, 758 aa, Artificial Sequence
  Synthetic Polypeptide
MALPVTALLLPLALLLHAARPEVQLVESGGGLVQPGGSLRLSCAASGFSFSDFWMSWVRQAPGKGLEWVATISQAGSEKDYVDSVKGRFTISRDNAKKSLYLQMNSLRAEDTAVYYCASGVYSFDYRGQGTLVTVSSGTGGGGSGGGGSGGGGSEFDIVMTQSHKFMSTSVGDRVSIICKASQDVGTAVDWYQQKPGQSPKLLIYWASTRHTGVPDRFTGSGSGTDFTLAITNVQSEDLADYFCQQYNSYPLTFGAGTKLEIKRLEGQPKANPTVTLFPPSSEELQANKATLVCLISDFYPGAVTVAWKADGSPVKAGVETTKPSKQSNNKYAASSYLSLTPEQWKSHRSYSCQVTHEGSTVEKTVAPTECSGRADCGFTSESYQQGVLSATILYEILLGKATLYAVLVSALVLMAMVKRKDSRGRAKRSGSGVKQTLNFDLLKLAGDVESNPGPTSMDWIWRILFLVGAATGAHSFEEVQLQQSGPELVKPGTSVRISCKTSGYTFTEYTIHWVKQSHGKSLEWIGNINPNNGGTTYNQKFEDKATLTVDKSSSTAYMELRSLTSEDSAVYYCAAGWNFDYWGQGTTLTVSSTRASTKGPSVFPLAPSSKSTSGGTAALGCLVKDYFPEPVTVSWNSGALTSGVHTFPAVLQSSGLYSLSSVVTVPSSSLGTQTYICNVNHKPSNTKVDKRVEPKSCIPEDTFFPSPESSCDVKLVEKSFETDTNLNFQNLSVIGFRILLLKVAGFNLLMTLRLWSS

SEQ ID NO: 20437 - protein, 892 aa, Artificial Sequence
  Synthetic Polypeptide
MALPVTALLLPLALLLHAARPEVQLVESGGGLVQPGGSLRLSCAASGFSFSDFWMSWVRQAPGKGLEWVATISQAGSEKDYVDSVKGRFTISRDNAKKSLYLQMNSLRAEDTAVYYCASGVYSFDYRGQGTLVTVSSGTGGGGSGGGGSGGGGSEFDIVMTQSHKFMSTSVGDRVSIICKASQDVGTAVDWYQQKPGQSPKLLIYWASTRHTGVPDRFTGSGSGTDFTLAITNVQSEDLADYFCQQYNSYPLTFGAGTKLEIKRLEIQNPDPAVYQLRDSKSSDKSVCLFTDFDSQTNVSQSKDSDVYITDKCVLDMRSMDFKSNSAVAWSNKSDFACANAFNNSIIPEDTFFPSPESSCDVKLVEKSFETDTNLNFQNLSVIGFRILLLKVAGFNLLMTLRLWSSRAKRSGSGVKQTLNFDLLKLAGDVESNPGPTSMDWIWRILFLVGAATGAHSGPQLQLQESGPGLVKPSETLSLTCTVSGDSISSGDYYWGWIRQPPGKGLEWIGHIYYSGVTYYNPSLKSRVTISVDTSRNQFSLKLSSVTAADTAVYYCTREDSSNWRSRGQGTLVTVSSGSGGGGSGGGGSGGGGSFEEVQLQQSGPELVKPGTSVRISCKTSGYTFTEYTIHWVKQSHGKSLEWIGNINPNNGGTTYNQKFEDKATLTVDKSSSTAYMELRSLTSEDSAVYYCAAGWNFDYWGQGTTLTVSSTREDLKNVFPPEVAVFEPSEAEISHTQKATLVCLATGFYPDHVELSWWVNGKEVHSGVCTDPQPLKEQPALNDSRYCLSSRLRVSATFWQNPRNHFRCQVQFYGLSENDEWTQDRAKPVTQIVSAEAWGRADCGFTSESYQQGVLSATILYEILLGKATLYAVLVSALVLMAMVKRKDSRG

SEQ ID NO: 20438 - protein, 1084 aa, Artificial Sequence
  Synthetic Polypeptide
MALPVTALLLPLALLLHAARPEVQLVESGGGLVQPGGSLRLSCAASGFSFSDFWMSWVRQAPGKGLEWVATISQAGSEKDYVDSVKGRFTISRDNAKKSLYLQMNSLRAEDTAVYYCASGVYSFDYRGQGTLVTVSSGTGGGGSGGGGSGGGGSEFDIVMTQSHKFMSTSVGDRVSIICKASQDVGTAVDWYQQKPGQSPKLLIYWASTRHTGVPDRFTGSGSGTDFTLAITNVQSEDLADYFCQQYNSYPLTFGAGTKLEIKRLEDLKNVFPPEVAVFEPSEAEISHTQKATLVCLATGFYPDHVELSWWVNGKEVHSGVSTDPQPLKEQPALNDSRYCLSSRLRVSATFWQNPRNHFRCQVQFYGLSENDEWTQDRAKPVTQIVSAEAWGRADCGSQSFGLLDPKLCYLLDGILFIYGVILTALFLRVKFSRSADAPAYQQGQNQLYNELNLGRREEYDVLDKRRGRDPEMGGKPQRRKNPQEGLYNELQKDKMAEAYSEIGMKGERRRGKGHDGLYQGLSTATKDTYDALHMQALPPRRAKRSGSGATNFSLLKQAGDVEENPGPTSMDWIWRILFLVGAATGAHSGPQLQLQESGPGLVKPSETLSLTCTVSGDSISSGDYYWGWIRQPPGKGLEWIGHIYYSGVTYYNPSLKSRVTISVDTSRNQFSLKLSSVTAADTAVYYCTREDSSNWRSRGQGTLVTVSSGSGGGGSGGGGSGGGGSFEEVQLQQSGPELVKPGTSVRISCKTSGYTFTEYTIHWVKQSHGKSLEWIGNINPNNGGTTYNQKFEDKATLTVDKSSSTAYMELRSLTSEDSAVYYCAAGWNFDYWGQGTTLTVSSTRIQNPDPAVYQLRDSKSSDKSVCLFTDFDSQTNVSQSKDSDVYITDKTVLDMRSMDFKSNSAVAWSNKSDFACANAFNNSIIPEDTFFPSPESSCGTQSFGLLDPKLCYLLDGILFIYGVILTALFLRVKFSRSADAPAYQQGQNQLYNELNLGRREEYDVLDKRRGRDPEMGGKPQRRKNPQEGLYNELQKDKMAEAYSEIGMKGERRRGKGHDGLYQGLSTATKDTYDALHMQALPPR

SEQ ID NO: 20439 - protein, 914 aa, Artificial Sequence
  Synthetic Polypeptide
MALPVTALLLPLALLLHAARPEVQLVESGGGLVQPGGSLRLSCAASGFSFSDFWMSWVRQAPGKGLEWVATISQAGSEKDYVDSVKGRFTISRDNAKKSLYLQMNSLRAEDTAVYYCASGVYSFDYRGQGTLVTVSSGTGGGGSGGGGSGGGGSEFDIVMTQSHKFMSTSVGDRVSIICKASQDVGTAVDWYQQKPGQSPKLLIYWASTRHTGVPDRFTGSGSGTDFTLAITNVQSEDLADYFCQQYNSYPLTFGAGTKLEIKRLEGQPKANPTVTLFPPSSEELQANKATLVCLISDFYPGAVTVAWKADGSPVKAGVETTKPSKQSNNKYAASSYLSLTPEQWKSHRSYSCQVTHEGSTVEKTVAPTECSPIKTDVITMDPKDNCSKDANDTLLLQLTNTSAYYMYLLLLLKSVVYFAIITCCLLRRTAFCCNGEKSRAKRSGSGATNFSLLKQAGDVEENPGPTSMDWIWRILFLVGAATGAHSGPQLQLQESGPGLVKPSETLSLTCTVSGDSISSGDYYWGWIRQPPGKGLEWIGHIYYSGVTYYNPSLKSRVTISVDTSRNQFSLKLSSVTAADTAVYYCTREDSSNWRSRGQGTLVTVSSGSGGGGSGGGGSGGGGSFEEVQLQQSGPELVKPGTSVRISCKTSGYTFTEYTIHWVKQSHGKSLEWIGNINPNNGGTTYNQKFEDKATLTVDKSSSTAYMELRSLTSEDSAVYYCAAGWNFDYWGQGTTLTVSSTRASTKGPSVFPLAPSSKSTSGGTAALGCLVKDYFPEPVTVSWNSGALTSGVHTFPAVLQSSGLYSLSSVVTVPSSSLGTQTYICNVNHKPSNTKVDKRVEPKSCEVKTDSTDHVKPKETENTKQPSKSCHKPKAIVHTEKVNMMSLTVLGLRMLFAKTVAVNFLLTAKLFFL

SEQ ID NO: 20440 - protein, 895 aa, Artificial Sequence
  Synthetic Polypeptide
MALPVTALLLPLALLLHAARPEVQLVESGGGLVQPGGSLRLSCAASGFSFSDFWMSWVRQAPGKGLEWVATISQAGSEKDYVDSVKGRFTISRDNAKKSLYLQMNSLRAEDTAVYYCASGVYSFDYRGQGTLVTVSSGTGGGGSGGGGSGGGGSEFDIVMTQSHKFMSTSVGDRVSIICKASQDVGTAVDWYQQKPGQSPKLLIYWASTRHTGVPDRFTGSGSGTDFTLAITNVQSEDLADYFCQQYNSYPLTFGAGTKLEIKRLEGQPKANPTVTLFPPSSEELQANKATLVCLISDFYPGAVTVAWKADGSPVKAGVETTKPSKQSNNKYAASSYLSLTPEQWKSHRSYSCQVTHEGSTVEKTVAPTECSGRADCGFTSESYQQGVLSATILYEILLGKATLYAVLVSALVLMAMVKRKDSRGRAKRSGSGVKQTLNFDLLKLAGDVESNPGPTSMDWIWRILFLVGAATGAHSGPQLQLQESGPGLVKPSETLSLTCTVSGDSISSGDYYWGWIRQPPGKGLEWIGHIYYSGVTYYNPSLKSRVTISVDTSRNQFSLKLSSVTAADTAVYYCTREDSSNWRSRGQGTLVTVSSGSGGGGSGGGGSGGGGSFEEVQLQQSGPELVKPGTSVRISCKTSGYTFTEYTIHWVKQSHGKSLEWIGNINPNNGGTTYNQKFEDKATLTVDKSSSTAYMELRSLTSEDSAVYYCAAGWNFDYWGQGTTLTVSSTRASTKGPSVFPLAPSSKSTSGGTAALGCLVKDYFPEPVTVSWNSGALTSGVHTFPAVLQSSGLYSLSSVVTVPSSSLGTQTYICNVNHKPSNTKVDKRVEPKSCIPEDTFFPSPESSCDVKLVEKSFETDTNLNFQNLSVIGFRILLLKVAGFNLLMTLRLWSS

SEQ ID NO: 20441 - protein, 752 aa, Artificial Sequence
  Synthetic Polypeptide
MALPVTALLLPLALLLHAARPEVQVLESGGGLVQPGGSLRLSCAASGFTFSNFAMSWVRQAPGKGLEWVSTISGSAGTTDYADSVKGRFTISRDNSKKTLYLQMNSLRVEDTAVYYCADGRGPFFDYRGQGTLVTVSSGTGGGGSGGGGSGGGGSEFDIVMTQSHKFMSTSVGDRVSIICKASQDVGTAVDWYQQKPGQSPKLLIYWASTRHTGVPDRFTGSGSGTDFTLAITNVQSEDLADYFCQQYNSYPLTFGAGTKLEIKRLEDLKNVFPPEVAVFEPSEAEISHTQKATLVCLATGFYPDHVELSWWVNGKEVHSGVCTDPQPLKEQPALNDSRYCLSSRLRVSATFWQNPRNHFRCQVQFYGLSENDEWTQDRAKPVTQIVSAEAWGRADCGFTSESYQQGVLSATILYEILLGKATLYAVLVSALVLMAMVKRKDSRGRAKRSGSGATNFSLLKQAGDVEENPGPTSMDWIWRILFLVGAATGAHSFEEVQLQQSGPELVKPGTSVRISCKTSGYTFTEYTIHWVKQSHGKSLEWIGNINPNNGGTTYNQKFEDKATLTVDKSSSTAYMELRSLTSEDSAVYYCAAGWNFDYWGQGTTLTVSSTRIQNPDPAVYQLRDSKSSDKSVCLFTDFDSQTNVSQSKDSDVYITDKCVLDMRSMDFKSNSAVAWSNKSDFACANAFNNSIIPEDTFFPSPESSCDVKLVEKSFETDTNLNFQNLSVIGFRILLLKVAGFNLLMTLRLWSS

SEQ ID NO: 20442 - protein, 753 aa, Artificial Sequence
  Synthetic Polypeptide
MALPVTALLLPLALLLHAARPDIVMTQSHKFMSTSVGDRVSIICKASQDVGTAVDWYQQKPGQSPKLLIYWASTRHTGVPDRFTGSGSGTDFTLAITNVQSEDLADYFCQQYNSYPLTFGAGTKLEIKRLEDLKNVFPPEVAVFEPSEAEISHTQKATLVCLATGFYPDHVELSWWVNGKEVHSGVCTDPQPLKEQPALNDSRYCLSSRLRVSATFWQNPRNHFRCQVQFYGLSENDEWTQDRAKPVTQIVSAEAWGRADCGFTSESYQQGVLSATILYEILLGKATLYAVLVSALVLMAMVKRKDSRGRAKRSGSGATNFSLLKQAGDVEENPGPTSMDWIWRILFLVGAATGAHSGPEVQLVESGGGLVQAGGSLRLSCAASGRTFSMGWFRQAPGKEREFVAAITYSGGSPYYADSVKGRFTISRDNAKNTVYLQMNSLKPEDTAVYYCAANPTYGSDWNAENWGQGTQVTVSSGSGGGGSGGGGSGGGGSFEEVQLQQSGPELVKPGTSVRISCKTSGYTFTEYTIHWVKQSHGKSLEWIGNINPNNGGTTYNQKFEDKATLTVDKSSSTAYMELRSLTSEDSAVYYCAAGWNFDYWGQGTTLTVSSTRIQNPDPAVYQLRDSKSSDKSVCLFTDFDSQTNVSQSKDSDVYITDKCVLDMRSMDFKSNSAVAWSNKSDFACANAFNNSIIPEDTFFPSPESSCDVKLVEKSFETDTNLNFQNLSVIGFRILLLKVAGFNLLMTLRLWSS

SEQ ID NO: 20443 - protein, 880 aa, Artificial Sequence
  Synthetic Polypeptide
MALPVTALLLPLALLLHAARPDIVMTQSHKFMSTSVGDRVSIICKASQDVGTAVDWYQQKPGQSPKLLIYWASTRHTGVPDRFTGSGSGTDFTLAITNVQSEDLADYFCQQYNSYPLTFGAGTKLEIKRLEDLKNVFPPEVAVFEPSEAEISHTQKATLVCLATGFYPDHVELSWWVNGKEVHSGVCTDPQPLKEQPALNDSRYCLSSRLRVSATFWQNPRNHFRCQVQFYGLSENDEWTQDRAKPVTQIVSAEAWGRADCGFTSESYQQGVLSATILYEILLGKATLYAVLVSALVLMAMVKRKDSRGRAKRSGSGATNFSLLKQAGDVEENPGPTSMDWIWRILFLVGAATGAHSQLQLQESGPGLVKPSETLSLTCTVSGGSISSGDYYWGWIRQPPGKGLEWIGSISYSGSTYYNPSLKSRVTISVDTSRNQFSLKLSSVTAADTAVYYCTREDSSNWRSRGQGTLVTVSSSGGGGSGGGGSEVQLVESGGGLVQAGGSLRLSCAASGRTFSMGWFRQAPGKEREFVAAITYSGGSPYYADSVKGRFTISRDNAKNTVYLQMNSLKPEDTAVYYCAANPTYGSDWNAENWGQGTQVTVSSGSGGGGSGGGGSGGGGSFEEVQLQQSGPELVKPGTSVRISCKTSGYTFTEYTIHWVKQSHGKSLEWIGNINPNNGGTTYNQKFEDKATLTVDKSSSTAYMELRSLTSEDSAVYYCAAGWNFDYWGQGTTLTVSSTRIQNPDPAVYQLRDSKSSDKSVCLFTDFDSQTNVSQSKDSDVYITDKCVLDMRSMDFKSNSAVAWSNKSDFACANAFNNSIIPEDTFFPSPESSCDVKLVEKSFETDTNLNFQNLSVIGFRILLLKVAGFNLLMTLRLWSS

SEQ ID NO: 20444 - protein, 889 aa, Artificial Sequence
  Synthetic Polypeptide
MALPVTALLLPLALLLHAARPEVQVLESGGGLVQPGGSLRLSCAASGFTFSNFAMSWVRQAPGKGLEWVSTISGSAGTTDYADSVKGRFTISRDNSKKTLYLQMNSLRVEDTAVYYCADGRGPFFDYRGQGTLVTVSSGTGGGGSGGGGSGGGGSEFDIVMTQSHKFMSTSVGDRVSIICKASQDVGTAVDWYQQKPGQSPKLLIYWASTRHTGVPDRFTGSGSGTDFTLAITNVQSEDLADYFCQQYNSYPLTFGAGTKLEIKRLEDLKNVFPPEVAVFEPSEAEISHTQKATLVCLATGFYPDHVELSWWVNGKEVHSGVCTDPQPLKEQPALNDSRYCLSSRLRVSATFWQNPRNHFRCQVQFYGLSENDEWTQDRAKPVTQIVSAEAWGRADCGFTSESYQQGVLSATILYEILLGKATLYAVLVSALVLMAMVKRKDSRGRAKRSGSGATNFSLLKQAGDVEENPGPTSMDWIWRILFLVGAATGAHSGPEVQLVESGGGLVQAGGSLRLSCAASGRTFSMGWFRQAPGKEREFVAAITYSGGSPYYASSVRGRFTISRDNAKNTVYLQMNSLKPEDTAVYYCAANPTYGSDWNAENWGQGTQVTVSSGSGGGGSGGGGSGGGGSFEEVQLQQSGPELVKPGTSVRISCKTSGYTFTEYTIHWVKQSHGKSLEWIGNINPNNGGTTYNQKFEDKATLTVDKSSSTAYMELRSLTSEDSAVYYCAAGWNFDYWGQGTTLTVSSTRIQNPDPAVYQLRDSKSSDKSVCLFTDFDSQTNVSQSKDSDVYITDKCVLDMRSMDFKSNSAVAWSNKSDFACANAFNNSIIPEDTFFPSPESSCDVKLVEKSFETDTNLNFQNLSVIGFRILLLKVAGFNLLMTLRLWSS

SEQ ID NO: 20445 - protein, 720 aa, Artificial Sequence
  Synthetic Polypeptide
MALPVTALLLPLALLLHAARPDIQMTQSPSSLSASVGDRVTITCKASQDVGTAVDWYQQKPGKAPKLLIYWASTRHTGVPSRFSGSGSGTDFTLTISSLQPEDFATYYCQQYNSYPLTFGQGTKVEIKRGGGGSGGGGSGGGGSEVQLVESGGGLVQPGGSLRLSCAASGYTFTEYTIHWVRQAPGKGLEWVANINPNNGGTTYNQKFEDRFTISRDNSKNTLYLQMNSLRAEDTAVYYCARGWNFDYWGQGTLVTVSSTREQKLISEEDLAKPTTTPAPRPPTPAPTIASQPLSLRPEACRPAAGGAVHTRGLDFACDIYIWAPLAGTCGVLLLSLVITLYCKRGRKKLLYIFKQPFMRPVQTTQEEDGCSCRFPEEEEGGCELRVKFSRSADAPAYQQGQNQLYNELNLGRREEYDVLDKRRGRDPEMGGKPRRKNPQEGLYNELQKDKMAEAYSEIGMKGERRRGKGHDGLYQGLSTATKDTYDALHMQALPPRSSGSGEGRGSLLTCGDVEENPGPHMTEYKPTVRLATRDDVPRAVRTLAAAFADYPATRHTVDPDRHIERVTELQELFLTRVGLDIGKVWVADDGAAVAVWTTPESVEAGAVFAEIGPRMAELSGSRLAAQQQMEGLLAPHRPKEPAWFLATVGVSPDHQGKGLGSAVVLPGVEAAERAGVPAFLETSAPRNLPFYERLGFTVTADVEVPEGPRTWCMTRKPGA

SEQ ID NO: 20446 - protein, 714 aa, Artificial Sequence
  Synthetic Polypeptide
MALPVTALLLPLALLLHAARPDIQMTQSPSSLSASVGDRVTITCKASQDVGTAVDWYQQKPGKAPKLLIYWASTRHTGVPSRFSGSGSGTDFTLTISSLQPEDFATYYCQQYNSYPLTFGQGTKVEIKRGGGGSGGGGSGGGGSEVQLVESGGGLVQPGGSLRLSCAASGYTFTEYTIHWVRQAPGKGLEWVANINPNNGGTTYNQKFEDRFTISRDNSKNTLYLQMNSLRAEDTAVYYCARGWNFDYWGQGTLVTVSSTREQKLISEEDLKIEVMYPPPYLDNEKSNGTIIHVKGKHLCPSPLFPGPSKPFWVLVVVGGVLACYSLLVTVAFIIFWVRSKRSRLLHSDYMNMTPRRPGPTRKHYQPYAPPRDFAAYRSRVKFSRSADAPAYQQGQNQLYNELNLGRREEYDVLDKRRGRDPEMGGKPRRKNPQEGLYNELQKDKMAEAYSEIGMKGERRRGKGHDGLYQGLSTATKDTYDALHMQALPPRSSGSGEGRGSLLTCGDVEENPGPHMTEYKPTVRLATRDDVPRAVRTLAAAFADYPATRHTVDPDRHIERVTELQELFLTRVGLDIGKVWVADDGAAVAVWTTPESVEAGAVFAEIGPRMAELSGSRLAAQQQMEGLLAPHRPKEPAWFLATVGVSPDHQGKGLGSAVVLPGVEAAERAGVPAFLETSAPRNLPFYERLGFTVTADVEVPEGPRTWCMTRKPGA

SEQ ID NO: 20447 - protein, 491 aa, Artificial Sequence
  Synthetic Polypeptide
MALPVTALLLPLALLLHAARPDIQMTQSPSSLSASVGDRVTITCKASQDVGTAVDWYQQKPGKAPKLLIYWASTRHTGVPSRFSGSGSGTDFTLTISSLQPEDFATYYCQQYNSYPLTFGQGTKVEIKRGGGGSGGGGSGGGGSEVQLVESGGGLVQPGGSLRLSCAASGYTFTEYTIHWVRQAPGKGLEWVANINPNNGGTTYNQKFEDRFTISRDNSKNTLYLQMNSLRAEDTAVYYCARGWNFDYWGQGTLVTVSSTREQKLISEEDLKIEVMYPPPYLDNEKSNGTIIHVKGKHLCPSPLFPGPSKPFWVLVVVGGVLACYSLLVTVAFIIFWVRSKRSRLLHSDYMNMTPRRPGPTRKHYQPYAPPRDFAAYRSRVKFSRSADAPAYQQGQNQLYNELNLGRREEYDVLDKRRGRDPEMGGKPRRKNPQEGLYNELQKDKMAEAYSEIGMKGERRRGKGHDGLYQGLSTATKDTYDALHMQALPPR

SEQ ID NO: 20448 - protein, 497 aa, Artificial Sequence
  Synthetic Polypeptide
MALPVTALLLPLALLLHAARPDIQMTQSPSSLSASVGDRVTITCKASQDVGTAVDWYQQKPGKAPKLLIYWASTRHTGVPSRFSGSGSGTDFTLTISSLQPEDFATYYCQQYNSYPLTFGQGTKVEIKRGGGGSGGGGSGGGGSEVQLVESGGGLVQPGGSLRLSCAASGYTFTEYTIHWVRQAPGKGLEWVANINPNNGGTTYNQKFEDRFTISRDNSKNTLYLQMNSLRAEDTAVYYCARGWNFDYWGQGTLVTVSSTREQKLISEEDLAKPTTTPAPRPPTPAPTIASQPLSLRPEACRPAAGGAVHTRGLDFACDIYIWAPLAGTCGVLLLSLVITLYCKRGRKKLLYIFKQPFMRPVQTTQEEDGCSCRFPEEEEGGCELRVKFSRSADAPAYQQGQNQLYNELNLGRREEYDVLDKRRGRDPEMGGKPRRKNPQEGLYNELQKDKMAEAYSEIGMKGERRRGKGHDGLYQGLSTATKDTYDALHMQALPPR

SEQ ID NO: 20449 - protein, 497 aa, Artificial Sequence
  Synthetic Polypeptide
MALPVTALLLPLALLLHAARPEVQLVESGGGLVQPGGSLRLSCAASGYTFTEYTIHWVRQAPGKGLEWVANINPNNGGTTYNQKFEDRFTISRDNSKNTLYLQMNSLRAEDTAVYYCARGWNFDYWGQGTLVTVSSGGGGSGGGGSGGGGSDIQMTQSPSSLSASVGDRVTITCKASQDVGTAVDWYQQKPGKAPKLLIYWASTRHTGVPSRFSGSGSGTDFTLTISSLQPEDFATYYCQQYNSYPLTFGQGTKVEIKRTREQKLISEEDLAKPTTTPAPRPPTPAPTIASQPLSLRPEACRPAAGGAVHTRGLDFACDIYIWAPLAGTCGVLLLSLVITLYCKRGRKKLLYIFKQPFMRPVQTTQEEDGCSCRFPEEEEGGCELRVKFSRSADAPAYQQGQNQLYNELNLGRREEYDVLDKRRGRDPEMGGKPRRKNPQEGLYNELQKDKMAEAYSEIGMKGERRRGKGHDGLYQGLSTATKDTYDALHMQALPPR

SEQ ID NO: 20450 - protein, 910 aa, Artificial Sequence
  Synthetic Polypeptide
MALPVTALLLPLALLLHAARPDIQMTQSPSSLSASVGDRVTITCKASQDVGTAVDWYQQKPGKAPKLLIYWASTRHTGVPSRFSGSGSGTDFTLTISSLQPEDFATYYCQQYNSYPLTFGQGTKVEIKRGGGGSGGGGSGGGGSEVQLVESGGGLVQPGGSLRLSCAASGYTFTEYTIHWVRQAPGKGLEWVANINPNNGGTTYNQKFEDRFTISRDNSKNTLYLQMNSLRAEDTAVYYCARGWNFDYWGQGTLVTVSSTREQKLISEEDLAKPTTTPAPRPPTPAPTIASQPLSLRPEACRPAAGGAVHTRGLDFACDIYIWAPLAGTCGVLLLSLVITLYCGRARVKFSRSADAPAYQQGQNQLYNELNLGRREEYDVLDKRRGRDPEMGGKPRRKNPQEGLYNELQKDKMAEAYSEIGMKGERRRGKGHDGLYQGLSTATKDTYDALHMQALPPRSRGSGATNFSLLKQAGDVEENPGPGIHMATYEVLCEVARKLGTDDREVVLFLLNVFIPQPTLAQLIGALRALKEEGRLTFPLLAECLFRAGRRDLLRDLLHLDPRFLERHLAGTMSYFSPYQLTVLHVDGELCARDIRSLIFLSKDTIGSRSTPQTFLHWVYCMENLDLLGPTDVDALMSMLRSLSRVDLQRQVQTLMGLHLSGPSHSQHYRHTPLETDFYDYKDDDDKTSGSGEGRGSLLTCGDVEENPGPHMTEYKPTVRLATRDDVPRAVRTLAAAFADYPATRHTVDPDRHIERVTELQELFLTRVGLDIGKVWVADDGAAVAVWTTPESVEAGAVFAEIGPRMAELSGSRLAAQQQMEGLLAPHRPKEPAWFLATVGVSPDHQGKGLGSAVVLPGVEAAERAGVPAFLETSAPRNLPFYERLGFTVTADVEVPEGPRTWCMTRKPGA

SEQ ID NO: 20451 - protein, 850 aa, Artificial Sequence
  Synthetic Polypeptide
MALPVTALLLPLALLLHAARPDIQMTQSPSSLSASVGDRVTITCKASQDVGTAVDWYQQKPGKAPKLLIYWASTRHTGVPSRFSGSGSGTDFTLTISSLQPEDFATYYCQQYNSYPLTFGQGTKVEIKRLEIQNPDPAVYQLRDSKSSDKSVCLFTDFDSQTNVSQSKDSDVYITDKCVLDMRSMDFKSNSAVAWSNKSDFACANAFNNSIIPEDTFFPSSDVPCDVKLVEKSFETDTNLNFQNLSVIGFRILLLKVAGFNLLMTLRLWSSRAKRSGSGVKQTLNFDLLKLAGDVESNPGPTSMDWIWRILFLVGAATGAHSFEEVQLVESGGGLVQPGGSLRLSCAASGYTFTEYTIHWVRQAPGKGLEWVANINPNNGGTTYNQKFEDRFTISRDNSKNTLYLQMNSLRAEDTAVYYCARGWNFDYWGQGTLVTVSSTREDLKNVFPPEVAVFEPSKAEIAHTQKATLVCLATGFYPDHVELSWWVNGKEVHSGVCTDPQPLKEQPALNDSRYCLSSRLRVSATFWQNPRNHFRCQVQFYGLSENDEWTQDRAKPVTQIVSAEAWGRADCGITSASYHQGVLSATILYEILLGKATLYAVLVSALVLMAMVKRKDSRGRAKRSGSGATNFSLLKQAGDVEENPGPSRGHMTEYKPTVRLATRDDVPRAVRTLAAAFADYPATRHTVDPDRHIERVTELQELFLTRVGLDIGKVWVADDGAAVAVWTTPESVEAGAVFAEIGPRMAELSGSRLAAQQQMEGLLAPHRPKEPAWFLATVGVSPDHQGKGLGSAVVLPGVEAAERAGVPAFLETSAPRNLPFYERLGFTVTADVEVPEGPRTWCMTRKPGA

SEQ ID NO: 20452 - protein, 849 aa, Artificial Sequence
  Synthetic Polypeptide
MALPVTALLLPLALLLHAARPDIQMTQSPSSLSASVGDRVTITCKASQDVGTAVDWYQQKPGKAPKLLIYWASTRHTGVPSRFSGSGSGTDFTLTISSLQPEDFATYYCQQYNSYPLTFGQGTKVEIKRLEDLKNVFPPEVAVFEPSKAEIAHTQKATLVCLATGFYPDHVELSWWVNGKEVHSGVCTDPQPLKEQPALNDSRYCLSSRLRVSATFWQNPRNHFRCQVQFYGLSENDEWTQDRAKPVTQIVSAEAWGRADCGITSASYHQGVLSATILYEILLGKATLYAVLVSALVLMAMVKRKDSRGRAKRSGSGATNFSLLKQAGDVEENPGPTSMDWIWRILFLVGAATGAHSFEEVQLVESGGGLVQPGGSLRLSCAASGYTFTEYTIHWVRQAPGKGLEWVANINPNNGGTTYNQKFEDRFTISRDNSKNTLYLQMNSLRAEDTAVYYCARGWNFDYWGQGTLVTVSSTRIQNPDPAVYQLRDSKSSDKSVCLFTDFDSQTNVSQSKDSDVYITDKCVLDMRSMDFKSNSAVAWSNKSDFACANAFNNSIIPEDTFFPSSDVPCDVKLVEKSFETDTNLNFQNLSVIGFRILLLKVAGFNLLMTLRLWSSRAKRSGSGVKQTLNFDLLKLAGDVESNPGPSRGHMTEYKPTVRLATRDDVPRAVRTLAAAFADYPATRHTVDPDRHIERVTELQELFLTRVGLDIGKVWVADDGAAVAVWTTPESVEAGAVFAEIGPRMAELSGSRLAAQQQMEGLLAPHRPKEPAWFLATVGVSPDHQGKGLGSAVVLPGVEAAERAGVPAFLETSAPRNLPFYERLGFTVTADVEVPEGPRTWCMTRKPGA

SEQ ID NO: 20453 - protein, 616 aa, Artificial Sequence
  Synthetic Polypeptide
MALPVTALLLPLALLLHAARPDIQMTQSPSSLSASVGDRVTITCKASQDVGTAVDWYQQKPGKAPKLLIYWASTRHTGVPSRFSGSGSGTDFTLTISSLQPEDFATYYCQQYNSYPLTFGQGTKVEIKRLEDLKNVFPPEVAVFEPSEAEISHTQKATLVCLATGFYPDHVELSWWVNGKEVHSGVCTDPQPLKEQPALNDSRYCLSSRLRVSATFWQNPRNHFRCQVQFYGLSENDEWTQDRAKPVTQIVSAEAWGRADCGFTSESYQQGVLSATILYEILLGKATLYAVLVSALVLMAMVKRKDSRGRAKRSGSGATNFSLLKQAGDVEENPGPTSMDWIWRILFLVGAATGAHSFEEVQLVESGGGLVQPGGSLRLSCAASGYTFTEYTIHWVRQAPGKGLEWVANINPNNGGTTYNQKFEDRFTISRDNSKNTLYLQMNSLRAEDTAVYYCARGWNFDYWGQGTLVTVSSTRIQNPDPAVYQLRDSKSSDKSVCLFTDFDSQTNVSQSKDSDVYITDKCVLDMRSMDFKSNSAVAWSNKSDFACANAFNNSIIPEDTFFPSPESSCDVKLVEKSFETDTNLNFQNLSVIGFRILLLKVAGFNLLMTLRLWSS

SEQ ID NO: 20454 - protein, 841 aa, Artificial Sequence
  Synthetic Polypeptide
MALPVTALLLPLALLLHAARPDIQMTQSPSSLSASVGDRVTITCKASQDVGTAVDWYQQKPGKAPKLLIYWASTRHTGVPSRFSGSGSGTDFTLTISSLQPEDFATYYCQQYNSYPLTFGQGTKVEIKRLEDLKNVFPPEVAVFEPSEAEISHTQKATLVCLATGFYPDHVELSWWVNGKEVHSGVCTDPQPLKEQPALNDSRYCLSSRLRVSATFWQNPRNHFRCQVQFYGLSENDEWTQDRAKPVTQIVSAEAWGRADCGFTSESYQQGVLSATILYEILLGKATLYAVLVSALVLMAMVKRKDSRGRAKRSGSGATNFSLLKQAGDVEENPGPTSMDWIWRILFLVGAATGAHSFEEVQLVESGGGLVQPGGSLRLSCAASGYTFTEYTIHWVRQAPGKGLEWVANINPNNGGTTYNQKFEDRFTISRDNSKNTLYLQMNSLRAEDTAVYYCARGWNFDYWGQGTLVTVSSTRIQNPDPAVYQLRDSKSSDKSVCLFTDFDSQTNVSQSKDSDVYITDKCVLDMRSMDFKSNSAVAWSNKSDFACANAFNNSIIPEDTFFPSPESSCDVKLVEKSFETDTNLNFQNLSVIGFRILLLKVAGFNLLMTLRLWSSRAKRSGSGVKQTLNFDLLKLAGDVESNPGPSRGGIHTMATYEVLCEVARKLGTDDREVVLFLLNVFIPQPTLAQLIGALRALKEEGRLTFPLLAECLFRAGRRDLLRDLLHLDPRFLERHLAGTMSYFSPYQLTVLHVDGELCARDIRSLIFLSKDTIGSRSTPQTFLHWVYCMENLDLLGPTDVDALMSMLRSLSRVDLQRQVQTLMGLHLSGPSHSQHYRHTP

SEQ ID NO: 20455 - protein, 620 aa, Artificial Sequence
  Synthetic Polypeptide
MALPVTALLLPLALLLHAARPDIQMTQSPSSLSASVGDRVTITCKASQDVGTAVDWYQQKPGKAPKLLIYWASTRHTGVPSRFSGSGSGTDFTLTISSLQPEDFATYYCQQYNSYPLTFGQGTKVEIKRLEIQNPDPAVYQLRDSKSSDKSVCLFTDFDSQTNVSQSKDSDVYITDKCVLDMRSMDFKSNSAVAWSNKSDFACANAFNNSIIPEDTFFPSPESSCDVKLVEKSFETDTNLNFQNLSVIGFRILLLKVAGFNLLMTLRLWSSRAKRSGSGVKQTLNFDLLKLAGDVESNPGPTSMDWIWRILFLVGAATGAHSFEEVQLVESGGGLVQPGGSLRLSCAASGYTFTEYTIHWVRQAPGKGLEWVANINPNNGGTTYNQKFEDRFTISRDNSKNTLYLQMNSLRAEDTAVYYCARGWNFDYWGQGTLVTVSSTREDLKNVFPPEVAVFEPSEAEISHTQKATLVCLATGFYPDHVELSWWVNGKEVHSGVCTDPQPLKEQPALNDSRYCLSSRLRVSATFWQNPRNHFRCQVQFYGLSENDEWTQDRAKPVTQIVSAEAWGRADCGFTSESYQQGVLSATILYEILLGKATLYAVLVSALVLMAMVKRKDSRG

SEQ ID NO: 20456 - protein, 842 aa, Artificial Sequence
  Synthetic Polypeptide
MALPVTALLLPLALLLHAARPDIQMTQSPSSLSASVGDRVTITCKASQDVGTAVDWYQQKPGKAPKLLIYWASTRHTGVPSRFSGSGSGTDFTLTISSLQPEDFATYYCQQYNSYPLTFGQGTKVEIKRLEIQNPDPAVYQLRDSKSSDKSVCLFTDFDSQTNVSQSKDSDVYITDKCVLDMRSMDFKSNSAVAWSNKSDFACANAFNNSIIPEDTFFPSPESSCDVKLVEKSFETDTNLNFQNLSVIGFRILLLKVAGFNLLMTLRLWSSRAKRSGSGVKQTLNFDLLKLAGDVESNPGPTSMDWIWRILFLVGAATGAHSFEEVQLVESGGGLVQPGGSLRLSCAASGYTFTEYTIHWVRQAPGKGLEWVANINPNNGGTTYNQKFEDRFTISRDNSKNTLYLQMNSLRAEDTAVYYCARGWNFDYWGQGTLVTVSSTREDLKNVFPPEVAVFEPSEAEISHTQKATLVCLATGFYPDHVELSWWVNGKEVHSGVCTDPQPLKEQPALNDSRYCLSSRLRVSATFWQNPRNHFRCQVQFYGLSENDEWTQDRAKPVTQIVSAEAWGRADCGFTSESYQQGVLSATILYEILLGKATLYAVLVSALVLMAMVKRKDSRGRAKRSGSGATNFSLLKQAGDVEENPGPSRGGIHTMATYEVLCEVARKLGTDDREVVLFLLNVFIPQPTLAQLIGALRALKEEGRLTFPLLAECLFRAGRRDLLRDLLHLDPRFLERHLAGTMSYFSPYQLTVLHVDGELCARDIRSLIFLSKDTIGSRSTPQTFLHWVYCMENLDLLGPTDVDALMSMLRSLSRVDLQRQVQTLMGLHLSGPSHSQHYRHTP

SEQ ID NO: 20457 - protein, 894 aa, Artificial Sequence
  Synthetic Polypeptide
MALPVTALLLPLALLLHAARPLEGKPIPNPLLGLDSTGSGEDLKNVFPPEVAVFEPSKAEIAHTQKATLVCLATGFYPDHVELSWWVNGKEVHSGVCTDPQPLKEQPALNDSRYCLSSRLRVSATFWQNPRNHFRCQVQFYGLSENDEWTQDRAKPVTQIVSAEAWGRADCGITSASYHQGVLSATILYEILLGKATLYAVLVSALVLMAMVKRKDSRGRAKRSGSGATNFSLLKQAGDVEENPGPTSMALPVTALLLPLALLLHAARPDIQMTQSPSSLSASVGDRVTITCKASQDVGTAVDWYQQKPGKAPKLLIYWASTRHTGVPSRFSGSGSGTDFTLTISSLQPEDFATYYCQQYNSYPLTFGQGTKVEIKRGGGGSGGGGSGGGGSEVQLVESGGGLVQPGGSLRLSCAASGYTFTEYTIHWVRQAPGKGLEWVANINPNNGGTTYNQKFEDRFTISRDNSKNTLYLQMNSLRAEDTAVYYCARGWNFDYWGQGTLVTVSSTREQKLISEEDGSGIQNPDPAVYQLRDSKSSDKSVCLFTDFDSQTNVSQSKDSDVYITDKCVLDMRSMDFKSNSAVAWSNKSDFACANAFNNSIIPEDTFFPSSDVPCDVKLVEKSFETDTNLNFQNLSVIGFRILLLKVAGFNLLMTLRLWSSRAKRSGSGVKQTLNFDLLKLAGDVESNPGPSRGHMTEYKPTVRLATRDDVPRAVRTLAAAFADYPATRHTVDPDRHIERVTELQELFLTRVGLDIGKVWVADDGAAVAVWTTPESVEAGAVFAEIGPRMAELSGSRLAAQQQMEGLLAPHRPKEPAWFLATVGVSPDHQGKGLGSAVVLPGVEAAERAGVPAFLETSAPRNLPFYERLGFTVTADVEVPEGPRTWCMTRKPGA

SEQ ID NO: 20458 - protein, 895 aa, Artificial Sequence
  Synthetic Polypeptide
MALPVTALLLPLALLLHAARPLEQKLISEEDLGSGDRPDPAVYQLRDSKSSDKSVCLFTDFDSQTNVSQSKDSDVYITDKCVLDMRSMDFKSNSAVAWSNKSDFACANAFNNSIIPEDTFFPSPESSCDVKLVEKSFETDTNLNFQNLSVIGFRILLLKVAGFNLLMTLRLWSSSSRAKRSGSGVKQTLNFDLLKLAGDVESNPGPTSMALPVTALLLPLALLLHAARPDIQMTQSPSSLSASVGDRVTITCKASQDVGTAVDWYQQKPGKAPKLLIYWASTRHTGVPSRFSGSGSGTDFTLTISSLQPEDFATYYCQQYNSYPLTFGQGTKVEIKRGGGGSGGGGSGGGGSEVQLVESGGGLVQPGGSLRLSCAASGYTFTEYTIHWVRQAPGKGLEWVANINPNNGGTTYNQKFEDRFTISRDNSKNTLYLQMNSLRAEDTAVYYCARGWNFDYWGQGTLVTVSSTRGKPIPNPLLGLDSTGSGEDLKNVFPPEVAVFEPSEAEISHTQKATLVCLATGFYPDHVELSWWVNGKEVHSGVCTDPQPLKEQPALNDSRYCLSSRLRVSATFWQNPRNHFRCQVQFYGLSENDEWTQDRAKPVTQIVSAEAWGRADCGFTSESYQQGVLSATILYEILLGKATLYAVLVSALVLMAMVKRKDSRGRAKRSGSGATNFSLLKQAGDVEENPGPSRGHMTEYKPTVRLATRDDVPRAVRTLAAAFADYPATRHTVDPDRHIERVTELQELFLTRVGLDIGKVWVADDGAAVAVWTTPESVEAGAVFAEIGPRMAELSGSRLAAQQQMEGLLAPHRPKEPAWFLATVGVSPDHQGKGLGSAVVLPGVEAAERAGVPAFLETSAPRNLPFYERLGFTVTADVEVPEGPRTWCMTRKPGA

SEQ ID NO: 20459 - protein, 849 aa, Artificial Sequence
  Synthetic Polypeptide
MALPVTALLLPLALLLHAARPDIQMTQSPSSLSASVGDRVTITCKASQDVGTAVDWYQQKPGKAPKLLIYWASTRHTGVPSRFSGSGSGTDFTLTISSLQPEDFATYYCQQYNSYPLTFGQGTKVEIKRLEDLKNVFPPEVAVFEPSEAEISHTQKATLVCLATGFYPDHVELSWWVNGKEVHSGVSTDPQPLKEQPALNDSRYCLSSRLRVSATFWQNPRNHFRCQVQFYGLSENDEWTQDRAKPVTQIVSAEAWGRADCGFTSESYQQGVLSATILYEILLGKATLYAVLVSALVLMAMVKRKDSRGRAKRSGSGATNFSLLKQAGDVEENPGPTSMDWIWRILFLVGAATGAHSFEEVQLVESGGGLVQPGGSLRLSCAASGYTFTEYTIHWVRQAPGKGLEWVANINPNNGGTTYNQKFEDRFTISRDNSKNTLYLQMNSLRAEDTAVYYCARGWNFDYWGQGTLVTVSSTRIQNPDPAVYQLRDSKSSDKSVCLFTDFDSQTNVSQSKDSDVYITDKTVLDMRSMDFKSNSAVAWSNKSDFACANAFNNSIIPEDTFFPSPESSCDVKLVEKSFETDTNLNFQNLSVIGFRILLLKVAGFNLLMTLRLWSSRAKRSGSGVKQTLNFDLLKLAGDVESNPGPSRGHMTEYKPTVRLATRDDVPRAVRTLAAAFADYPATRHTVDPDRHIERVTELQELFLTRVGLDIGKVWVADDGAAVAVWTTPESVEAGAVFAEIGPRMAELSGSRLAAQQQMEGLLAPHRPKEPAWFLATVGVSPDHQGKGLGSAVVLPGVEAAERAGVPAFLETSAPRNLPFYERLGFTVTADVEVPEGPRTWCMTRKPGA

SEQ ID NO: 20460 - protein, 931 aa, Artificial Sequence
  Synthetic Polypeptide
MALPVTALLLPLALLLHAARPDIQMTQSPSSLSASVGDRVTITCKASQDVGTAVDWYQQKPGKAPKLLIYWASTRHTGVPSRFSGSGSGTDFTLTISSLQPEDFATYYCQQYNSYPLTFGQGTKVEIKRLEDLKNVFPPEVAVFEPSEAEISHTQKATLVCLATGFYPDHVELSWWVNGKEVHSGVSTDPQPLKEQPALNDSRYCLSSRLRVSATFWQNPRNHFRCQVQFYGLSENDEWTQDRAKPVTQIVSAEAWGRADCGFTSESYQQGVLSATILYEILLGKATLYAVLVSALVLMAMVKRKDSRGRAKRSGSGATNFSLLKQAGDVEENPGPTSMDWIWRILFLVGAATGAHSFEEVQLVESGGGLVQPGGSLRLSCAASGYTFTEYTIHWVRQAPGKGLEWVANINPNNGGTTYNQKFEDRFTISRDNSKNTLYLQMNSLRAEDTAVYYCARGWNFDYWGQGTLVTVSSTREQKLISEEDGSGTPFPSLAPPIMLLVDGKQQMVVVCLVLDVAPPGLDSPIWFSAGNGSALDAFTYGPSPATDGTWTNLAHLSLPSEELASWEPLVCHTGPGAEGHSRSTQPMHLSGEASTARTCPQEPLRGTPGGALWLGVLRLLLFKLLLFDLLLTCSCLCDPAGPLPSPATTTRLRALGSHRLHPATETGGREATSSPRPQPRDRRWGDTPPGRKPGSPVRAKRSGSGVKQTLNFDLLKLAGDVESNPGPSRGHMTEYKPTVRLATRDDVPRAVRTLAAAFADYPATRHTVDPDRHIERVTELQELFLTRVGLDIGKVWVADDGAAVAVWTTPESVEAGAVFAEIGPRMAELSGSRLAAQQQMEGLLAPHRPKEPAWFLATVGVSPDHQGKGLGSAVVLPGVEAAERAGVPAFLETSAPRNLPFYERLGFTVTADVEVPEGPRTWCMTRKPGA

SEQ ID NO: 20461 - protein, 949 aa, Artificial Sequence
  Synthetic Polypeptide
MALPVTALLLPLALLLHAARPLEDLKNVFPPEVAVFEPSEAEISHTQKATLVCLATGFYPDHVELSWWVNGKEVHSGVSTDPQPLKEQPALNDSRYCLSSRLRVSATFWQNPRNHFRCQVQFYGLSENDEWTQDRAKPVTQIVSAEAWGRADCGFTSESYQQGVLSATILYEILLGKATLYAVLVSALVLMAMVKRKDSRGRAKRSGSGATNFSLLKQAGDVEENPGPTSMALPVTALLLPLALLLHAARPDIQMTQSPSSLSASVGDRVTITCKASQDVGTAVDWYQQKPGKAPKLLIYWASTRHTGVPSRFSGSGSGTDFTLTISSLQPEDFATYYCQQYNSYPLTFGQGTKVEIKRGGGGSGGGGSGGGGSEVQLVESGGGLVQPGGSLRLSCAASGYTFTEYTIHWVRQAPGKGLEWVANINPNNGGTTYNQKFEDRFTISRDNSKNTLYLQMNSLRAEDTAVYYCARGWNFDYWGQGTLVTVSSTREQKLISEEDLGSGTPFPSLAPPIMLLVDGKQQMVVVCLVLDVAPPGLDSPIWFSAGNGSALDAFTYGPSPATDGTWTNLAHLSLPSEELASWEPLVCHTGPGAEGHSRSTQPMHLSGEASTARTCPQEPLRGTPGGALWLGVLRLLLFKLLLFDLLLTCSCLCDPAGPLPSPATTTRLRALGSHRLHPATETGGREATSSPRPQPRDRRWGDTPPGRKPGSPVRAKRSGSGVKQTLNFDLLKLAGDVESNPGPSRSRGHMTEYKPTVRLATRDDVPRAVRTLAAAFADYPATRHTVDPDRHIERVTELQELFLTRVGLDIGKVWVADDGAAVAVWTTPESVEAGAVFAEIGPRMAELSGSRLAAQQQMEGLLAPHRPKEPAWFLATVGVSPDHQGKGLGSAVVLPGVEAAERAGVPAFLETSAPRNLPFYERLGFTVTADVEVPEGPRTWCMTRKPGA

SEQ ID NO: 20462 - protein, 886 aa, Artificial Sequence
  Synthetic Polypeptide
MALPVTALLLPLALLLHAARPDIQMTQSPSSLSASVGDRVTITCKASQDVGTAVDWYQQKPGKAPKLLIYWASTRHTGVPSRFSGSGSGTDFTLTISSLQPEDFATYYCQQYNSYPLTFGQGTKVEIKRLEGKPIPNPLLGLDSTGSGDKQLDADVSPKPTIFLPSIAETKLQKAGTYLCLLEKFFPDVIKIHWQEKKSNTILGSQEGNTMKTNDTYMKFSWLTVPEKSLDKEHRCIVRHENNKNGVDQEIIFPPIKTDVITMDPKDNCSKDANDTLLLQLTNTSAYYMYLLLLLKSVVYFAIITCCLLRRTAFCCNGEKSRAKRSGSGATNFSLLKQAGDVEENPGPTSMDWIWRILFLVGAATGAHSFEEVQLVESGGGLVQPGGSLRLSCAASGYTFTEYTIHWVRQAPGKGLEWVANINPNNGGTTYNQKFEDRFTISRDNSKNTLYLQMNSLRAEDTAVYYCARGWNFDYWGQGTLVTVSSTREQKLISEEDGSGSQPHTKPSVFVMKNGTNVACLVKEFYPKDIRINLVSSKKITEFDPAIVISPSGKYNAVKLGKYEDSNSVTCSVQHDNKTVHSTDFEVKTDSTDHVKPKETENTKQPSKSCHKPKAIVHTEKVNMMSLTVLGLRMLFAKTVAVNFLLTAKLFFLRAKRSGSGVKQTLNFDLLKLAGDVESNPGPSRGHMTEYKPTVRLATRDDVPRAVRTLAAAFADYPATRHTVDPDRHIERVTELQELFLTRVGLDIGKVWVADDGAAVAVWTTPESVEAGAVFAEIGPRMAELSGSRLAAQQQMEGLLAPHRPKEPAWFLATVGVSPDHQGKGLGSAVVLPGVEAAERAGVPAFLETSAPRNLPFYERLGFTVTADVEVPEGPRTWCMTRKPGA

SEQ ID NO: 20463 - protein, 624 aa, Artificial Sequence
  Synthetic Polypeptide
MALPVTALLLPLALLLHAARPDIQMTQSPSSLSASVGDRVTITCKASQDVGTAVDWYQQKPGKAPKLLIYWASTRHTGVPSRFSGSGSGTDFTLTISSLQPEDFATYYCQQYNSYPLTFGQGTKVEIKRLESQPHTKPSVFVMKNGTNVACLVKEFYPKDIRINLVSSKKITEFDPAIVISPSGKYNAVKLGKYEDSNSVTCSVQHDNKTVHSTDFEVKTDSTDHVKPKETENTKQPSKSCHKPKAIVHTEKVNMMSLTVLGLRMLFAKTVAVNFLLTAKLFFLRAKRSGSGATNFSLLKQAGDVEENPGPTSMDWIWRILFLVGAATGAHSFEEVQLVESGGGLVQPGGSLRLSCAASGYTFTEYTIHWVRQAPGKGLEWVANINPNNGGTTYNQKFEDRFTISRDNSKNTLYLQMNSLRAEDTAVYYCARGWNFDYWGQGTLVTVSSTRDKQLDADVSPKPTIFLPSIAETKLQKAGTYLCLLEKFFPDVIKIHWQEKKSNTILGSQEGNTMKTNDTYMKFSWLTVPEKSLDKEHRCIVRHENNKNGVDQEIIFPPIKTDVITMDPKDNCSKDANDTLLLQLTNTSAYYMYLLLLLKSVVYFAIITCCLLRRTAFCCNGEKS

SEQ ID NO: 20464 - protein, 901 aa, Artificial Sequence
  Synthetic Polypeptide
MALPVTALLLPLALLLHAARPLEGKPIPNPLLGLDSTGSGDKQLDADVSPKPTIFLPSIAETKLQKAGTYLCLLEKFFPDVIKIHWQEKKSNTILGSQEGNTMKTNDTYMKFSWLTVPEKSLDKEHRCIVRHENNKNGVDQEIIFPPIKTDVITMDPKDNCSKDANDTLLLQLTNTSAYYMYLLLLLKSVVYFAIITCCLLRRTAFCCNGEKSRAKRSGSGATNFSLLKQAGDVEENPGPTSMALPVTALLLPLALLLHAARPDIQMTQSPSSLSASVGDRVTITCKASQDVGTAVDWYQQKPGKAPKLLIYWASTRHTGVPSRFSGSGSGTDFTLTISSLQPEDFATYYCQQYNSYPLTFGQGTKVEIKRGGGGSGGGGSGGGGSEVQLVESGGGLVQPGGSLRLSCAASGYTFTEYTIHWVRQAPGKGLEWVANINPNNGGTTYNQKFEDRFTISRDNSKNTLYLQMNSLRAEDTAVYYCARGWNFDYWGQGTLVTVSSTREQKLISEEDGSGSQPHTKPSVFVMKNGTNVACLVKEFYPKDIRINLVSSKKITEFDPAIVISPSGKYNAVKLGKYEDSNSVTCSVQHDNKTVHSTDFEVKTDSTDHVKPKETENTKQPSKSCHKPKAIVHTEKVNMMSLTVLGLRMLFAKTVAVNFLLTAKLFFLRAKRSGSGVKQTLNFDLLKLAGDVESNPGPSRGHMTEYKPTVRLATRDDVPRAVRTLAAAFADYPATRHTVDPDRHIERVTELQELFLTRVGLDIGKVWVADDGAAVAVWTTPESVEAGAVFAEIGPRMAELSGSRLAAQQQMEGLLAPHRPKEPAWFLATVGVSPDHQGKGLGSAVVLPGVEAAERAGVPAFLETSAPRNLPFYERLGFTVTADVEVPEGPRTWCMTRKPGA

SEQ ID NO: 20465 - protein, 1026 aa, Artificial Sequence
  Synthetic Polypeptide
MALPVTALLLPLALLLHAARPDIQMTQSPSSLSASVGDRVTITCKASQDVGTAVDWYQQKPGKAPKLLIYWASTRHTGVPSRFSGSGSGTDFTLTISSLQPEDFATYYCQQYNSYPLTFGQGTKVEIKRGQPKANPTVTLFPPSSEELQANKATLVCLISDFYPGAVTVAWKADGSPVKAGVETTKPSKQSNNKYAASSYLSLTPEQWKSHRSYSCQVTHEGSTVEKTVAPTECSGSQSFGLLDPKLCYLLDGILFIYGVILTALFLRVKFSRSADAPAYQQGQNQLYNELNLGRREEYDVLDKRRGRDPEMGGKPQRRKNPQEGLYNELQKDKMAEAYSEIGMKGERRRGKGHDGLYQGLSTATKDTYDALHMQALPPRRAKRSGSGATNFSLLKQAGDVEENPGPTSMDWIWRILFLVGAATGAHSFEEVQLVESGGGLVQPGGSLRLSCAASGYTFTEYTIHWVRQAPGKGLEWVANINPNNGGTTYNQKFEDRFTISRDNSKNTLYLQMNSLRAEDTAVYYCARGWNFDYWGQGTLVTVSSASTKGPSVFPLAPSSKSTSGGTAALGCLVKDYFPEPVTVSWNSGALTSGVHTFPAVLQSSGLYSLSSVVTVPSSSLGTQTYICNVNHKPSNTKVDKRVEPKSCGTQSFGLLDPKLCYLLDGILFIYGVILTALFLRVKFSRSADAPAYQQGQNQLYNELNLGRREEYDVLDKRRGRDPEMGGKPQRRKNPQEGLYNELQKDKMAEAYSEIGMKGERRRGKGHDGLYQGLSTATKDTYDALHMQALPPRRAKRSGSGVKQTLNFDLLKLAGDVESNPGPSRGHMTEYKPTVRLATRDDVPRAVRTLAAAFADYPATRHTVDPDRHIERVTELQELFLTRVGLDIGKVWVADDGAAVAVWTTPESVEAGAVFAEIGPRMAELSGSRLAAQQQMEGLLAPHRPKEPAWFLATVGVSPDHQGKGLGSAVVLPGVEAAERAGVPAFLETSAPRNLPFYERLGFTVTADVEVPEGPRTWCMTRKPGA

SEQ ID NO: 20466 - protein, 812 aa, Artificial Sequence
  Synthetic Polypeptide
MALPVTALLLPLALLLHAARPDIQMTQSPSSLSASVGDRVTITCKASQDVGTAVDWYQQKPGKAPKLLIYWASTRHTGVPSRFSGSGSGTDFTLTISSLQPEDFATYYCQQYNSYPLTFGQGTKVEIKRLEDLKNVFPPEVAVFEPSEAEISHTQKATLVCLATGFYPDHVELSWWVNGKEVHSGVSTDPQPLKEQPALNDSRYCLSSRLRVSATFWQNPRNHFRCQVQFYGLSENDEWTQDRAKPVTQIVSAEAWGRADCGSQSFGLLDPKLCYLLDGILFIYGVILTALFLRVKFSRSADAPAYQQGQNQLYNELNLGRREEYDVLDKRRGRDPEMGGKPQRRKNPQEGLYNELQKDKMAEAYSEIGMKGERRRGKGHDGLYQGLSTATKDTYDALHMQALPPRRAKRSGSGATNFSLLKQAGDVEENPGPTSMDWIWRILFLVGAATGAHSFEEVQLVESGGGLVQPGGSLRLSCAASGYTFTEYTIHWVRQAPGKGLEWVANINPNNGGTTYNQKFEDRFTISRDNSKNTLYLQMNSLRAEDTAVYYCARGWNFDYWGQGTLVTVSSTRIQNPDPAVYQLRDSKSSDKSVCLFTDFDSQTNVSQSKDSDVYITDKTVLDMRSMDFKSNSAVAWSNKSDFACANAFNNSIIPEDTFFPSPESSCGTQSFGLLDPKLCYLLDGILFIYGVILTALFLRVKFSRSADAPAYQQGQNQLYNELNLGRREEYDVLDKRRGRDPEMGGKPQRRKNPQEGLYNELQKDKMAEAYSEIGMKGERRRGKGHDGLYQGLSTATKDTYDALHMQALPPR

SEQ ID NO: 20467 - protein, 812 aa, Artificial Sequence
  Synthetic Polypeptide
MALPVTALLLPLALLLHAARPDIQMTQSPSSLSASVGDRVTITCKASQDVGTAVDWYQQKPGKAPKLLIYWASTRHTGVPSRFSGSGSGTDFTLTISSLQPEDFATYYCQQYNSYPLTFGQGTKVEIKRLEDLKNVFPPEVAVFEPSKAEIAHTQKATLVCLATGFYPDHVELSWWVNGKEVHSGVCTDPQPLKEQPALNDSRYCLSSRLRVSATFWQNPRNHFRCQVQFYGLSENDEWTQDRAKPVTQIVSAEAWGRADCGSQSFGLLDPKLCYLLDGILFIYGVILTALFLRVKFSRSADAPAYQQGQNQLYNELNLGRREEYDVLDKRRGRDPEMGGKPQRRKNPQEGLYNELQKDKMAEAYSEIGMKGERRRGKGHDGLYQGLSTATKDTYDALHMQALPPRRAKRSGSGATNFSLLKQAGDVEENPGPTSMDWIWRILFLVGAATGAHSFEEVQLVESGGGLVQPGGSLRLSCAASGYTFTEYTIHWVRQAPGKGLEWVANINPNNGGTTYNQKFEDRFTISRDNSKNTLYLQMNSLRAEDTAVYYCARGWNFDYWGQGTLVTVSSTRIQNPDPAVYQLRDSKSSDKSVCLFTDFDSQTNVSQSKDSDVYITDKCVLDMRSMDFKSNSAVAWSNKSDFACANAFNNSIIPEDTFFPSSDVPCGTQSFGLLDPKLCYLLDGILFIYGVILTALFLRVKFSRSADAPAYQQGQNQLYNELNLGRREEYDVLDKRRGRDPEMGGKPQRRKNPQEGLYNELQKDKMAEAYSEIGMKGERRRGKGHDGLYQGLSTATKDTYDALHMQALPPR

SEQ ID NO: 20468 - protein, 883 aa, Artificial Sequence
  Synthetic Polypeptide
MALPVTALLLPLALLLHAARPDIQMTQSPSSLSASVGDRVTITCKASQDVGTAVDWYQQKPGKAPKLLIYWASTRHTGVPSRFSGSGSGTDFTLTISSLQPEDFATYYCQQYNSYPLTFGQGTKVEIKRLEGKPIPNPLLGLDSTGSGEDLKNVFPPEVAVFEPSEAEISHTQKATLVCLATGFYPDHVELSWWVNGKEVHSGVSTDPQPLKEQPALNDSRYCLSSRLRVSATFWQNPRNHFRCQVQFYGLSENDEWTQDRAKPVTQIVSAEAWGRADCGSQSFGLLDPKLCYLLDGILFIYGVILTALFLRVKFSRSADAPAYQQGQNQLYNELNLGRREEYDVLDKRRGRDPEMGGKPQRRKNPQEGLYNELQKDKMAEAYSEIGMKGERRRGKGHDGLYQGLSTATKDTYDALHMQALPPRRAKRSGSGATNFSLLKQAGDVEENPGPTSMDWIWRILFLVGAATGAHSFEEVQLVESGGGLVQPGGSLRLSCAASGYTFTEYTIHWVRQAPGKGLEWVANINPNNGGTTYNQKFEDRFTISRDNSKNTLYLQMNSLRAEDTAVYYCARGWNFDYWGQGTLVTVSSTREQKLISEEDGSGIQNPDPAVYQLRDSKSSDKSVCLFTDFDSQTNVSQSKDSDVYITDKTVLDMRSMDFKSNSAVAWSNKSDFACANAFNNSIIPEDTFFPSPESSCGTQSFGLLDPKLCYLLDGILFIYGVILTALFLRSKRSRLLHSDYMNMTPRRPGPTRKHYQPYAPPRDFAAYRSRVKFSRSADAPAYQQGQNQLYNELNLGRREEYDVLDKRRGRDPEMGGKPQRRKNPQEGLYNELQKDKMAEAYSEIGMKGERRRGKGHDGLYQGLSTATKDTYDALHMQALPPR

SEQ ID NO: 20469 - protein, 924 aa, Artificial Sequence
  Synthetic Polypeptide
MALPVTALLLPLALLLHAARPDIQMTQSPSSLSASVGDRVTITCKASQDVGTAVDWYQQKPGKAPKLLIYWASTRHTGVPSRFSGSGSGTDFTLTISSLQPEDFATYYCQQYNSYPLTFGQGTKVEIKRLEGKPIPNPLLGLDSTGSGEDLKNVFPPEVAVFEPSEAEISHTQKATLVCLATGFYPDHVELSWWVNGKEVHSGVSTDPQPLKEQPALNDSRYCLSSRLRVSATFWQNPRNHFRCQVQFYGLSENDEWTQDRAKPVTQIVSAEAWGRADCGSQSFGLLDPKLCYLLDGILFIYGVILTALFLRSKRSRLLHSDYMNMTPRRPGPTRKHYQPYAPPRDFAAYRSRVKFSRSADAPAYQQGQNQLYNELNLGRREEYDVLDKRRGRDPEMGGKPQRRKNPQEGLYNELQKDKMAEAYSEIGMKGERRRGKGHDGLYQGLSTATKDTYDALHMQALPPRRAKRSGSGATNFSLLKQAGDVEENPGPTSMDWIWRILFLVGAATGAHSFEEVQLVESGGGLVQPGGSLRLSCAASGYTFTEYTIHWVRQAPGKGLEWVANINPNNGGTTYNQKFEDRFTISRDNSKNTLYLQMNSLRAEDTAVYYCARGWNFDYWGQGTLVTVSSTREQKLISEEDGSGIQNPDPAVYQLRDSKSSDKSVCLFTDFDSQTNVSQSKDSDVYITDKTVLDMRSMDFKSNSAVAWSNKSDFACANAFNNSIIPEDTFFPSPESSCGTQSFGLLDPKLCYLLDGILFIYGVILTALFLRSKRSRLLHSDYMNMTPRRPGPTRKHYQPYAPPRDFAAYRSRVKFSRSADAPAYQQGQNQLYNELNLGRREEYDVLDKRRGRDPEMGGKPQRRKNPQEGLYNELQKDKMAEAYSEIGMKGERRRGKGHDGLYQGLSTATKDTYDALHMQALPPR

SEQ ID NO: 20470 - protein, 885 aa, Artificial Sequence
  Synthetic Polypeptide
MALPVTALLLPLALLLHAARPDIQMTQSPSSLSASVGDRVTITCKASQDVGTAVDWYQQKPGKAPKLLIYWASTRHTGVPSRFSGSGSGTDFTLTISSLQPEDFATYYCQQYNSYPLTFGQGTKVEIKRLEGKPIPNPLLGLDSTGSGEDLKNVFPPEVAVFEPSEAEISHTQKATLVCLATGFYPDHVELSWWVNGKEVHSGVSTDPQPLKEQPALNDSRYCLSSRLRVSATFWQNPRNHFRCQVQFYGLSENDEWTQDRAKPVTQIVSAEAWGRADCGSQSFGLLDPKLCYLLDGILFIYGVILTALFLRVKFSRSADAPAYQQGQNQLYNELNLGRREEYDVLDKRRGRDPEMGGKPQRRKNPQEGLYNELQKDKMAEAYSEIGMKGERRRGKGHDGLYQGLSTATKDTYDALHMQALPPRRAKRSGSGATNFSLLKQAGDVEENPGPTSMDWIWRILFLVGAATGAHSFEEVQLVESGGGLVQPGGSLRLSCAASGYTFTEYTIHWVRQAPGKGLEWVANINPNNGGTTYNQKFEDRFTISRDNSKNTLYLQMNSLRAEDTAVYYCARGWNFDYWGQGTLVTVSSTREQKLISEEDLGSGIQNPDPAVYQLRDSKSSDKSVCLFTDFDSQTNVSQSKDSDVYITDKTVLDMRSMDFKSNSAVAWSNKSDFACANAFNNSIIPEDTFFPSPESSCGTQSFGLLDPKLCYLLDGILFIYGVILTALFLKRGRKKLLYIFKQPFMRPVQTTQEEDGCSCRFPEEEEGGCELRVKFSRSADAPAYQQGQNQLYNELNLGRREEYDVLDKRRGRDPEMGGKPQRRKNPQEGLYNELQKDKMAEAYSEIGMKGERRRGKGHDGLYQGLSTATKDTYDALHMQALPPR

SEQ ID NO: 20471 - protein, 927 aa, Artificial Sequence
  Synthetic Polypeptide
MALPVTALLLPLALLLHAARPDIQMTQSPSSLSASVGDRVTITCKASQDVGTAVDWYQQKPGKAPKLLIYWASTRHTGVPSRFSGSGSGTDFTLTISSLQPEDFATYYCQQYNSYPLTFGQGTKVEIKRLEGKPIPNPLLGLDSTGSGEDLKNVFPPEVAVFEPSEAEISHTQKATLVCLATGFYPDHVELSWWVNGKEVHSGVSTDPQPLKEQPALNDSRYCLSSRLRVSATFWQNPRNHFRCQVQFYGLSENDEWTQDRAKPVTQIVSAEAWGRADCGSQSFGLLDPKLCYLLDGILFIYGVILTALFLKRGRKKLLYIFKQPFMRPVQTTQEEDGCSCRFPEEEEGGCELRVKFSRSADAPAYQQGQNQLYNELNLGRREEYDVLDKRRGRDPEMGGKPQRRKNPQEGLYNELQKDKMAEAYSEIGMKGERRRGKGHDGLYQGLSTATKDTYDALHMQALPPRRAKRSGSGATNFSLLKQAGDVEENPGPTSMDWIWRILFLVGAATGAHSFEEVQLVESGGGLVQPGGSLRLSCAASGYTFTEYTIHWVRQAPGKGLEWVANINPNNGGTTYNQKFEDRFTISRDNSKNTLYLQMNSLRAEDTAVYYCARGWNFDYWGQGTLVTVSSTREQKLISEEDLGSGIQNPDPAVYQLRDSKSSDKSVCLFTDFDSQTNVSQSKDSDVYITDKTVLDMRSMDFKSNSAVAWSNKSDFACANAFNNSIIPEDTFFPSPESSCGTQSFGLLDPKLCYLLDGILFIYGVILTALFLKRGRKKLLYIFKQPFMRPVQTTQEEDGCSCRFPEEEEGGCELRVKFSRSADAPAYQQGQNQLYNELNLGRREEYDVLDKRRGRDPEMGGKPQRRKNPQEGLYNELQKDKMAEAYSEIGMKGERRRGKGHDGLYQGLSTATKDTYDALHMQALPPR

SEQ ID NO: 20472 - protein, 817 aa, Artificial Sequence
  Synthetic Polypeptide
MALPVTALLLPLALLLHAARPDIQMTQSPSSLSASVGDRVTITCKASQDVGTAVDWYQQKPGKAPKLLIYWASTRHTGVPSRFSGSGSGTDFTLTISSLQPEDFATYYCQQYNSYPLTFGQGTKVEIKRLEQSFGLLDPKLCYLLDGILFIYGVILTALFLRVKFSRSADAPAYQQGQNQLYNELNLGRREEYDVLDKRRGRDPEMGGKPQRRKNPQEGLYNELQKDKMAEAYSEIGMKGERRRGKGHDGLYQGLSTATKDTYDALHMQALPPRRAKRSGSGATNFSLLKQAGDVEENPGPTSMDWIWRILFLVGAATGAHSFEEVQLVESGGGLVQPGGSLRLSCAASGYTFTEYTIHWVRQAPGKGLEWVANINPNNGGTTYNQKFEDRFTISRDNSKNTLYLQMNSLRAEDTAVYYCARGWNFDYWGQGTLVTVSSTRQSFGLLDPKLCYLLDGILFIYGVILTALFLRVKFSRSADAPAYQQGQNQLYNELNLGRREEYDVLDKRRGRDPEMGGKPQRRKNPQEGLYNELQKDKMAEAYSEIGMKGERRRGKGHDGLYQGLSTATKDTYDALHMQALPPRRAKRSGSGVKQTLNFDLLKLAGDVESNPGPSRGHMTEYKPTVRLATRDDVPRAVRTLAAAFADYPATRHTVDPDRHIERVTELQELFLTRVGLDIGKVWVADDGAAVAVWTTPESVEAGAVFAEIGPRMAELSGSRLAAQQQMEGLLAPHRPKEPAWFLATVGVSPDHQGKGLGSAVVLPGVEAAERAGVPAFLETSAPRNLPFYERLGFTVTADVEVPEGPRTWCMTRKPGA

SEQ ID NO: 20473 - protein, 642 aa, Artificial Sequence
  Synthetic Polypeptide
MALPVTALLLPLALLLHAARPDIQMTQSPSSLSASVGDRVTITCKASQDVGTAVDWYQQKPGKAPKLLIYWASTRHTGVPSRFSGSGSGTDFTLTISSLQPEDFATYYCQQYNSYPLTFGQGTKVEIKRLEGQPKANPTVTLFPPSSEELQANKATLVCLISDFYPGAVTVAWKADGSPVKAGVETTKPSKQSNNKYAASSYLSLTPEQWKSHRSYSCQVTHEGSTVEKTVAPTECSPIKTDVITMDPKDNCSKDANDTLLLQLTNTSAYYMYLLLLLKSVVYFAIITCCLLRRTAFCCNGEKSRAKRSGSGATNFSLLKQAGDVEENPGPTSMDWIWRILFLVGAATGAHSFEEVQLVESGGGLVQPGGSLRLSCAASGYTFTEYTIHWVRQAPGKGLEWVANINPNNGGTTYNQKFEDRFTISRDNSKNTLYLQMNSLRAEDTAVYYCARGWNFDYWGQGTLVTVSSTRASTKGPSVFPLAPSSKSTSGGTAALGCLVKDYFPEPVTVSWNSGALTSGVHTFPAVLQSSGLYSLSSVVTVPSSSLGTQTYICNVNHKPSNTKVDKRVEPKSCEVKTDSTDHVKPKETENTKQPSKSCHKPKAIVHTEKVNMMSLTVLGLRMLFAKTVAVNFLLTAKLFFL

SEQ ID NO: 20474 - protein, 620 aa, Artificial Sequence
  Synthetic Polypeptide
MALPVTALLLPLALLLHAARPDIQMTQSPSSLSASVGDRVTITCKASQDVGTAVDWYQQKPGKAPKLLIYWASTRHTGVPSRFSGSGSGTDFTLTISSLQPEDFATYYCQQYNSYPLTFGQGTKVEIKRLEGQPKANPTVTLFPPSSEELQANKATLVCLISDFYPGAVTVAWKADGSPVKAGVETTKPSKQSNNKYAASSYLSLTPEQWKSHRSYSCQVTHEGSTVEKTVAPTECSGRADCGITSASYHQGVLSATILYEILLGKATLYAVLVSALVLMAMVKRKDSRGRAKRSGSGATNFSLLKQAGDVEENPGPTSMDWIWRILFLVGAATGAHSFEEVQLVESGGGLVQPGGSLRLSCAASGYTFTEYTIHWVRQAPGKGLEWVANINPNNGGTTYNQKFEDRFTISRDNSKNTLYLQMNSLRAEDTAVYYCARGWNFDYWGQGTLVTVSSTRASTKGPSVFPLAPSSKSTSGGTAALGCLVKDYFPEPVTVSWNSGALTSGVHTFPAVLQSSGLYSLSSVVTVPSSSLGTQTYICNVNHKPSNTKVDKRVEPKSCIPEDTFFPSSDVPCDVKLVEKSFETDTNLNFQNLSVIGFRILLLKVAGFNLLMTLRLWSS

SEQ ID NO: 20475 - protein, 620 aa, Artificial Sequence
  Synthetic Polypeptide
MALPVTALLLPLALLLHAARPDIQMTQSPSSLSASVGDRVTITCKASQDVGTAVDWYQQKPGKAPKLLIYWASTRHTGVPSRFSGSGSGTDFTLTISSLQPEDFATYYCQQYNSYPLTFGQGTKVEIKRLEGQPKANPTVTLFPPSSEELQANKATLVCLISDFYPGAVTVAWKADGSPVKAGVETTKPSKQSNNKYAASSYLSLTPEQWKSHRSYSCQVTHEGSTVEKTVAPTECSGRADCGFTSESYQQGVLSATILYEILLGKATLYAVLVSALVLMAMVKRKDSRGRAKRSGSGATNFSLLKQAGDVEENPGPTSMDWIWRILFLVGAATGAHSFEEVQLVESGGGLVQPGGSLRLSCAASGYTFTEYTIHWVRQAPGKGLEWVANINPNNGGTTYNQKFEDRFTISRDNSKNTLYLQMNSLRAEDTAVYYCARGWNFDYWGQGTLVTVSSTRASTKGPSVFPLAPSSKSTSGGTAALGCLVKDYFPEPVTVSWNSGALTSGVHTFPAVLQSSGLYSLSSVVTVPSSSLGTQTYICNVNHKPSNTKVDKRVEPKSCIPEDTFFPSPESSCDVKLVEKSFETDTNLNFQNLSVIGFRILLLKVAGFNLLMTLRLWSS

SEQ ID NO: 20476 - protein, 446 aa, Artificial Sequence
  Synthetic Polypeptide
MALPVTALLLPLALLLHAARPDIQMTQSPSSLSASVGDRVTITCKASQDVGTAVDWYQQKPGKAPKLLIYWASTRHTGVPSRFSGSGSGTDFTLTISSLQPEDFATYYCQQYNSYPLTFGQGTKVEIKRGGGGSGGGGSGGGGSEVQLVESGGGLVQPGGSLRLSCAASGYTFTEYTIHWVRQAPGKGLEWVANINPNNGGTTYNQKFEDRFTISRDNSKNTLYLQMNSLRAEDTAVYYCARGWNFDYWGQGTLVTVSSTRDGNEEMGGITQTPYKVSISGTTVILTCPQYPGSEILWQHNDKNIGGDEDDKNIGSDEDHLSLKEFSELEQSGYYVCYPRGSKPEDANFYLYLRARVCENCMEMDVMSVATIVIVDICITGGLLLLVYYWSKNRKAKAKPVTRGAGAGGRQRGQNKERPPPVPNPDYEPIRKGQRDLYSGLNQRRI

SEQ ID NO: 20477 - protein, 411 aa, Artificial Sequence
  Synthetic Polypeptide
MALPVTALLLPLALLLHAARPDIQMTQSPSSLSASVGDRVTITCKASQDVGTAVDWYQQKPGKAPKLLIYWASTRHTGVPSRFSGSGSGTDFTLTISSLQPEDFATYYCQQYNSYPLTFGQGTKVEIKRGGGGSGGGGSGGGGSEVQLVESGGGLVQPGGSLRLSCAASGYTFTEYTIHWVRQAPGKGLEWVANINPNNGGTTYNQKFEDRFTISRDNSKNTLYLQMNSLRAEDTAVYYCARGWNFDYWGQGTLVTVSSTRFKIPIEELEDRVFVNCNTSITWVEGTVGTLLSDITRLDLGKRILDPRGIYRCNGTDIYKDKESTVQVHYRMCQSCVELDPATVAGIIVTDVIATLLLALGVFCFAGHETGRLSGAADTQALLRNDQVYQPLRDRDDAQYSHLGGNWARNK

SEQ ID NO: 20478 - protein, 421 aa, Artificial Sequence
  Synthetic Polypeptide
MALPVTALLLPLALLLHAARPDIQMTQSPSSLSASVGDRVTITCKASQDVGTAVDWYQQKPGKAPKLLIYWASTRHTGVPSRFSGSGSGTDFTLTISSLQPEDFATYYCQQYNSYPLTFGQGTKVEIKRGGGGSGGGGSGGGGSEVQLVESGGGLVQPGGSLRLSCAASGYTFTEYTIHWVRQAPGKGLEWVANINPNNGGTTYNQKFEDRFTISRDNSKNTLYLQMNSLRAEDTAVYYCARGWNFDYWGQGTLVTVSSTRQSIKGNHLVKVYDYQEDGSVLLTCDAEAKNITWFKDGKMIGFLTEDKKKWNLGSNAKDPRGMYQCKGSQNKSKPLQVYYRMCQNCIELNAATISGFLFAEIVSIFVLAVGVYFIAGQDGVRQSRASDKQTLLPNDQLYQPLKDREDDQYSHLQGNQLRRN

SEQ ID NO: 20479 - protein, 404 aa, Artificial Sequence
  Synthetic Polypeptide
MALPVTALLLPLALLLHAARPDIQMTQSPSSLSASVGDRVTITCKASQDVGTAVDWYQQKPGKAPKLLIYWASTRHTGVPSRFSGSGSGTDFTLTISSLQPEDFATYYCQQYNSYPLTFGQGTKVEIKRGGGGSGGGGSGGGGSEVQLVESGGGLVQPGGSLRLSCAASGYTFTEYTIHWVRQAPGKGLEWVANINPNNGGTTYNQKFEDRFTISRDNSKNTLYLQMNSLRAEDTAVYYCARGWNFDYWGQGTLVTVSSTRQSFGLLDPKLCYLLDGILFIYGVILTALFLRVKFSRSADAPAYQQGQNQLYNELNLGRREEYDVLDKRRGRDPEMGGKPQRRKNPQEGLYNELQKDKMAEAYSEIGMKGERRRGKGHDGLYQGLSTATKDTYDALHMQALPPR

SEQ ID NO: 20480 - protein, 446 aa, Artificial Sequence
  Synthetic Polypeptide
MALPVTALLLPLALLLHAARPEVQLVESGGGLVQPGGSLRLSCAASGYTFTEYTIHWVRQAPGKGLEWVANINPNNGGTTYNQKFEDRFTISRDNSKNTLYLQMNSLRAEDTAVYYCARGWNFDYWGQGTLVTVSSGGGGSGGGGSGGGGSDIQMTQSPSSLSASVGDRVTITCKASQDVGTAVDWYQQKPGKAPKLLIYWASTRHTGVPSRFSGSGSGTDFTLTISSLQPEDFATYYCQQYNSYPLTFGQGTKVEIKRTRDGNEEMGGITQTPYKVSISGTTVILTCPQYPGSEILWQHNDKNIGGDEDDKNIGSDEDHLSLKEFSELEQSGYYVCYPRGSKPEDANFYLYLRARVCENCMEMDVMSVATIVIVDICITGGLLLLVYYWSKNRKAKAKPVTRGAGAGGRQRGQNKERPPPVPNPDYEPIRKGQRDLYSGLNQRRI

SEQ ID NO: 20481 - protein, 411 aa, Artificial Sequence
  Synthetic Polypeptide
MALPVTALLLPLALLLHAARPEVQLVESGGGLVQPGGSLRLSCAASGYTFTEYTIHWVRQAPGKGLEWVANINPNNGGTTYNQKFEDRFTISRDNSKNTLYLQMNSLRAEDTAVYYCARGWNFDYWGQGTLVTVSSGGGGSGGGGSGGGGSDIQMTQSPSSLSASVGDRVTITCKASQDVGTAVDWYQQKPGKAPKLLIYWASTRHTGVPSRFSGSGSGTDFTLTISSLQPEDFATYYCQQYNSYPLTFGQGTKVEIKRTRFKIPIEELEDRVFVNCNTSITWVEGTVGTLLSDITRLDLGKRILDPRGIYRCNGTDIYKDKESTVQVHYRMCQSCVELDPATVAGIIVTDVIATLLLALGVFCFAGHETGRLSGAADTQALLRNDQVYQPLRDRDDAQYSHLGGNWARNK

SEQ ID NO: 20482 - protein, 421 aa, Artificial Sequence
  Synthetic Polypeptide
MALPVTALLLPLALLLHAARPEVQLVESGGGLVQPGGSLRLSCAASGYTFTEYTIHWVRQAPGKGLEWVANINPNNGGTTYNQKFEDRFTISRDNSKNTLYLQMNSLRAEDTAVYYCARGWNFDYWGQGTLVTVSSGGGGSGGGGSGGGGSDIQMTQSPSSLSASVGDRVTITCKASQDVGTAVDWYQQKPGKAPKLLIYWASTRHTGVPSRFSGSGSGTDFTLTISSLQPEDFATYYCQQYNSYPLTFGQGTKVEIKRTRQSIKGNHLVKVYDYQEDGSVLLTCDAEAKNITWFKDGKMIGFLTEDKKKWNLGSNAKDPRGMYQCKGSQNKSKPLQVYYRMCQNCIELNAATISGFLFAEIVSIFVLAVGVYFIAGQDGVRQSRASDKQTLLPNDQLYQPLKDREDDQYSHLQGNQLRRN

SEQ ID NO: 20483 - protein, 404 aa, Artificial Sequence
  Synthetic Polypeptide
MALPVTALLLPLALLLHAARPEVQLVESGGGLVQPGGSLRLSCAASGYTFTEYTIHWVRQAPGKGLEWVANINPNNGGTTYNQKFEDRFTISRDNSKNTLYLQMNSLRAEDTAVYYCARGWNFDYWGQGTLVTVSSGGGGSGGGGSGGGGSDIQMTQSPSSLSASVGDRVTITCKASQDVGTAVDWYQQKPGKAPKLLIYWASTRHTGVPSRFSGSGSGTDFTLTISSLQPEDFATYYCQQYNSYPLTFGQGTKVEIKRTRQSFGLLDPKLCYLLDGILFIYGVILTALFLRVKFSRSADAPAYQQGQNQLYNELNLGRREEYDVLDKRRGRDPEMGGKPQRRKNPQEGLYNELQKDKMAEAYSEIGMKGERRRGKGHDGLYQGLSTATKDTYDALHMQALPPR

SEQ ID NO: 20484 - protein, 637 aa, Artificial Sequence
  Synthetic Polypeptide
MALPVTALLLPLALLLHAARPDIQMTQSPSSLSASVGDRVTITCKASQDVGTAVDWYQQKPGKAPKLLIYWASTRHTGVPSRFSGSGSGTDFTLTISSLQPEDFATYYCQQYNSYPLTFGQGTKVEIKRGGGGSGGGGSGGGGSEVQLVESGGGLVQPGGSLRLSCAASGYTFTEYTIHWVRQAPGKGLEWVANINPNNGGTTYNQKFEDRFTISRDNSKNTLYLQMNSLRAEDTAVYYCARGWNFDYWGQGTLVTVSSTRGSGIQNPDPAVYQLRDSKSSDKSVCLFTDFDSQTNVSQSKDSDVYITDKTVLDMRSMDFKSNSAVAWSNKSDFACANAFNNSIIPEDTFFPSPESSCDVKLVEKSFETDTNLNFQNLSVIGFRILLLKVAGFNLLMTLRLWSSRAKRSGSGVKQTLNFDLLKLAGDVESNPGPSRGHMTEYKPTVRLATRDDVPRAVRTLAAAFADYPATRHTVDPDRHIERVTELQELFLTRVGLDIGKVWVADDGAAVAVWTTPESVEAGAVFAEIGPRMAELSGSRLAAQQQMEGLLAPHRPKEPAWFLATVGVSPDHQGKGLGSAVVLPGVEAAERAGVPAFLETSAPRNLPFYERLGFTVTADVEVPEGPRTWCMTRKPGA

SEQ ID NO: 20485 - protein, 669 aa, Artificial Sequence
  Synthetic Polypeptide
MALPVTALLLPLALLLHAARPDIQMTQSPSSLSASVGDRVTITCKASQDVGTAVDWYQQKPGKAPKLLIYWASTRHTGVPSRFSGSGSGTDFTLTISSLQPEDFATYYCQQYNSYPLTFGQGTKVEIKRGGGGSGGGGSGGGGSEVQLVESGGGLVQPGGSLRLSCAASGYTFTEYTIHWVRQAPGKGLEWVANINPNNGGTTYNQKFEDRFTISRDNSKNTLYLQMNSLRAEDTAVYYCARGWNFDYWGQGTLVTVSSLEDLKNVFPPEVAVFEPSEAEISHTQKATLVCLATGFYPDHVELSWWVNGKEVHSGVSTDPQPLKEQPALNDSRYCLSSRLRVSATFWQNPRNHFRCQVQFYGLSENDEWTQDRAKPVTQIVSAEAWGRADCGFTSESYQQGVLSATILYEILLGKATLYAVLVSALVLMAMVKRKDSRGRAKRSGSGATNFSLLKQAGDVEENPGPTRGHMTEYKPTVRLATRDDVPRAVRTLAAAFADYPATRHTVDPDRHIERVTELQELFLTRVGLDIGKVWVADDGAAVAVWTTPESVEAGAVFAEIGPRMAELSGSRLAAQQQMEGLLAPHRPKEPAWFLATVGVSPDHQGKGLGSAVVLPGVEAAERAGVPAFLETSAPRNLPFYERLGFTVTADVEVPEGPRTWCMTRKPGA

SEQ ID NO: 20486 - protein, 719 aa, Artificial Sequence
  Synthetic Polypeptide
MALPVTALLLPLALLLHAARPDIQMTQSPSSLSASVGDRVTITCKASQDVGTAVDWYQQKPGKAPKLLIYWASTRHTGVPSRFSGSGSGTDFTLTISSLQPEDFATYYCQQYNSYPLTFGQGTKVEIKRGGGGSGGGGSGGGGSEVQLVESGGGLVQPGGSLRLSCAASGYTFTEYTIHWVRQAPGKGLEWVANINPNNGGTTYNQKFEDRFTISRDNSKNTLYLQMNSLRAEDTAVYYCARGWNFDYWGQGTLVTVSSTREQKLISEEDLGSGTPFPSLAPPIMLLVDGKQQMVVVCLVLDVAPPGLDSPIWFSAGNGSALDAFTYGPSPATDGTWTNLAHLSLPSEELASWEPLVCHTGPGAEGHSRSTQPMHLSGEASTARTCPQEPLRGTPGGALWLGVLRLLLFKLLLFDLLLTCSCLCDPAGPLPSPATTTRLRALGSHRLHPATETGGREATSSPRPQPRDRRWGDTPPGRKPGSPVRAKRSGSGVKQTLNFDLLKLAGDVESNPGPSRSRGHMTEYKPTVRLATRDDVPRAVRTLAAAFADYPATRHTVDPDRHIERVTELQELFLTRVGLDIGKVWVADDGAAVAVWTTPESVEAGAVFAEIGPRMAELSGSRLAAQQQMEGLLAPHRPKEPAWFLATVGVSPDHQGKGLGSAVVLPGVEAAERAGVPAFLETSAPRNLPFYERLGFTVTADVEVPEGPRTWCMTRKPGA

SEQ ID NO: 20487 - protein, 539 aa, Artificial Sequence
  Synthetic Polypeptide
MALPVTALLLPLALLLHAARPDIQMTQSPSSLSASVGDRVTITCKASQDVGTAVDWYQQKPGKAPKLLIYWASTRHTGVPSRFSGSGSGTDFTLTISSLQPEDFATYYCQQYNSYPLTFGQGTKVEIKRLEDLKNVFPPEVAVFEPSEAEISHTQKATLVCLATGFYPDHVELSWWVNGKEVHSGVSTDPQPLKEQPALNDSRYCLSSRLRVSATFWQNPRNHFRCQVQFYGLSENDEWTQDRAKPVTQIVSAEAWGRADCGFTSESYQQGVLSATILYEILLGKATLYAVLVSALVLMAMVKRKDSRGRAKRSGSGATNFSLLKQAGDVEENPGPTRGHMTEYKPTVRLATRDDVPRAVRTLAAAFADYPATRHTVDPDRHIERVTELQELFLTRVGLDIGKVWVADDGAAVAVWTTPESVEAGAVFAEIGPRMAELSGSRLAAQQQMEGLLAPHRPKEPAWFLATVGVSPDHQGKGLGSAVVLPGVEAAERAGVPAFLETSAPRNLPFYERLGFTVTADVEVPEGPRTWCMTRKPGA

SEQ ID NO: 20488 - protein, 309 aa, Artificial Sequence
  Synthetic Polypeptide
MALPVTALLLPLALLLHAARPDIQMTQSPSSLSASVGDRVTITCKASQDVGTAVDWYQQKPGKAPKLLIYWASTRHTGVPSRFSGSGSGTDFTLTISSLQPEDFATYYCQQYNSYPLTFGQGTKVEIKRLEDLKNVFPPEVAVFEPSEAEISHTQKATLVCLATGFYPDHVELSWWVNGKEVHSGVSTDPQPLKEQPALNDSRYCLSSRLRVSATFWQNPRNHFRCQVQFYGLSENDEWTQDRAKPVTQIVSAEAWGRADCGFTSESYQQGVLSATILYEILLGKATLYAVLVSALVLMAMVKRKDSRG

SEQ ID NO: 20489 - protein, 444 aa, Artificial Sequence
  Synthetic Polypeptide
MDWIWRILFLVGAATGAHSFEEVQLVESGGGLVQPGGSLRLSCAASGYTFTEYTIHWVRQAPGKGLEWVANINPNNGGTTYNQKFEDRFTISRDNSKNTLYLQMNSLRAEDTAVYYCARGWNFDYWGQGTLVTVSSTRIQNPDPAVYQLRDSKSSDKSVCLFTDFDSQTNVSQSKDSDVYITDKTVLDMRSMDFKSNSAVAWSNKSDFACANAFNNSIIPEDTFFPSPESSCDVKLVEKSFETDTNLNFQNLSVIGFRILLLKVAGFNLLMTLRLWSSRAKRSGSGVKQTLNFDLLKLAGDVESNPGPSRGHMAKPLSQEESTLIERATATINSIPISEDYSVASAALSSDGRIFTGVNVYHFTGGPCAELVVLGTAAAAAAGNLTCIVAIGNENRGILSPCGRCRQVLLDLHPGIKAIVKDSDGQPTAVGIRELLPSGYVWEG

SEQ ID NO: 20490 - protein, 278 aa, Artificial Sequence
  Synthetic Polypeptide
MDWIWRILFLVGAATGAHSFEEVQLVESGGGLVQPGGSLRLSCAASGYTFTEYTIHWVRQAPGKGLEWVANINPNNGGTTYNQKFEDRFTISRDNSKNTLYLQMNSLRAEDTAVYYCARGWNFDYWGQGTLVTVSSTRIQNPDPAVYQLRDSKSSDKSVCLFTDFDSQTNVSQSKDSDVYITDKTVLDMRSMDFKSNSAVAWSNKSDFACANAFNNSIIPEDTFFPSPESSCDVKLVEKSFETDTNLNFQNLSVIGFRILLLKVAGFNLLMTLRLWSS

SEQ ID NO: 20491 - protein, 557 aa, Artificial Sequence
  Synthetic Polypeptide
MALPVTALLLPLALLLHAARPDIQMTQSPSSLSASVGDRVTITCKASQDVGTAVDWYQQKPGKAPKLLIYWASTRHTGVPSRFSGSGSGTDFTLTISSLQPEDFATYYCQQYNSYPLTFGQGTKVEIKRLEGKPIPNPLLGLDSTGSGEDLKNVFPPEVAVFEPSEAEISHTQKATLVCLATGFYPDHVELSWWVNGKEVHSGVCTDPQPLKEQPALNDSRYCLSSRLRVSATFWQNPRNHFRCQVQFYGLSENDEWTQDRAKPVTQIVSAEAWGRADCGFTSESYQQGVLSATILYEILLGKATLYAVLVSALVLMAMVKRKDSRGRAKRSGSGATNFSLLKQAGDVEENPGPTRGHMTEYKPTVRLATRDDVPRAVRTLAAAFADYPATRHTVDPDRHIERVTELQELFLTRVGLDIGKVWVADDGAAVAVWTTPESVEAGAVFAEIGPRMAELSGSRLAAQQQMEGLLAPHRPKEPAWFLATVGVSPDHQGKGLGSAVVLPGVEAAERAGVPAFLETSAPRNLPFYERLGFTVTADVEVPEGPRTWCMTRKPGA

SEQ ID NO: 20492 - protein, 327 aa, Artificial Sequence
  Synthetic Polypeptide
MALPVTALLLPLALLLHAARPDIQMTQSPSSLSASVGDRVTITCKASQDVGTAVDWYQQKPGKAPKLLIYWASTRHTGVPSRFSGSGSGTDFTLTISSLQPEDFATYYCQQYNSYPLTFGQGTKVEIKRLEGKPIPNPLLGLDSTGSGEDLKNVFPPEVAVFEPSEAEISHTQKATLVCLATGFYPDHVELSWWVNGKEVHSGVCTDPQPLKEQPALNDSRYCLSSRLRVSATFWQNPRNHFRCQVQFYGLSENDEWTQDRAKPVTQIVSAEAWGRADCGFTSESYQQGVLSATILYEILLGKATLYAVLVSALVLMAMVKRKDSRG

SEQ ID NO: 20493 - protein, 456 aa, Artificial Sequence
  Synthetic Polypeptide
MDWIWRILFLVGAATGAHSFEEVQLVESGGGLVQPGGSLRLSCAASGYTFTEYTIHWVRQAPGKGLEWVANINPNNGGTTYNQKFEDRFTISRDNSKNTLYLQMNSLRAEDTAVYYCARGWNFDYWGQGTLVTVSSTREQKLISEEDGSGIQNPDPAVYQLRDSKSSDKSVCLFTDFDSQTNVSQSKDSDVYITDKCVLDMRSMDFKSNSAVAWSNKSDFACANAFNNSIIPEDTFFPSPESSCDVKLVEKSFETDTNLNFQNLSVIGFRILLLKVAGFNLLMTLRLWSSRAKRSGSGVKQTLNFDLLKLAGDVESNPGPSRGHMAKPLSQEESTLIERATATINSIPISEDYSVASAALSSDGRIFTGVNVYHFTGGPCAELVVLGTAAAAAAGNLTCIVAIGNENRGILSPCGRCRQVLLDLHPGIKAIVKDSDGQPTAVGIRELLPSGYVWEG

SEQ ID NO: 20494 - protein, 290 aa, Artificial Sequence
  Synthetic Polypeptide
MDWIWRILFLVGAATGAHSFEEVQLVESGGGLVQPGGSLRLSCAASGYTFTEYTIHWVRQAPGKGLEWVANINPNNGGTTYNQKFEDRFTISRDNSKNTLYLQMNSLRAEDTAVYYCARGWNFDYWGQGTLVTVSSTREQKLISEEDGSGIQNPDPAVYQLRDSKSSDKSVCLFTDFDSQTNVSQSKDSDVYITDKCVLDMRSMDFKSNSAVAWSNKSDFACANAFNNSIIPEDTFFPSPESSCDVKLVEKSFETDTNLNFQNLSVIGFRILLLKVAGFNLLMTLRLWSS

SEQ ID NO: 20495 - protein, 637 aa, Artificial Sequence
  Synthetic Polypeptide
MALPVTALLLPLALLLHAARPDIQMTQSPSSLSASVGDRVTITCKASQDVGTAVDWYQQKPGKAPKLLIYWASTRHTGVPSRFSGSGSGTDFTLTISSLQPEDFATYYCQQYNSYPLTFGQGTKVEIKRGGGGSGGGGSGGGGSEVQLVESGGGLVQPGGSLRLSCAASGYTFTEYTIHWVRQAPGKGLEWVANINPNNGGTTYNQKFEDRFTISRDNSKNTLYLQMNSLRAEDTAVYYCARGWNFDYWGQGTLVTVSSTRGSGIQNPDPAVYQLRDSKSSDKSVCLFTDFDSQTNVSQSKDSDVYITDKTVLDMRSMDFKSNSAVAWSNKSDFACANAFNNSIIPEDTFFPSSDVPCDVKLVEKSFETDTNLNFQNLSVIGFRILLLKVAGFNLLMTLRLWSSRAKRSGSGVKQTLNFDLLKLAGDVESNPGPSRGHMTEYKPTVRLATRDDVPRAVRTLAAAFADYPATRHTVDPDRHIERVTELQELFLTRVGLDIGKVWVADDGAAVAVWTTPESVEAGAVFAEIGPRMAELSGSRLAAQQQMEGLLAPHRPKEPAWFLATVGVSPDHQGKGLGSAVVLPGVEAAERAGVPAFLETSAPRNLPFYERLGFTVTADVEVPEGPRTWCMTRKPGA

SEQ ID NO: 20496 - protein, 669 aa, Artificial Sequence
  Synthetic Polypeptide
MALPVTALLLPLALLLHAARPDIQMTQSPSSLSASVGDRVTITCKASQDVGTAVDWYQQKPGKAPKLLIYWASTRHTGVPSRFSGSGSGTDFTLTISSLQPEDFATYYCQQYNSYPLTFGQGTKVEIKRGGGGSGGGGSGGGGSEVQLVESGGGLVQPGGSLRLSCAASGYTFTEYTIHWVRQAPGKGLEWVANINPNNGGTTYNQKFEDRFTISRDNSKNTLYLQMNSLRAEDTAVYYCARGWNFDYWGQGTLVTVSSLEDLKNVFPPEVAVFEPSKAEIAHTQKATLVCLATGFYPDHVELSWWVNGKEVHSGVSTDPQPLKEQPALNDSRYCLSSRLRVSATFWQNPRNHFRCQVQFYGLSENDEWTQDRAKPVTQIVSAEAWGRADCGITSASYHQGVLSATILYEILLGKATLYAVLVSALVLMAMVKRKDSRGRAKRSGSGATNFSLLKQAGDVEENPGPTRGHMTEYKPTVRLATRDDVPRAVRTLAAAFADYPATRHTVDPDRHIERVTELQELFLTRVGLDIGKVWVADDGAAVAVWTTPESVEAGAVFAEIGPRMAELSGSRLAAQQQMEGLLAPHRPKEPAWFLATVGVSPDHQGKGLGSAVVLPGVEAAERAGVPAFLETSAPRNLPFYERLGFTVTADVEVPEGPRTWCMTRKPGA

SEQ ID NO: 20497 - protein, 692 aa, Artificial Sequence
  Synthetic Polypeptide
MALPVTALLLPLALLLHAARPDIQMTQSPSSLSASVGDRVTITCKASQDVGTAVDWYQQKPGKAPKLLIYWASTRHTGVPSRFSGSGSGTDFTLTISSLQPEDFATYYCQQYNSYPLTFGQGTKVEIKRGGGGSGGGGSGGGGSEVQLVESGGGLVQPGGSLRLSCAASGYTFTEYTIHWVRQAPGKGLEWVANINPNNGGTTYNQKFEDRFTISRDNSKNTLYLQMNSLRAEDTAVYYCARGWNFDYWGQGTLVTVSSTRGSGGGGSGGGGSGDGNEEMGGITQTPYKVSISGTTVILTCPQYPGSEILWQHNDKNIGGDEDDKNIGSDEDHLSLKEFSELEQSGYYVCYPRGSKPEDANFYLYLRARVCENCMEMDVMSVATIVIVDICITGGLLLLVYYWSKNRKAKAKPVTRGAGAGGRQRGQNKERPPPVPNPDYEPIRKGQRDLYSGLNQRRIRAKRSGSGVKQTLNFDLLKLAGDVESNPGPSRGHMTEYKPTVRLATRDDVPRAVRTLAAAFADYPATRHTVDPDRHIERVTELQELFLTRVGLDIGKVWVADDGAAVAVWTTPESVEAGAVFAEIGPRMAELSGSRLAAQQQMEGLLAPHRPKEPAWFLATVGVSPDHQGKGLGSAVVLPGVEAAERAGVPAFLETSAPRNLPFYERLGFTVTADVEVPEGPRTWCMTRKPGA

SEQ ID NO: 20498 - protein, 657 aa, Artificial Sequence
  Synthetic Polypeptide
MALPVTALLLPLALLLHAARPDIQMTQSPSSLSASVGDRVTITCKASQDVGTAVDWYQQKPGKAPKLLIYWASTRHTGVPSRFSGSGSGTDFTLTISSLQPEDFATYYCQQYNSYPLTFGQGTKVEIKRGGGGSGGGGSGGGGSEVQLVESGGGLVQPGGSLRLSCAASGYTFTEYTIHWVRQAPGKGLEWVANINPNNGGTTYNQKFEDRFTISRDNSKNTLYLQMNSLRAEDTAVYYCARGWNFDYWGQGTLVTVSSTRGSGGGGSGGGGSGFKIPIEELEDRVFVNCNTSITWVEGTVGTLLSDITRLDLGKRILDPRGIYRCNGTDIYKDKESTVQVHYRMCQSCVELDPATVAGIIVTDVIATLLLALGVFCFAGHETGRLSGAADTQALLRNDQVYQPLRDRDDAQYSHLGGNWARNKRAKRSGSGVKQTLNFDLLKLAGDVESNPGPSRGHMTEYKPTVRLATRDDVPRAVRTLAAAFADYPATRHTVDPDRHIERVTELQELFLTRVGLDIGKVWVADDGAAVAVWTTPESVEAGAVFAEIGPRMAELSGSRLAAQQQMEGLLAPHRPKEPAWFLATVGVSPDHQGKGLGSAVVLPGVEAAERAGVPAFLETSAPRNLPFYERLGFTVTADVEVPEGPRTWCMTRKPGA

SEQ ID NO: 20499 - protein, 667 aa, Artificial Sequence
  Synthetic Polypeptide
MALPVTALLLPLALLLHAARPDIQMTQSPSSLSASVGDRVTITCKASQDVGTAVDWYQQKPGKAPKLLIYWASTRHTGVPSRFSGSGSGTDFTLTISSLQPEDFATYYCQQYNSYPLTFGQGTKVEIKRGGGGSGGGGSGGGGSEVQLVESGGGLVQPGGSLRLSCAASGYTFTEYTIHWVRQAPGKGLEWVANINPNNGGTTYNQKFEDRFTISRDNSKNTLYLQMNSLRAEDTAVYYCARGWNFDYWGQGTLVTVSSTRGSGGGGSGGGGSGQSIKGNHLVKVYDYQEDGSVLLTCDAEAKNITWFKDGKMIGFLTEDKKKWNLGSNAKDPRGMYQCKGSQNKSKPLQVYYRMCQNCIELNAATISGFLFAEIVSIFVLAVGVYFIAGQDGVRQSRASDKQTLLPNDQLYQPLKDREDDQYSHLQGNQLRRNRAKRSGSGVKQTLNFDLLKLAGDVESNPGPSRGHMTEYKPTVRLATRDDVPRAVRTLAAAFADYPATRHTVDPDRHIERVTELQELFLTRVGLDIGKVWVADDGAAVAVWTTPESVEAGAVFAEIGPRMAELSGSRLAAQQQMEGLLAPHRPKEPAWFLATVGVSPDHQGKGLGSAVVLPGVEAAERAGVPAFLETSAPRNLPFYERLGFTVTADVEVPEGPRTWCMTRKPGA

SEQ ID NO: 20500 - protein, 650 aa, Artificial Sequence
  Synthetic Polypeptide
MALPVTALLLPLALLLHAARPDIQMTQSPSSLSASVGDRVTITCKASQDVGTAVDWYQQKPGKAPKLLIYWASTRHTGVPSRFSGSGSGTDFTLTISSLQPEDFATYYCQQYNSYPLTFGQGTKVEIKRGGGGSGGGGSGGGGSEVQLVESGGGLVQPGGSLRLSCAASGYTFTEYTIHWVRQAPGKGLEWVANINPNNGGTTYNQKFEDRFTISRDNSKNTLYLQMNSLRAEDTAVYYCARGWNFDYWGQGTLVTVSSTRGSGGGGSGGGGSGQSFGLLDPKLCYLLDGILFIYGVILTALFLRVKFSRSADAPAYQQGQNQLYNELNLGRREEYDVLDKRRGRDPEMGGKPQRRKNPQEGLYNELQKDKMAEAYSEIGMKGERRRGKGHDGLYQGLSTATKDTYDALHMQALPPRRAKRSGSGVKQTLNFDLLKLAGDVESNPGPSRGHMTEYKPTVRLATRDDVPRAVRTLAAAFADYPATRHTVDPDRHIERVTELQELFLTRVGLDIGKVWVADDGAAVAVWTTPESVEAGAVFAEIGPRMAELSGSRLAAQQQMEGLLAPHRPKEPAWFLATVGVSPDHQGKGLGSAVVLPGVEAAERAGVPAFLETSAPRNLPFYERLGFTVTADVEVPEGPRTWCMTRKPGA

SEQ ID NO: 20501 - protein, 751 aa, Artificial Sequence
  Synthetic Polypeptide
MALPVTALLLPLALLLHAARPEVQLVESGGGLVQPGGSLRLSCAASGFSFSDFWMSWVRQAPGKGLEWVATISQAGSEKDYVDSVKGRFTISRDNAKKSLYLQMNSLRAEDTAVYYCASGVYSFDYRGQGTLVTVSSGTGGGGSGGGGSGGGGSEFDIQMTQSPSSLSASVGDRVTITCKASQDVGTAVDWYQQKPGKAPKLLIYWASTRHTGVPSRFSGSGSGTDFTLTISSLQPEDFATYYCQQYNSYPLTFGQGTKVEIKRLEDLKNVFPPEVAVFEPSEAEISHTQKATLVCLATGFYPDHVELSWWVNGKEVHSGVCTDPQPLKEQPALNDSRYCLSSRLRVSATFWQNPRNHFRCQVQFYGLSENDEWTQDRAKPVTQIVSAEAWGRADCGFTSESYQQGVLSATILYEILLGKATLYAVLVSALVLMAMVKRKDSRGRAKRSGSGATNFSLLKQAGDVEENPGPTSMDWIWRILFLVGAATGAHSFEEVQLVESGGGLVQPGGSLRLSCAASGYTFTEYTIHWVRQAPGKGLEWVANINPNNGGTTYNQKFEDRFTISRDNSKNTLYLQMNSLRAEDTAVYYCARGWNFDYWGQGTLVTVSSTRIQNPDPAVYQLRDSKSSDKSVCLFTDFDSQTNVSQSKDSDVYITDKCVLDMRSMDFKSNSAVAWSNKSDFACANAFNNSIIPEDTFFPSPESSCDVKLVEKSFETDTNLNFQNLSVIGFRILLLKVAGFNLLMTLRLWSS

SEQ ID NO: 20502 - protein, 755 aa, Artificial Sequence
  Synthetic Polypeptide
MALPVTALLLPLALLLHAARPEVQLVESGGGLVQPGGSLRLSCAASGFSFSDFWMSWVRQAPGKGLEWVATISQAGSEKDYVDSVKGRFTISRDNAKKSLYLQMNSLRAEDTAVYYCASGVYSFDYRGQGTLVTVSSGTGGGGSGGGGSGGGGSEFDIQMTQSPSSLSASVGDRVTITCKASQDVGTAVDWYQQKPGKAPKLLIYWASTRHTGVPSRFSGSGSGTDFTLTISSLQPEDFATYYCQQYNSYPLTFGQGTKVEIKRLEIQNPDPAVYQLRDSKSSDKSVCLFTDFDSQTNVSQSKDSDVYITDKCVLDMRSMDFKSNSAVAWSNKSDFACANAFNNSIIPEDTFFPSPESSCDVKLVEKSFETDTNLNFQNLSVIGFRILLLKVAGFNLLMTLRLWSSRAKRSGSGVKQTLNFDLLKLAGDVESNPGPTSMDWIWRILFLVGAATGAHSFEEVQLVESGGGLVQPGGSLRLSCAASGYTFTEYTIHWVRQAPGKGLEWVANINPNNGGTTYNQKFEDRFTISRDNSKNTLYLQMNSLRAEDTAVYYCARGWNFDYWGQGTLVTVSSTREDLKNVFPPEVAVFEPSEAEISHTQKATLVCLATGFYPDHVELSWWVNGKEVHSGVCTDPQPLKEQPALNDSRYCLSSRLRVSATFWQNPRNHFRCQVQFYGLSENDEWTQDRAKPVTQIVSAEAWGRADCGFTSESYQQGVLSATILYEILLGKATLYAVLVSALVLMAMVKRKDSRG

SEQ ID NO: 20503 - protein, 947 aa, Artificial Sequence
  Synthetic Polypeptide
MALPVTALLLPLALLLHAARPEVQLVESGGGLVQPGGSLRLSCAASGFSFSDFWMSWVRQAPGKGLEWVATISQAGSEKDYVDSVKGRFTISRDNAKKSLYLQMNSLRAEDTAVYYCASGVYSFDYRGQGTLVTVSSGTGGGGSGGGGSGGGGSEFDIQMTQSPSSLSASVGDRVTITCKASQDVGTAVDWYQQKPGKAPKLLIYWASTRHTGVPSRFSGSGSGTDFTLTISSLQPEDFATYYCQQYNSYPLTFGQGTKVEIKRLEDLKNVFPPEVAVFEPSEAEISHTQKATLVCLATGFYPDHVELSWWVNGKEVHSGVSTDPQPLKEQPALNDSRYCLSSRLRVSATFWQNPRNHFRCQVQFYGLSENDEWTQDRAKPVTQIVSAEAWGRADCGSQSFGLLDPKLCYLLDGILFIYGVILTALFLRVKFSRSADAPAYQQGQNQLYNELNLGRREEYDVLDKRRGRDPEMGGKPQRRKNPQEGLYNELQKDKMAEAYSEIGMKGERRRGKGHDGLYQGLSTATKDTYDALHMQALPPRRAKRSGSGATNFSLLKQAGDVEENPGPTSMDWIWRILFLVGAATGAHSFEEVQLVESGGGLVQPGGSLRLSCAASGYTFTEYTIHWVRQAPGKGLEWVANINPNNGGTTYNQKFEDRFTISRDNSKNTLYLQMNSLRAEDTAVYYCARGWNFDYWGQGTLVTVSSTRIQNPDPAVYQLRDSKSSDKSVCLFTDFDSQTNVSQSKDSDVYITDKTVLDMRSMDFKSNSAVAWSNKSDFACANAFNNSIIPEDTFFPSPESSCGTQSFGLLDPKLCYLLDGILFIYGVILTALFLRVKFSRSADAPAYQQGQNQLYNELNLGRREEYDVLDKRRGRDPEMGGKPQRRKNPQEGLYNELQKDKMAEAYSEIGMKGERRRGKGHDGLYQGLSTATKDTYDALHMQALPPR

SEQ ID NO: 20504 - protein, 777 aa, Artificial Sequence
  Synthetic Polypeptide
MALPVTALLLPLALLLHAARPEVQLVESGGGLVQPGGSLRLSCAASGFSFSDFWMSWVRQAPGKGLEWVATISQAGSEKDYVDSVKGRFTISRDNAKKSLYLQMNSLRAEDTAVYYCASGVYSFDYRGQGTLVTVSSGTGGGGSGGGGSGGGGSEFDIQMTQSPSSLSASVGDRVTITCKASQDVGTAVDWYQQKPGKAPKLLIYWASTRHTGVPSRFSGSGSGTDFTLTISSLQPEDFATYYCQQYNSYPLTFGQGTKVEIKRLEGQPKANPTVTLFPPSSEELQANKATLVCLISDFYPGAVTVAWKADGSPVKAGVETTKPSKQSNNKYAASSYLSLTPEQWKSHRSYSCQVTHEGSTVEKTVAPTECSPIKTDVITMDPKDNCSKDANDTLLLQLTNTSAYYMYLLLLLKSVVYFAIITCCLLRRTAFCCNGEKSRAKRSGSGATNFSLLKQAGDVEENPGPTSMDWIWRILFLVGAATGAHSFEEVQLVESGGGLVQPGGSLRLSCAASGYTFTEYTIHWVRQAPGKGLEWVANINPNNGGTTYNQKFEDRFTISRDNSKNTLYLQMNSLRAEDTAVYYCARGWNFDYWGQGTLVTVSSTRASTKGPSVFPLAPSSKSTSGGTAALGCLVKDYFPEPVTVSWNSGALTSGVHTFPAVLQSSGLYSLSSVVTVPSSSLGTQTYICNVNHKPSNTKVDKRVEPKSCEVKTDSTDHVKPKETENTKQPSKSCHKPKAIVHTEKVNMMSLTVLGLRMLFAKTVAVNFLLTAKLFFL

SEQ ID NO: 20505 - protein, 758 aa, Artificial Sequence
  Synthetic Polypeptide
MALPVTALLLPLALLLHAARPEVQLVESGGGLVQPGGSLRLSCAASGFSFSDFWMSWVRQAPGKGLEWVATISQAGSEKDYVDSVKGRFTISRDNAKKSLYLQMNSLRAEDTAVYYCASGVYSFDYRGQGTLVTVSSGTGGGGSGGGGSGGGGSEFDIQMTQSPSSLSASVGDRVTITCKASQDVGTAVDWYQQKPGKAPKLLIYWASTRHTGVPSRFSGSGSGTDFTLTISSLQPEDFATYYCQQYNSYPLTFGQGTKVEIKRLEGQPKANPTVTLFPPSSEELQANKATLVCLISDFYPGAVTVAWKADGSPVKAGVETTKPSKQSNNKYAASSYLSLTPEQWKSHRSYSCQVTHEGSTVEKTVAPTECSGRADCGFTSESYQQGVLSATILYEILLGKATLYAVLVSALVLMAMVKRKDSRGRAKRSGSGVKQTLNFDLLKLAGDVESNPGPTSMDWIWRILFLVGAATGAHSFEEVQLVESGGGLVQPGGSLRLSCAASGYTFTEYTIHWVRQAPGKGLEWVANINPNNGGTTYNQKFEDRFTISRDNSKNTLYLQMNSLRAEDTAVYYCARGWNFDYWGQGTLVTVSSTRASTKGPSVFPLAPSSKSTSGGTAALGCLVKDYFPEPVTVSWNSGALTSGVHTFPAVLQSSGLYSLSSVVTVPSSSLGTQTYICNVNHKPSNTKVDKRVEPKSCIPEDTFFPSPESSCDVKLVEKSFETDTNLNFQNLSVIGFRILLLKVAGFNLLMTLRLWSS

SEQ ID NO: 20506 - protein, 892 aa, Artificial Sequence
  Synthetic Polypeptide
MALPVTALLLPLALLLHAARPEVQLVESGGGLVQPGGSLRLSCAASGFSFSDFWMSWVRQAPGKGLEWVATISQAGSEKDYVDSVKGRFTISRDNAKKSLYLQMNSLRAEDTAVYYCASGVYSFDYRGQGTLVTVSSGTGGGGSGGGGSGGGGSEFDIQMTQSPSSLSASVGDRVTITCKASQDVGTAVDWYQQKPGKAPKLLIYWASTRHTGVPSRFSGSGSGTDFTLTISSLQPEDFATYYCQQYNSYPLTFGQGTKVEIKRLEIQNPDPAVYQLRDSKSSDKSVCLFTDFDSQTNVSQSKDSDVYITDKCVLDMRSMDFKSNSAVAWSNKSDFACANAFNNSIIPEDTFFPSPESSCDVKLVEKSFETDTNLNFQNLSVIGFRILLLKVAGFNLLMTLRLWSSRAKRSGSGVKQTLNFDLLKLAGDVESNPGPTSMDWIWRILFLVGAATGAHSGPQLQLQESGPGLVKPSETLSLTCTVSGDSISSGDYYWGWIRQPPGKGLEWIGHIYYSGVTYYNPSLKSRVTISVDTSRNQFSLKLSSVTAADTAVYYCTREDSSNWRSRGQGTLVTVSSGSGGGGSGGGGSGGGGSFEEVQLVESGGGLVQPGGSLRLSCAASGYTFTEYTIHWVRQAPGKGLEWVANINPNNGGTTYNQKFEDRFTISRDNSKNTLYLQMNSLRAEDTAVYYCARGWNFDYWGQGTLVTVSSTREDLKNVFPPEVAVFEPSEAEISHTQKATLVCLATGFYPDHVELSWWVNGKEVHSGVCTDPQPLKEQPALNDSRYCLSSRLRVSATFWQNPRNHFRCQVQFYGLSENDEWTQDRAKPVTQIVSAEAWGRADCGFTSESYQQGVLSATILYEILLGKATLYAVLVSALVLMAMVKRKDSRG

SEQ ID NO: 20507 - protein, 1084 aa, Artificial Sequence
  Synthetic Polypeptide
MALPVTALLLPLALLLHAARPEVQLVESGGGLVQPGGSLRLSCAASGFSFSDFWMSWVRQAPGKGLEWVATISQAGSEKDYVDSVKGRFTISRDNAKKSLYLQMNSLRAEDTAVYYCASGVYSFDYRGQGTLVTVSSGTGGGGSGGGGSGGGGSEFDIQMTQSPSSLSASVGDRVTITCKASQDVGTAVDWYQQKPGKAPKLLIYWASTRHTGVPSRFSGSGSGTDFTLTISSLQPEDFATYYCQQYNSYPLTFGQGTKVEIKRLEDLKNVFPPEVAVFEPSEAEISHTQKATLVCLATGFYPDHVELSWWVNGKEVHSGVSTDPQPLKEQPALNDSRYCLSSRLRVSATFWQNPRNHFRCQVQFYGLSENDEWTQDRAKPVTQIVSAEAWGRADCGSQSFGLLDPKLCYLLDGILFIYGVILTALFLRVKFSRSADAPAYQQGQNQLYNELNLGRREEYDVLDKRRGRDPEMGGKPQRRKNPQEGLYNELQKDKMAEAYSEIGMKGERRRGKGHDGLYQGLSTATKDTYDALHMQALPPRRAKRSGSGATNFSLLKQAGDVEENPGPTSMDWIWRILFLVGAATGAHSGPQLQLQESGPGLVKPSETLSLTCTVSGDSISSGDYYWGWIRQPPGKGLEWIGHIYYSGVTYYNPSLKSRVTISVDTSRNQFSLKLSSVTAADTAVYYCTREDSSNWRSRGQGTLVTVSSGSGGGGSGGGGSGGGGSFEEVQLVESGGGLVQPGGSLRLSCAASGYTFTEYTIHWVRQAPGKGLEWVANINPNNGGTTYNQKFEDRFTISRDNSKNTLYLQMNSLRAEDTAVYYCARGWNFDYWGQGTLVTVSSTRIQNPDPAVYQLRDSKSSDKSVCLFTDFDSQTNVSQSKDSDVYITDKTVLDMRSMDFKSNSAVAWSNKSDFACANAFNNSIIPEDTFFPSPESSCGTQSFGLLDPKLCYLLDGILFIYGVILTALFLRVKFSRSADAPAYQQGQNQLYNELNLGRREEYDVLDKRRGRDPEMGGKPQRRKNPQEGLYNELQKDKMAEAYSEIGMKGERRRGKGHDGLYQGLSTATKDTYDALHMQALPPR

SEQ ID NO: 20508 - protein, 914 aa, Artificial Sequence
  Synthetic Polypeptide
MALPVTALLLPLALLLHAARPEVQLVESGGGLVQPGGSLRLSCAASGFSFSDFWMSWVRQAPGKGLEWVATISQAGSEKDYVDSVKGRFTISRDNAKKSLYLQMNSLRAEDTAVYYCASGVYSFDYRGQGTLVTVSSGTGGGGSGGGGSGGGGSEFDIQMTQSPSSLSASVGDRVTITCKASQDVGTAVDWYQQKPGKAPKLLIYWASTRHTGVPSRFSGSGSGTDFTLTISSLQPEDFATYYCQQYNSYPLTFGQGTKVEIKRLEGQPKANPTVTLFPPSSEELQANKATLVCLISDFYPGAVTVAWKADGSPVKAGVETTKPSKQSNNKYAASSYLSLTPEQWKSHRSYSCQVTHEGSTVEKTVAPTECSPIKTDVITMDPKDNCSKDANDTLLLQLTNTSAYYMYLLLLLKSVVYFAIITCCLLRRTAFCCNGEKSRAKRSGSGATNFSLLKQAGDVEENPGPTSMDWIWRILFLVGAATGAHSGPQLQLQESGPGLVKPSETLSLTCTVSGDSISSGDYYWGWIRQPPGKGLEWIGHIYYSGVTYYNPSLKSRVTISVDTSRNQFSLKLSSVTAADTAVYYCTREDSSNWRSRGQGTLVTVSSGSGGGGSGGGGSGGGGSFEEVQLVESGGGLVQPGGSLRLSCAASGYTFTEYTIHWVRQAPGKGLEWVANINPNNGGTTYNQKFEDRFTISRDNSKNTLYLQMNSLRAEDTAVYYCARGWNFDYWGQGTLVTVSSTRASTKGPSVFPLAPSSKSTSGGTAALGCLVKDYFPEPVTVSWNSGALTSGVHTFPAVLQSSGLYSLSSVVTVPSSSLGTQTYICNVNHKPSNTKVDKRVEPKSCEVKTDSTDHVKPKETENTKQPSKSCHKPKAIVHTEKVNMMSLTVLGLRMLFAKTVAVNFLLTAKLFFL

SEQ ID NO: 20509 - protein, 895 aa, Artificial Sequence
  Synthetic Polypeptide
MALPVTALLLPLALLLHAARPEVQLVESGGGLVQPGGSLRLSCAASGFSFSDFWMSWVRQAPGKGLEWVATISQAGSEKDYVDSVKGRFTISRDNAKKSLYLQMNSLRAEDTAVYYCASGVYSFDYRGQGTLVTVSSGTGGGGSGGGGSGGGGSEFDIQMTQSPSSLSASVGDRVTITCKASQDVGTAVDWYQQKPGKAPKLLIYWASTRHTGVPSRFSGSGSGTDFTLTISSLQPEDFATYYCQQYNSYPLTFGQGTKVEIKRLEGQPKANPTVTLFPPSSEELQANKATLVCLISDFYPGAVTVAWKADGSPVKAGVETTKPSKQSNNKYAASSYLSLTPEQWKSHRSYSCQVTHEGSTVEKTVAPTECSGRADCGFTSESYQQGVLSATILYEILLGKATLYAVLVSALVLMAMVKRKDSRGRAKRSGSGVKQTLNFDLLKLAGDVESNPGPTSMDWIWRILFLVGAATGAHSGPQLQLQESGPGLVKPSETLSLTCTVSGDSISSGDYYWGWIRQPPGKGLEWIGHIYYSGVTYYNPSLKSRVTISVDTSRNQFSLKLSSVTAADTAVYYCTREDSSNWRSRGQGTLVTVSSGSGGGGSGGGGSGGGGSFEEVQLVESGGGLVQPGGSLRLSCAASGYTFTEYTIHWVRQAPGKGLEWVANINPNNGGTTYNQKFEDRFTISRDNSKNTLYLQMNSLRAEDTAVYYCARGWNFDYWGQGTLVTVSSTRASTKGPSVFPLAPSSKSTSGGTAALGCLVKDYFPEPVTVSWNSGALTSGVHTFPAVLQSSGLYSLSSVVTVPSSSLGTQTYICNVNHKPSNTKVDKRVEPKSCIPEDTFFPSPESSCDVKLVEKSFETDTNLNFQNLSVIGFRILLLKVAGFNLLMTLRLWSS

SEQ ID NO: 20510 - protein, 752 aa, Artificial Sequence
  Synthetic Polypeptide
MALPVTALLLPLALLLHAARPEVQVLESGGGLVQPGGSLRLSCAASGFTFSNFAMSWVRQAPGKGLEWVSTISGSAGTTDYADSVKGRFTISRDNSKKTLYLQMNSLRVEDTAVYYCADGRGPFFDYRGQGTLVTVSSGTGGGGSGGGGSGGGGSEFDIQMTQSPSSLSASVGDRVTITCKASQDVGTAVDWYQQKPGKAPKLLIYWASTRHTGVPSRFSGSGSGTDFTLTISSLQPEDFATYYCQQYNSYPLTFGQGTKVEIKRLEDLKNVFPPEVAVFEPSEAEISHTQKATLVCLATGFYPDHVELSWWVNGKEVHSGVCTDPQPLKEQPALNDSRYCLSSRLRVSATFWQNPRNHFRCQVQFYGLSENDEWTQDRAKPVTQIVSAEAWGRADCGFTSESYQQGVLSATILYEILLGKATLYAVLVSALVLMAMVKRKDSRGRAKRSGSGATNFSLLKQAGDVEENPGPTSMDWIWRILFLVGAATGAHSFEEVQLVESGGGLVQPGGSLRLSCAASGYTFTEYTIHWVRQAPGKGLEWVANINPNNGGTTYNQKFEDRFTISRDNSKNTLYLQMNSLRAEDTAVYYCARGWNFDYWGQGTLVTVSSTRIQNPDPAVYQLRDSKSSDKSVCLFTDFDSQTNVSQSKDSDVYITDKCVLDMRSMDFKSNSAVAWSNKSDFACANAFNNSIIPEDTFFPSPESSCDVKLVEKSFETDTNLNFQNLSVIGFRILLLKVAGFNLLMTLRLWSS

SEQ ID NO: 20511 - protein, 753 aa, Artificial Sequence
  Synthetic Polypeptide
MALPVTALLLPLALLLHAARPDIQMTQSPSSLSASVGDRVTITCKASQDVGTAVDWYQQKPGKAPKLLIYWASTRHTGVPSRFSGSGSGTDFTLTISSLQPEDFATYYCQQYNSYPLTFGQGTKVEIKRLEDLKNVFPPEVAVFEPSEAEISHTQKATLVCLATGFYPDHVELSWWVNGKEVHSGVCTDPQPLKEQPALNDSRYCLSSRLRVSATFWQNPRNHFRCQVQFYGLSENDEWTQDRAKPVTQIVSAEAWGRADCGFTSESYQQGVLSATILYEILLGKATLYAVLVSALVLMAMVKRKDSRGRAKRSGSGATNFSLLKQAGDVEENPGPTSMDWIWRILFLVGAATGAHSGPEVQLVESGGGLVQAGGSLRLSCAASGRTFSMGWFRQAPGKEREFVAAITYSGGSPYYADSVKGRFTISRDNAKNTVYLQMNSLKPEDTAVYYCAANPTYGSDWNAENWGQGTQVTVSSGSGGGGSGGGGSGGGGSFEEVQLVESGGGLVQPGGSLRLSCAASGYTFTEYTIHWVRQAPGKGLEWVANINPNNGGTTYNQKFEDRFTISRDNSKNTLYLQMNSLRAEDTAVYYCARGWNFDYWGQGTLVTVSSTRIQNPDPAVYQLRDSKSSDKSVCLFTDFDSQTNVSQSKDSDVYITDKCVLDMRSMDFKSNSAVAWSNKSDFACANAFNNSIIPEDTFFPSPESSCDVKLVEKSFETDTNLNFQNLSVIGFRILLLKVAGFNLLMTLRLWSS

SEQ ID NO: 20512 - protein, 880 aa, Artificial Sequence
  Synthetic Polypeptide
MALPVTALLLPLALLLHAARPDIQMTQSPSSLSASVGDRVTITCKASQDVGTAVDWYQQKPGKAPKLLIYWASTRHTGVPSRFSGSGSGTDFTLTISSLQPEDFATYYCQQYNSYPLTFGQGTKVEIKRLEDLKNVFPPEVAVFEPSEAEISHTQKATLVCLATGFYPDHVELSWWVNGKEVHSGVCTDPQPLKEQPALNDSRYCLSSRLRVSATFWQNPRNHFRCQVQFYGLSENDEWTQDRAKPVTQIVSAEAWGRADCGFTSESYQQGVLSATILYEILLGKATLYAVLVSALVLMAMVKRKDSRGRAKRSGSGATNFSLLKQAGDVEENPGPTSMDWIWRILFLVGAATGAHSQLQLQESGPGLVKPSETLSLTCTVSGGSISSGDYYWGWIRQPPGKGLEWIGSISYSGSTYYNPSLKSRVTISVDTSRNQFSLKLSSVTAADTAVYYCTREDSSNWRSRGQGTLVTVSSSGGGGSGGGGSEVQLVESGGGLVQAGGSLRLSCAASGRTFSMGWFRQAPGKEREFVAAITYSGGSPYYADSVKGRFTISRDNAKNTVYLQMNSLKPEDTAVYYCAANPTYGSDWNAENWGQGTQVTVSSGSGGGGSGGGGSGGGGSFEEVQLVESGGGLVQPGGSLRLSCAASGYTFTEYTIHWVRQAPGKGLEWVANINPNNGGTTYNQKFEDRFTISRDNSKNTLYLQMNSLRAEDTAVYYCARGWNFDYWGQGTLVTVSSTRIQNPDPAVYQLRDSKSSDKSVCLFTDFDSQTNVSQSKDSDVYITDKCVLDMRSMDFKSNSAVAWSNKSDFACANAFNNSIIPEDTFFPSPESSCDVKLVEKSFETDTNLNFQNLSVIGFRILLLKVAGFNLLMTLRLWSS

SEQ ID NO: 20513 - protein, 889 aa, Artificial Sequence
  Synthetic Polypeptide
MALPVTALLLPLALLLHAARPEVQVLESGGGLVQPGGSLRLSCAASGFTFSNFAMSWVRQAPGKGLEWVSTISGSAGTTDYADSVKGRFTISRDNSKKTLYLQMNSLRVEDTAVYYCADGRGPFFDYRGQGTLVTVSSGTGGGGSGGGGSGGGGSEFDIQMTQSPSSLSASVGDRVTITCKASQDVGTAVDWYQQKPGKAPKLLIYWASTRHTGVPSRFSGSGSGTDFTLTISSLQPEDFATYYCQQYNSYPLTFGQGTKVEIKRLEDLKNVFPPEVAVFEPSEAEISHTQKATLVCLATGFYPDHVELSWWVNGKEVHSGVCTDPQPLKEQPALNDSRYCLSSRLRVSATFWQNPRNHFRCQVQFYGLSENDEWTQDRAKPVTQIVSAEAWGRADCGFTSESYQQGVLSATILYEILLGKATLYAVLVSALVLMAMVKRKDSRGRAKRSGSGATNFSLLKQAGDVEENPGPTSMDWIWRILFLVGAATGAHSGPEVQLVESGGGLVQAGGSLRLSCAASGRTFSMGWFRQAPGKEREFVAAITYSGGSPYYASSVRGRFTISRDNAKNTVYLQMNSLKPEDTAVYYCAANPTYGSDWNAENWGQGTQVTVSSGSGGGGSGGGGSGGGGSFEEVQLVESGGGLVQPGGSLRLSCAASGYTFTEYTIHWVRQAPGKGLEWVANINPNNGGTTYNQKFEDRFTISRDNSKNTLYLQMNSLRAEDTAVYYCARGWNFDYWGQGTLVTVSSTRIQNPDPAVYQLRDSKSSDKSVCLFTDFDSQTNVSQSKDSDVYITDKCVLDMRSMDFKSNSAVAWSNKSDFACANAFNNSIIPEDTFFPSPESSCDVKLVEKSFETDTNLNFQNLSVIGFRILLLKVAGFNLLMTLRLWSS

SEQ ID NO: 20514 - protein, 722 aa, Artificial Sequence
  Synthetic Polypeptide
MALPVTALLLPLALLLHAARPDIQMTQSPSSLSASVGDRVTITCKASQDVGTAVDWYQQKPGKAPKLLISWASTRHTGVPSRFSGSGSGTDFTLTISSLQPEDFATYFCQQYNSYPLTFGQGTKVEIKRTVGGGGSGGGGSGGGGSQVQLVQSGAEVKKPGESVKVSCKASGYTFTEYTIHWVRQAPGQGLEWMGNINPNNGGTTYNQKFEDRVTITADKSTSTAYMELSSLRSEDTAVYYCARGWNFDYWGQGTTVTVSSTREQKLISEEDLAKPTTTPAPRPPTPAPTIASQPLSLRPEACRPAAGGAVHTRGLDFACDIYIWAPLAGTCGVLLLSLVITLYCKRGRKKLLYIFKQPFMRPVQTTQEEDGCSCRFPEEEEGGCELRVKFSRSADAPAYQQGQNQLYNELNLGRREEYDVLDKRRGRDPEMGGKPRRKNPQEGLYNELQKDKMAEAYSEIGMKGERRRGKGHDGLYQGLSTATKDTYDALHMQALPPRSSGSGEGRGSLLTCGDVEENPGPHMTEYKPTVRLATRDDVPRAVRTLAAAFADYPATRHTVDPDRHIERVTELQELFLTRVGLDIGKVWVADDGAAVAVWTTPESVEAGAVFAEIGPRMAELSGSRLAAQQQMEGLLAPHRPKEPAWFLATVGVSPDHQGKGLGSAVVLPGVEAAERAGVPAFLETSAPRNLPFYERLGFTVTADVEVPEGPRTWCMTRKPGA

SEQ ID NO: 20515 - protein, 716 aa, Artificial Sequence
  Synthetic Polypeptide
MALPVTALLLPLALLLHAARPDIQMTQSPSSLSASVGDRVTITCKASQDVGTAVDWYQQKPGKAPKLLISWASTRHTGVPSRFSGSGSGTDFTLTISSLQPEDFATYFCQQYNSYPLTFGQGTKVEIKRTVGGGGSGGGGSGGGGSQVQLVQSGAEVKKPGESVKVSCKASGYTFTEYTIHWVRQAPGQGLEWMGNINPNNGGTTYNQKFEDRVTITADKSTSTAYMELSSLRSEDTAVYYCARGWNFDYWGQGTTVTVSSTREQKLISEEDLKIEVMYPPPYLDNEKSNGTIIHVKGKHLCPSPLFPGPSKPFWVLVVVGGVLACYSLLVTVAFIIFWVRSKRSRLLHSDYMNMTPRRPGPTRKHYQPYAPPRDFAAYRSRVKFSRSADAPAYQQGQNQLYNELNLGRREEYDVLDKRRGRDPEMGGKPRRKNPQEGLYNELQKDKMAEAYSEIGMKGERRRGKGHDGLYQGLSTATKDTYDALHMQALPPRSSGSGEGRGSLLTCGDVEENPGPHMTEYKPTVRLATRDDVPRAVRTLAAAFADYPATRHTVDPDRHIERVTELQELFLTRVGLDIGKVWVADDGAAVAVWTTPESVEAGAVFAEIGPRMAELSGSRLAAQQQMEGLLAPHRPKEPAWFLATVGVSPDHQGKGLGSAVVLPGVEAAERAGVPAFLETSAPRNLPFYERLGFTVTADVEVPEGPRTWCMTRKPGA

SEQ ID NO: 20516 - protein, 493 aa, Artificial Sequence
  Synthetic Polypeptide
MALPVTALLLPLALLLHAARPDIQMTQSPSSLSASVGDRVTITCKASQDVGTAVDWYQQKPGKAPKLLISWASTRHTGVPSRFSGSGSGTDFTLTISSLQPEDFATYFCQQYNSYPLTFGQGTKVEIKRTVGGGGSGGGGSGGGGSQVQLVQSGAEVKKPGESVKVSCKASGYTFTEYTIHWVRQAPGQGLEWMGNINPNNGGTTYNQKFEDRVTITADKSTSTAYMELSSLRSEDTAVYYCARGWNFDYWGQGTTVTVSSTREQKLISEEDLKIEVMYPPPYLDNEKSNGTIIHVKGKHLCPSPLFPGPSKPFWVLVVVGGVLACYSLLVTVAFIIFWVRSKRSRLLHSDYMNMTPRRPGPTRKHYQPYAPPRDFAAYRSRVKFSRSADAPAYQQGQNQLYNELNLGRREEYDVLDKRRGRDPEMGGKPRRKNPQEGLYNELQKDKMAEAYSEIGMKGERRRGKGHDGLYQGLSTATKDTYDALHMQALPPR

SEQ ID NO: 20517 - protein, 499 aa, Artificial Sequence
  Synthetic Polypeptide
MALPVTALLLPLALLLHAARPDIQMTQSPSSLSASVGDRVTITCKASQDVGTAVDWYQQKPGKAPKLLISWASTRHTGVPSRFSGSGSGTDFTLTISSLQPEDFATYFCQQYNSYPLTFGQGTKVEIKRTVGGGGSGGGGSGGGGSQVQLVQSGAEVKKPGESVKVSCKASGYTFTEYTIHWVRQAPGQGLEWMGNINPNNGGTTYNQKFEDRVTITADKSTSTAYMELSSLRSEDTAVYYCARGWNFDYWGQGTTVTVSSTREQKLISEEDLAKPTTTPAPRPPTPAPTIASQPLSLRPEACRPAAGGAVHTRGLDFACDIYIWAPLAGTCGVLLLSLVITLYCKRGRKKLLYIFKQPFMRPVQTTQEEDGCSCRFPEEEEGGCELRVKFSRSADAPAYQQGQNQLYNELNLGRREEYDVLDKRRGRDPEMGGKPRRKNPQEGLYNELQKDKMAEAYSEIGMKGERRRGKGHDGLYQGLSTATKDTYDALHMQALPPR

SEQ ID NO: 20518 - protein, 499 aa, Artificial Sequence
  Synthetic Polypeptide
MALPVTALLLPLALLLHAARPQVQLVQSGAEVKKPGESVKVSCKASGYTFTEYTIHWVRQAPGQGLEWMGNINPNNGGTTYNQKFEDRVTITADKSTSTAYMELSSLRSEDTAVYYCARGWNFDYWGQGTTVTVSSGGGGSGGGGSGGGGSDIQMTQSPSSLSASVGDRVTITCKASQDVGTAVDWYQQKPGKAPKLLISWASTRHTGVPSRFSGSGSGTDFTLTISSLQPEDFATYFCQQYNSYPLTFGQGTKVEIKRTVTREQKLISEEDLAKPTTTPAPRPPTPAPTIASQPLSLRPEACRPAAGGAVHTRGLDFACDIYIWAPLAGTCGVLLLSLVITLYCKRGRKKLLYIFKQPFMRPVQTTQEEDGCSCRFPEEEEGGCELRVKFSRSADAPAYQQGQNQLYNELNLGRREEYDVLDKRRGRDPEMGGKPRRKNPQEGLYNELQKDKMAEAYSEIGMKGERRRGKGHDGLYQGLSTATKDTYDALHMQALPPR

SEQ ID NO: 20519 - protein, 912 aa, Artificial Sequence
  Synthetic Polypeptide
MALPVTALLLPLALLLHAARPDIQMTQSPSSLSASVGDRVTITCKASQDVGTAVDWYQQKPGKAPKLLISWASTRHTGVPSRFSGSGSGTDFTLTISSLQPEDFATYFCQQYNSYPLTFGQGTKVEIKRTVGGGGSGGGGSGGGGSQVQLVQSGAEVKKPGESVKVSCKASGYTFTEYTIHWVRQAPGQGLEWMGNINPNNGGTTYNQKFEDRVTITADKSTSTAYMELSSLRSEDTAVYYCARGWNFDYWGQGTTVTVSSTREQKLISEEDLAKPTTTPAPRPPTPAPTIASQPLSLRPEACRPAAGGAVHTRGLDFACDIYIWAPLAGTCGVLLLSLVITLYCGRARVKFSRSADAPAYQQGQNQLYNELNLGRREEYDVLDKRRGRDPEMGGKPRRKNPQEGLYNELQKDKMAEAYSEIGMKGERRRGKGHDGLYQGLSTATKDTYDALHMQALPPRSRGSGATNFSLLKQAGDVEENPGPGIHMATYEVLCEVARKLGTDDREVVLFLLNVFIPQPTLAQLIGALRALKEEGRLTFPLLAECLFRAGRRDLLRDLLHLDPRFLERHLAGTMSYFSPYQLTVLHVDGELCARDIRSLIFLSKDTIGSRSTPQTFLHWVYCMENLDLLGPTDVDALMSMLRSLSRVDLQRQVQTLMGLHLSGPSHSQHYRHTPLETDFYDYKDDDDKTSGSGEGRGSLLTCGDVEENPGPHMTEYKPTVRLATRDDVPRAVRTLAAAFADYPATRHTVDPDRHIERVTELQELFLTRVGLDIGKVWVADDGAAVAVWTTPESVEAGAVFAEIGPRMAELSGSRLAAQQQMEGLLAPHRPKEPAWFLATVGVSPDHQGKGLGSAVVLPGVEAAERAGVPAFLETSAPRNLPFYERLGFTVTADVEVPEGPRTWCMTRKPGA

SEQ ID NO: 20520 - protein, 852 aa, Artificial Sequence
  Synthetic Polypeptide
MALPVTALLLPLALLLHAARPDIQMTQSPSSLSASVGDRVTITCKASQDVGTAVDWYQQKPGKAPKLLISWASTRHTGVPSRFSGSGSGTDFTLTISSLQPEDFATYFCQQYNSYPLTFGQGTKVEIKRTVLEIQNPDPAVYQLRDSKSSDKSVCLFTDFDSQTNVSQSKDSDVYITDKCVLDMRSMDFKSNSAVAWSNKSDFACANAFNNSIIPEDTFFPSSDVPCDVKLVEKSFETDTNLNFQNLSVIGFRILLLKVAGFNLLMTLRLWSSRAKRSGSGVKQTLNFDLLKLAGDVESNPGPTSMDWIWRILFLVGAATGAHSFEQVQLVQSGAEVKKPGESVKVSCKASGYTFTEYTIHWVRQAPGQGLEWMGNINPNNGGTTYNQKFEDRVTITADKSTSTAYMELSSLRSEDTAVYYCARGWNFDYWGQGTTVTVSSTREDLKNVFPPEVAVFEPSKAEIAHTQKATLVCLATGFYPDHVELSWWVNGKEVHSGVCTDPQPLKEQPALNDSRYCLSSRLRVSATFWQNPRNHFRCQVQFYGLSENDEWTQDRAKPVTQIVSAEAWGRADCGITSASYHQGVLSATILYEILLGKATLYAVLVSALVLMAMVKRKDSRGRAKRSGSGATNFSLLKQAGDVEENPGPSRGHMTEYKPTVRLATRDDVPRAVRTLAAAFADYPATRHTVDPDRHIERVTELQELFLTRVGLDIGKVWVADDGAAVAVWTTPESVEAGAVFAEIGPRMAELSGSRLAAQQQMEGLLAPHRPKEPAWFLATVGVSPDHQGKGLGSAVVLPGVEAAERAGVPAFLETSAPRNLPFYERLGFTVTADVEVPEGPRTWCMTRKPGA

SEQ ID NO: 20521 - protein, 851 aa, Artificial Sequence
  Synthetic Polypeptide
MALPVTALLLPLALLLHAARPDIQMTQSPSSLSASVGDRVTITCKASQDVGTAVDWYQQKPGKAPKLLISWASTRHTGVPSRFSGSGSGTDFTLTISSLQPEDFATYFCQQYNSYPLTFGQGTKVEIKRTVLEDLKNVFPPEVAVFEPSKAEIAHTQKATLVCLATGFYPDHVELSWWVNGKEVHSGVCTDPQPLKEQPALNDSRYCLSSRLRVSATFWQNPRNHFRCQVQFYGLSENDEWTQDRAKPVTQIVSAEAWGRADCGITSASYHQGVLSATILYEILLGKATLYAVLVSALVLMAMVKRKDSRGRAKRSGSGATNFSLLKQAGDVEENPGPTSMDWIWRILFLVGAATGAHSFEQVQLVQSGAEVKKPGESVKVSCKASGYTFTEYTIHWVRQAPGQGLEWMGNINPNNGGTTYNQKFEDRVTITADKSTSTAYMELSSLRSEDTAVYYCARGWNFDYWGQGTTVTVSSTRIQNPDPAVYQLRDSKSSDKSVCLFTDFDSQTNVSQSKDSDVYITDKCVLDMRSMDFKSNSAVAWSNKSDFACANAFNNSIIPEDTFFPSSDVPCDVKLVEKSFETDTNLNFQNLSVIGFRILLLKVAGFNLLMTLRLWSSRAKRSGSGVKQTLNFDLLKLAGDVESNPGPSRGHMTEYKPTVRLATRDDVPRAVRTLAAAFADYPATRHTVDPDRHIERVTELQELFLTRVGLDIGKVWVADDGAAVAVWTTPESVEAGAVFAEIGPRMAELSGSRLAAQQQMEGLLAPHRPKEPAWFLATVGVSPDHQGKGLGSAVVLPGVEAAERAGVPAFLETSAPRNLPFYERLGFTVTADVEVPEGPRTWCMTRKPGA

SEQ ID NO: 20522 - protein, 618 aa, Artificial Sequence
  Synthetic Polypeptide
MALPVTALLLPLALLLHAARPDIQMTQSPSSLSASVGDRVTITCKASQDVGTAVDWYQQKPGKAPKLLISWASTRHTGVPSRFSGSGSGTDFTLTISSLQPEDFATYFCQQYNSYPLTFGQGTKVEIKRTVLEDLKNVFPPEVAVFEPSEAEISHTQKATLVCLATGFYPDHVELSWWVNGKEVHSGVCTDPQPLKEQPALNDSRYCLSSRLRVSATFWQNPRNHFRCQVQFYGLSENDEWTQDRAKPVTQIVSAEAWGRADCGFTSESYQQGVLSATILYEILLGKATLYAVLVSALVLMAMVKRKDSRGRAKRSGSGATNFSLLKQAGDVEENPGPTSMDWIWRILFLVGAATGAHSFEQVQLVQSGAEVKKPGESVKVSCKASGYTFTEYTIHWVRQAPGQGLEWMGNINPNNGGTTYNQKFEDRVTITADKSTSTAYMELSSLRSEDTAVYYCARGWNFDYWGQGTTVTVSSTRIQNPDPAVYQLRDSKSSDKSVCLFTDFDSQTNVSQSKDSDVYITDKCVLDMRSMDFKSNSAVAWSNKSDFACANAFNNSIIPEDTFFPSPESSCDVKLVEKSFETDTNLNFQNLSVIGFRILLLKVAGFNLLMTLRLWSS

SEQ ID NO: 20523 - protein, 843 aa, Artificial Sequence
  Synthetic Polypeptide
MALPVTALLLPLALLLHAARPDIQMTQSPSSLSASVGDRVTITCKASQDVGTAVDWYQQKPGKAPKLLISWASTRHTGVPSRFSGSGSGTDFTLTISSLQPEDFATYFCQQYNSYPLTFGQGTKVEIKRTVLEDLKNVFPPEVAVFEPSEAEISHTQKATLVCLATGFYPDHVELSWWVNGKEVHSGVCTDPQPLKEQPALNDSRYCLSSRLRVSATFWQNPRNHFRCQVQFYGLSENDEWTQDRAKPVTQIVSAEAWGRADCGFTSESYQQGVLSATILYEILLGKATLYAVLVSALVLMAMVKRKDSRGRAKRSGSGATNFSLLKQAGDVEENPGPTSMDWIWRILFLVGAATGAHSFEQVQLVQSGAEVKKPGESVKVSCKASGYTFTEYTIHWVRQAPGQGLEWMGNINPNNGGTTYNQKFEDRVTITADKSTSTAYMELSSLRSEDTAVYYCARGWNFDYWGQGTTVTVSSTRIQNPDPAVYQLRDSKSSDKSVCLFTDFDSQTNVSQSKDSDVYITDKCVLDMRSMDFKSNSAVAWSNKSDFACANAFNNSIIPEDTFFPSPESSCDVKLVEKSFETDTNLNFQNLSVIGFRILLLKVAGFNLLMTLRLWSSRAKRSGSGVKQTLNFDLLKLAGDVESNPGPSRGGIHTMATYEVLCEVARKLGTDDREVVLFLLNVFIPQPTLAQLIGALRALKEEGRLTFPLLAECLFRAGRRDLLRDLLHLDPRFLERHLAGTMSYFSPYQLTVLHVDGELCARDIRSLIFLSKDTIGSRSTPQTFLHWVYCMENLDLLGPTDVDALMSMLRSLSRVDLQRQVQTLMGLHLSGPSHSQHYRHTP

SEQ ID NO: 20524 - protein, 622 aa, Artificial Sequence
  Synthetic Polypeptide
MALPVTALLLPLALLLHAARPDIQMTQSPSSLSASVGDRVTITCKASQDVGTAVDWYQQKPGKAPKLLISWASTRHTGVPSRFSGSGSGTDFTLTISSLQPEDFATYFCQQYNSYPLTFGQGTKVEIKRTVLEIQNPDPAVYQLRDSKSSDKSVCLFTDFDSQTNVSQSKDSDVYITDKCVLDMRSMDFKSNSAVAWSNKSDFACANAFNNSIIPEDTFFPSPESSCDVKLVEKSFETDTNLNFQNLSVIGFRILLLKVAGFNLLMTLRLWSSRAKRSGSGVKQTLNFDLLKLAGDVESNPGPTSMDWIWRILFLVGAATGAHSFEQVQLVQSGAEVKKPGESVKVSCKASGYTFTEYTIHWVRQAPGQGLEWMGNINPNNGGTTYNQKFEDRVTITADKSTSTAYMELSSLRSEDTAVYYCARGWNFDYWGQGTTVTVSSTREDLKNVFPPEVAVFEPSEAEISHTQKATLVCLATGFYPDHVELSWWVNGKEVHSGVCTDPQPLKEQPALNDSRYCLSSRLRVSATFWQNPRNHFRCQVQFYGLSENDEWTQDRAKPVTQIVSAEAWGRADCGFTSESYQQGVLSATILYEILLGKATLYAVLVSALVLMAMVKRKDSRG

SEQ ID NO: 20525 - protein, 844 aa, Artificial Sequence
  Synthetic Polypeptide
MALPVTALLLPLALLLHAARPDIQMTQSPSSLSASVGDRVTITCKASQDVGTAVDWYQQKPGKAPKLLISWASTRHTGVPSRFSGSGSGTDFTLTISSLQPEDFATYFCQQYNSYPLTFGQGTKVEIKRTVLEIQNPDPAVYQLRDSKSSDKSVCLFTDFDSQTNVSQSKDSDVYITDKCVLDMRSMDFKSNSAVAWSNKSDFACANAFNNSIIPEDTFFPSPESSCDVKLVEKSFETDTNLNFQNLSVIGFRILLLKVAGFNLLMTLRLWSSRAKRSGSGVKQTLNFDLLKLAGDVESNPGPTSMDWIWRILFLVGAATGAHSFEQVQLVQSGAEVKKPGESVKVSCKASGYTFTEYTIHWVRQAPGQGLEWMGNINPNNGGTTYNQKFEDRVTITADKSTSTAYMELSSLRSEDTAVYYCARGWNFDYWGQGTTVTVSSTREDLKNVFPPEVAVFEPSEAEISHTQKATLVCLATGFYPDHVELSWWVNGKEVHSGVCTDPQPLKEQPALNDSRYCLSSRLRVSATFWQNPRNHFRCQVQFYGLSENDEWTQDRAKPVTQIVSAEAWGRADCGFTSESYQQGVLSATILYEILLGKATLYAVLVSALVLMAMVKRKDSRGRAKRSGSGATNFSLLKQAGDVEENPGPSRGGIHTMATYEVLCEVARKLGTDDREVVLFLLNVFIPQPTLAQLIGALRALKEEGRLTFPLLAECLFRAGRRDLLRDLLHLDPRFLERHLAGTMSYFSPYQLTVLHVDGELCARDIRSLIFLSKDTIGSRSTPQTFLHWVYCMENLDLLGPTDVDALMSMLRSLSRVDLQRQVQTLMGLHLSGPSHSQHYRHTP

SEQ ID NO: 20526 - protein, 896 aa, Artificial Sequence
  Synthetic Polypeptide
MALPVTALLLPLALLLHAARPLEGKPIPNPLLGLDSTGSGEDLKNVFPPEVAVFEPSKAEIAHTQKATLVCLATGFYPDHVELSWWVNGKEVHSGVCTDPQPLKEQPALNDSRYCLSSRLRVSATFWQNPRNHFRCQVQFYGLSENDEWTQDRAKPVTQIVSAEAWGRADCGITSASYHQGVLSATILYEILLGKATLYAVLVSALVLMAMVKRKDSRGRAKRSGSGATNFSLLKQAGDVEENPGPTSMALPVTALLLPLALLLHAARPDIQMTQSPSSLSASVGDRVTITCKASQDVGTAVDWYQQKPGKAPKLLISWASTRHTGVPSRFSGSGSGTDFTLTISSLQPEDFATYFCQQYNSYPLTFGQGTKVEIKRTVGGGGSGGGGSGGGGSQVQLVQSGAEVKKPGESVKVSCKASGYTFTEYTIHWVRQAPGQGLEWMGNINPNNGGTTYNQKFEDRVTITADKSTSTAYMELSSLRSEDTAVYYCARGWNFDYWGQGTTVTVSSTREQKLISEEDGSGIQNPDPAVYQLRDSKSSDKSVCLFTDFDSQTNVSQSKDSDVYITDKCVLDMRSMDFKSNSAVAWSNKSDFACANAFNNSIIPEDTFFPSSDVPCDVKLVEKSFETDTNLNFQNLSVIGFRILLLKVAGFNLLMTLRLWSSRAKRSGSGVKQTLNFDLLKLAGDVESNPGPSRGHMTEYKPTVRLATRDDVPRAVRTLAAAFADYPATRHTVDPDRHIERVTELQELFLTRVGLDIGKVWVADDGAAVAVWTTPESVEAGAVFAEIGPRMAELSGSRLAAQQQMEGLLAPHRPKEPAWFLATVGVSPDHQGKGLGSAVVLPGVEAAERAGVPAFLETSAPRNLPFYERLGFTVTADVEVPEGPRTWCMTRKPGA

SEQ ID NO: 20527 - protein, 897 aa, Artificial Sequence
  Synthetic Polypeptide
MALPVTALLLPLALLLHAARPLEQKLISEEDLGSGDRPDPAVYQLRDSKSSDKSVCLFTDFDSQTNVSQSKDSDVYITDKCVLDMRSMDFKSNSAVAWSNKSDFACANAFNNSIIPEDTFFPSPESSCDVKLVEKSFETDTNLNFQNLSVIGFRILLLKVAGFNLLMTLRLWSSSSRAKRSGSGVKQTLNFDLLKLAGDVESNPGPTSMALPVTALLLPLALLLHAARPDIQMTQSPSSLSASVGDRVTITCKASQDVGTAVDWYQQKPGKAPKLLISWASTRHTGVPSRFSGSGSGTDFTLTISSLQPEDFATYFCQQYNSYPLTFGQGTKVEIKRTVGGGGSGGGGSGGGGSQVQLVQSGAEVKKPGESVKVSCKASGYTFTEYTIHWVRQAPGQGLEWMGNINPNNGGTTYNQKFEDRVTITADKSTSTAYMELSSLRSEDTAVYYCARGWNFDYWGQGTTVTVSSTRGKPIPNPLLGLDSTGSGEDLKNVFPPEVAVFEPSEAEISHTQKATLVCLATGFYPDHVELSWWVNGKEVHSGVCTDPQPLKEQPALNDSRYCLSSRLRVSATFWQNPRNHFRCQVQFYGLSENDEWTQDRAKPVTQIVSAEAWGRADCGFTSESYQQGVLSATILYEILLGKATLYAVLVSALVLMAMVKRKDSRGRAKRSGSGATNFSLLKQAGDVEENPGPSRGHMTEYKPTVRLATRDDVPRAVRTLAAAFADYPATRHTVDPDRHIERVTELQELFLTRVGLDIGKVWVADDGAAVAVWTTPESVEAGAVFAEIGPRMAELSGSRLAAQQQMEGLLAPHRPKEPAWFLATVGVSPDHQGKGLGSAVVLPGVEAAERAGVPAFLETSAPRNLPFYERLGFTVTADVEVPEGPRTWCMTRKPGA

SEQ ID NO: 20528 - protein, 851 aa, Artificial Sequence
  Synthetic Polypeptide
MALPVTALLLPLALLLHAARPDIQMTQSPSSLSASVGDRVTITCKASQDVGTAVDWYQQKPGKAPKLLISWASTRHTGVPSRFSGSGSGTDFTLTISSLQPEDFATYFCQQYNSYPLTFGQGTKVEIKRTVLEDLKNVFPPEVAVFEPSEAEISHTQKATLVCLATGFYPDHVELSWWVNGKEVHSGVSTDPQPLKEQPALNDSRYCLSSRLRVSATFWQNPRNHFRCQVQFYGLSENDEWTQDRAKPVTQIVSAEAWGRADCGFTSESYQQGVLSATILYEILLGKATLYAVLVSALVLMAMVKRKDSRGRAKRSGSGATNFSLLKQAGDVEENPGPTSMDWIWRILFLVGAATGAHSFEQVQLVQSGAEVKKPGESVKVSCKASGYTFTEYTIHWVRQAPGQGLEWMGNINPNNGGTTYNQKFEDRVTITADKSTSTAYMELSSLRSEDTAVYYCARGWNFDYWGQGTTVTVSSTRIQNPDPAVYQLRDSKSSDKSVCLFTDFDSQTNVSQSKDSDVYITDKTVLDMRSMDFKSNSAVAWSNKSDFACANAFNNSIIPEDTFFPSPESSCDVKLVEKSFETDTNLNFQNLSVIGFRILLLKVAGFNLLMTLRLWSSRAKRSGSGVKQTLNFDLLKLAGDVESNPGPSRGHMTEYKPTVRLATRDDVPRAVRTLAAAFADYPATRHTVDPDRHIERVTELQELFLTRVGLDIGKVWVADDGAAVAVWTTPESVEAGAVFAEIGPRMAELSGSRLAAQQQMEGLLAPHRPKEPAWFLATVGVSPDHQGKGLGSAVVLPGVEAAERAGVPAFLETSAPRNLPFYERLGFTVTADVEVPEGPRTWCMTRKPGA

SEQ ID NO: 20529 - protein, 933 aa, Artificial Sequence
  Synthetic Polypeptide
MALPVTALLLPLALLLHAARPDIQMTQSPSSLSASVGDRVTITCKASQDVGTAVDWYQQKPGKAPKLLISWASTRHTGVPSRFSGSGSGTDFTLTISSLQPEDFATYFCQQYNSYPLTFGQGTKVEIKRTVLEDLKNVFPPEVAVFEPSEAEISHTQKATLVCLATGFYPDHVELSWWVNGKEVHSGVSTDPQPLKEQPALNDSRYCLSSRLRVSATFWQNPRNHFRCQVQFYGLSENDEWTQDRAKPVTQIVSAEAWGRADCGFTSESYQQGVLSATILYEILLGKATLYAVLVSALVLMAMVKRKDSRGRAKRSGSGATNFSLLKQAGDVEENPGPTSMDWIWRILFLVGAATGAHSFEQVQLVQSGAEVKKPGESVKVSCKASGYTFTEYTIHWVRQAPGQGLEWMGNINPNNGGTTYNQKFEDRVTITADKSTSTAYMELSSLRSEDTAVYYCARGWNFDYWGQGTTVTVSSTREQKLISEEDGSGTPFPSLAPPIMLLVDGKQQMVVVCLVLDVAPPGLDSPIWFSAGNGSALDAFTYGPSPATDGTWTNLAHLSLPSEELASWEPLVCHTGPGAEGHSRSTQPMHLSGEASTARTCPQEPLRGTPGGALWLGVLRLLLFKLLLFDLLLTCSCLCDPAGPLPSPATTTRLRALGSHRLHPATETGGREATSSPRPQPRDRRWGDTPPGRKPGSPVRAKRSGSGVKQTLNFDLLKLAGDVESNPGPSRGHMTEYKPTVRLATRDDVPRAVRTLAAAFADYPATRHTVDPDRHIERVTELQELFLTRVGLDIGKVWVADDGAAVAVWTTPESVEAGAVFAEIGPRMAELSGSRLAAQQQMEGLLAPHRPKEPAWFLATVGVSPDHQGKGLGSAVVLPGVEAAERAGVPAFLETSAPRNLPFYERLGFTVTADVEVPEGPRTWCMTRKPGA

SEQ ID NO: 20530 - protein, 951 aa, Artificial Sequence
  Synthetic Polypeptide
MALPVTALLLPLALLLHAARPLEDLKNVFPPEVAVFEPSEAEISHTQKATLVCLATGFYPDHVELSWWVNGKEVHSGVSTDPQPLKEQPALNDSRYCLSSRLRVSATFWQNPRNHFRCQVQFYGLSENDEWTQDRAKPVTQIVSAEAWGRADCGFTSESYQQGVLSATILYEILLGKATLYAVLVSALVLMAMVKRKDSRGRAKRSGSGATNFSLLKQAGDVEENPGPTSMALPVTALLLPLALLLHAARPDIQMTQSPSSLSASVGDRVTITCKASQDVGTAVDWYQQKPGKAPKLLISWASTRHTGVPSRFSGSGSGTDFTLTISSLQPEDFATYFCQQYNSYPLTFGQGTKVEIKRTVGGGGSGGGGSGGGGSQVQLVQSGAEVKKPGESVKVSCKASGYTFTEYTIHWVRQAPGQGLEWMGNINPNNGGTTYNQKFEDRVTITADKSTSTAYMELSSLRSEDTAVYYCARGWNFDYWGQGTTVTVSSTREQKLISEEDLGSGTPFPSLAPPIMLLVDGKQQMVVVCLVLDVAPPGLDSPIWFSAGNGSALDAFTYGPSPATDGTWTNLAHLSLPSEELASWEPLVCHTGPGAEGHSRSTQPMHLSGEASTARTCPQEPLRGTPGGALWLGVLRLLLFKLLLFDLLLTCSCLCDPAGPLPSPATTTRLRALGSHRLHPATETGGREATSSPRPQPRDRRWGDTPPGRKPGSPVRAKRSGSGVKQTLNFDLLKLAGDVESNPGPSRSRGHMTEYKPTVRLATRDDVPRAVRTLAAAFADYPATRHTVDPDRHIERVTELQELFLTRVGLDIGKVWVADDGAAVAVWTTPESVEAGAVFAEIGPRMAELSGSRLAAQQQMEGLLAPHRPKEPAWFLATVGVSPDHQGKGLGSAVVLPGVEAAERAGVPAFLETSAPRNLPFYERLGFTVTADVEVPEGPRTWCMTRKPGA

SEQ ID NO: 20531 - protein, 888 aa, Artificial Sequence
  Synthetic Polypeptide
MALPVTALLLPLALLLHAARPDIQMTQSPSSLSASVGDRVTITCKASQDVGTAVDWYQQKPGKAPKLLISWASTRHTGVPSRFSGSGSGTDFTLTISSLQPEDFATYFCQQYNSYPLTFGQGTKVEIKRTVLEGKPIPNPLLGLDSTGSGDKQLDADVSPKPTIFLPSIAETKLQKAGTYLCLLEKFFPDVIKIHWQEKKSNTILGSQEGNTMKTNDTYMKFSWLTVPEKSLDKEHRCIVRHENNKNGVDQEIIFPPIKTDVITMDPKDNCSKDANDTLLLQLTNTSAYYMYLLLLLKSVVYFAIITCCLLRRTAFCCNGEKSRAKRSGSGATNFSLLKQAGDVEENPGPTSMDWIWRILFLVGAATGAHSFEQVQLVQSGAEVKKPGESVKVSCKASGYTFTEYTIHWVRQAPGQGLEWMGNINPNNGGTTYNQKFEDRVTITADKSTSTAYMELSSLRSEDTAVYYCARGWNFDYWGQGTTVTVSSTREQKLISEEDGSGSQPHTKPSVFVMKNGTNVACLVKEFYPKDIRINLVSSKKITEFDPAIVISPSGKYNAVKLGKYEDSNSVTCSVQHDNKTVHSTDFEVKTDSTDHVKPKETENTKQPSKSCHKPKAIVHTEKVNMMSLTVLGLRMLFAKTVAVNFLLTAKLFFLRAKRSGSGVKQTLNFDLLKLAGDVESNPGPSRGHMTEYKPTVRLATRDDVPRAVRTLAAAFADYPATRHTVDPDRHIERVTELQELFLTRVGLDIGKVWVADDGAAVAVWTTPESVEAGAVFAEIGPRMAELSGSRLAAQQQMEGLLAPHRPKEPAWFLATVGVSPDHQGKGLGSAVVLPGVEAAERAGVPAFLETSAPRNLPFYERLGFTVTADVEVPEGPRTWCMTRKPGA

SEQ ID NO: 20532 - protein, 626 aa, Artificial Sequence
  Synthetic Polypeptide
MALPVTALLLPLALLLHAARPDIQMTQSPSSLSASVGDRVTITCKASQDVGTAVDWYQQKPGKAPKLLISWASTRHTGVPSRFSGSGSGTDFTLTISSLQPEDFATYFCQQYNSYPLTFGQGTKVEIKRTVLESQPHTKPSVFVMKNGTNVACLVKEFYPKDIRINLVSSKKITEFDPAIVISPSGKYNAVKLGKYEDSNSVTCSVQHDNKTVHSTDFEVKTDSTDHVKPKETENTKQPSKSCHKPKAIVHTEKVNMMSLTVLGLRMLFAKTVAVNFLLTAKLFFLRAKRSGSGATNFSLLKQAGDVEENPGPTSMDWIWRILFLVGAATGAHSFEQVQLVQSGAEVKKPGESVKVSCKASGYTFTEYTIHWVRQAPGQGLEWMGNINPNNGGTTYNQKFEDRVTITADKSTSTAYMELSSLRSEDTAVYYCARGWNFDYWGQGTTVTVSSTRDKQLDADVSPKPTIFLPSIAETKLQKAGTYLCLLEKFFPDVIKIHWQEKKSNTILGSQEGNTMKTNDTYMKFSWLTVPEKSLDKEHRCIVRHENNKNGVDQEIIFPPIKTDVITMDPKDNCSKDANDTLLLQLTNTSAYYMYLLLLLKSVVYFAIITCCLLRRTAFCCNGEKS

SEQ ID NO: 20533 - protein, 903 aa, Artificial Sequence
  Synthetic Polypeptide
MALPVTALLLPLALLLHAARPLEGKPIPNPLLGLDSTGSGDKQLDADVSPKPTIFLPSIAETKLQKAGTYLCLLEKFFPDVIKIHWQEKKSNTILGSQEGNTMKTNDTYMKFSWLTVPEKSLDKEHRCIVRHENNKNGVDQEIIFPPIKTDVITMDPKDNCSKDANDTLLLQLTNTSAYYMYLLLLLKSVVYFAIITCCLLRRTAFCCNGEKSRAKRSGSGATNFSLLKQAGDVEENPGPTSMALPVTALLLPLALLLHAARPDIQMTQSPSSLSASVGDRVTITCKASQDVGTAVDWYQQKPGKAPKLLISWASTRHTGVPSRFSGSGSGTDFTLTISSLQPEDFATYFCQQYNSYPLTFGQGTKVEIKRTVGGGGSGGGGSGGGGSQVQLVQSGAEVKKPGESVKVSCKASGYTFTEYTIHWVRQAPGQGLEWMGNINPNNGGTTYNQKFEDRVTITADKSTSTAYMELSSLRSEDTAVYYCARGWNFDYWGQGTTVTVSSTREQKLISEEDGSGSQPHTKPSVFVMKNGTNVACLVKEFYPKDIRINLVSSKKITEFDPAIVISPSGKYNAVKLGKYEDSNSVTCSVQHDNKTVHSTDFEVKTDSTDHVKPKETENTKQPSKSCHKPKAIVHTEKVNMMSLTVLGLRMLFAKTVAVNFLLTAKLFFLRAKRSGSGVKQTLNFDLLKLAGDVESNPGPSRGHMTEYKPTVRLATRDDVPRAVRTLAAAFADYPATRHTVDPDRHIERVTELQELFLTRVGLDIGKVWVADDGAAVAVWTTPESVEAGAVFAEIGPRMAELSGSRLAAQQQMEGLLAPHRPKEPAWFLATVGVSPDHQGKGLGSAVVLPGVEAAERAGVPAFLETSAPRNLPFYERLGFTVTADVEVPEGPRTWCMTRKPGA

SEQ ID NO: 20534 - protein, 1028 aa, Artificial Sequence
  Synthetic Polypeptide
MALPVTALLLPLALLLHAARPDIQMTQSPSSLSASVGDRVTITCKASQDVGTAVDWYQQKPGKAPKLLISWASTRHTGVPSRFSGSGSGTDFTLTISSLQPEDFATYFCQQYNSYPLTFGQGTKVEIKRTVGQPKANPTVTLFPPSSEELQANKATLVCLISDFYPGAVTVAWKADGSPVKAGVETTKPSKQSNNKYAASSYLSLTPEQWKSHRSYSCQVTHEGSTVEKTVAPTECSGSQSFGLLDPKLCYLLDGILFIYGVILTALFLRVKFSRSADAPAYQQGQNQLYNELNLGRREEYDVLDKRRGRDPEMGGKPQRRKNPQEGLYNELQKDKMAEAYSEIGMKGERRRGKGHDGLYQGLSTATKDTYDALHMQALPPRRAKRSGSGATNFSLLKQAGDVEENPGPTSMDWIWRILFLVGAATGAHSFEQVQLVQSGAEVKKPGESVKVSCKASGYTFTEYTIHWVRQAPGQGLEWMGNINPNNGGTTYNQKFEDRVTITADKSTSTAYMELSSLRSEDTAVYYCARGWNFDYWGQGTTVTVSSASTKGPSVFPLAPSSKSTSGGTAALGCLVKDYFPEPVTVSWNSGALTSGVHTFPAVLQSSGLYSLSSVVTVPSSSLGTQTYICNVNHKPSNTKVDKRVEPKSCGTQSFGLLDPKLCYLLDGILFIYGVILTALFLRVKFSRSADAPAYQQGQNQLYNELNLGRREEYDVLDKRRGRDPEMGGKPQRRKNPQEGLYNELQKDKMAEAYSEIGMKGERRRGKGHDGLYQGLSTATKDTYDALHMQALPPRRAKRSGSGVKQTLNFDLLKLAGDVESNPGPSRGHMTEYKPTVRLATRDDVPRAVRTLAAAFADYPATRHTVDPDRHIERVTELQELFLTRVGLDIGKVWVADDGAAVAVWTTPESVEAGAVFAEIGPRMAELSGSRLAAQQQMEGLLAPHRPKEPAWFLATVGVSPDHQGKGLGSAVVLPGVEAAERAGVPAFLETSAPRNLPFYERLGFTVTADVEVPEGPRTWCMTRKPGA

SEQ ID NO: 20535 - protein, 814 aa, Artificial Sequence
  Synthetic Polypeptide
MALPVTALLLPLALLLHAARPDIQMTQSPSSLSASVGDRVTITCKASQDVGTAVDWYQQKPGKAPKLLISWASTRHTGVPSRFSGSGSGTDFTLTISSLQPEDFATYFCQQYNSYPLTFGQGTKVEIKRTVLEDLKNVFPPEVAVFEPSEAEISHTQKATLVCLATGFYPDHVELSWWVNGKEVHSGVSTDPQPLKEQPALNDSRYCLSSRLRVSATFWQNPRNHFRCQVQFYGLSENDEWTQDRAKPVTQIVSAEAWGRADCGSQSFGLLDPKLCYLLDGILFIYGVILTALFLRVKFSRSADAPAYQQGQNQLYNELNLGRREEYDVLDKRRGRDPEMGGKPQRRKNPQEGLYNELQKDKMAEAYSEIGMKGERRRGKGHDGLYQGLSTATKDTYDALHMQALPPRRAKRSGSGATNFSLLKQAGDVEENPGPTSMDWIWRILFLVGAATGAHSFEQVQLVQSGAEVKKPGESVKVSCKASGYTFTEYTIHWVRQAPGQGLEWMGNINPNNGGTTYNQKFEDRVTITADKSTSTAYMELSSLRSEDTAVYYCARGWNFDYWGQGTTVTVSSTRIQNPDPAVYQLRDSKSSDKSVCLFTDFDSQTNVSQSKDSDVYITDKTVLDMRSMDFKSNSAVAWSNKSDFACANAFNNSIIPEDTFFPSPESSCGTQSFGLLDPKLCYLLDGILFIYGVILTALFLRVKFSRSADAPAYQQGQNQLYNELNLGRREEYDVLDKRRGRDPEMGGKPQRRKNPQEGLYNELQKDKMAEAYSEIGMKGERRRGKGHDGLYQGLSTATKDTYDALHMQALPPR

SEQ ID NO: 20536 - protein, 814 aa, Artificial Sequence
  Synthetic Polypeptide
MALPVTALLLPLALLLHAARPDIQMTQSPSSLSASVGDRVTITCKASQDVGTAVDWYQQKPGKAPKLLISWASTRHTGVPSRFSGSGSGTDFTLTISSLQPEDFATYFCQQYNSYPLTFGQGTKVEIKRTVLEDLKNVFPPEVAVFEPSKAEIAHTQKATLVCLATGFYPDHVELSWWVNGKEVHSGVCTDPQPLKEQPALNDSRYCLSSRLRVSATFWQNPRNHFRCQVQFYGLSENDEWTQDRAKPVTQIVSAEAWGRADCGSQSFGLLDPKLCYLLDGILFIYGVILTALFLRVKFSRSADAPAYQQGQNQLYNELNLGRREEYDVLDKRRGRDPEMGGKPQRRKNPQEGLYNELQKDKMAEAYSEIGMKGERRRGKGHDGLYQGLSTATKDTYDALHMQALPPRRAKRSGSGATNFSLLKQAGDVEENPGPTSMDWIWRILFLVGAATGAHSFEQVQLVQSGAEVKKPGESVKVSCKASGYTFTEYTIHWVRQAPGQGLEWMGNINPNNGGTTYNQKFEDRVTITADKSTSTAYMELSSLRSEDTAVYYCARGWNFDYWGQGTTVTVSSTRIQNPDPAVYQLRDSKSSDKSVCLFTDFDSQTNVSQSKDSDVYITDKCVLDMRSMDFKSNSAVAWSNKSDFACANAFNNSIIPEDTFFPSSDVPCGTQSFGLLDPKLCYLLDGILFIYGVILTALFLRVKFSRSADAPAYQQGQNQLYNELNLGRREEYDVLDKRRGRDPEMGGKPQRRKNPQEGLYNELQKDKMAEAYSEIGMKGERRRGKGHDGLYQGLSTATKDTYDALHMQALPPR

SEQ ID NO: 20537 - protein, 885 aa, Artificial Sequence
  Synthetic Polypeptide
MALPVTALLLPLALLLHAARPDIQMTQSPSSLSASVGDRVTITCKASQDVGTAVDWYQQKPGKAPKLLISWASTRHTGVPSRFSGSGSGTDFTLTISSLQPEDFATYFCQQYNSYPLTFGQGTKVEIKRTVLEGKPIPNPLLGLDSTGSGEDLKNVFPPEVAVFEPSEAEISHTQKATLVCLATGFYPDHVELSWWVNGKEVHSGVSTDPQPLKEQPALNDSRYCLSSRLRVSATFWQNPRNHFRCQVQFYGLSENDEWTQDRAKPVTQIVSAEAWGRADCGSQSFGLLDPKLCYLLDGILFIYGVILTALFLRVKFSRSADAPAYQQGQNQLYNELNLGRREEYDVLDKRRGRDPEMGGKPQRRKNPQEGLYNELQKDKMAEAYSEIGMKGERRRGKGHDGLYQGLSTATKDTYDALHMQALPPRRAKRSGSGATNFSLLKQAGDVEENPGPTSMDWIWRILFLVGAATGAHSFEQVQLVQSGAEVKKPGESVKVSCKASGYTFTEYTIHWVRQAPGQGLEWMGNINPNNGGTTYNQKFEDRVTITADKSTSTAYMELSSLRSEDTAVYYCARGWNFDYWGQGTTVTVSSTREQKLISEEDGSGIQNPDPAVYQLRDSKSSDKSVCLFTDFDSQTNVSQSKDSDVYITDKTVLDMRSMDFKSNSAVAWSNKSDFACANAFNNSIIPEDTFFPSPESSCGTQSFGLLDPKLCYLLDGILFIYGVILTALFLRSKRSRLLHSDYMNMTPRRPGPTRKHYQPYAPPRDFAAYRSRVKFSRSADAPAYQQGQNQLYNELNLGRREEYDVLDKRRGRDPEMGGKPQRRKNPQEGLYNELQKDKMAEAYSEIGMKGERRRGKGHDGLYQGLSTATKDTYDALHMQALPPR

SEQ ID NO: 20538 - protein, 926 aa, Artificial Sequence
  Synthetic Polypeptide
MALPVTALLLPLALLLHAARPDIQMTQSPSSLSASVGDRVTITCKASQDVGTAVDWYQQKPGKAPKLLISWASTRHTGVPSRFSGSGSGTDFTLTISSLQPEDFATYFCQQYNSYPLTFGQGTKVEIKRTVLEGKPIPNPLLGLDSTGSGEDLKNVFPPEVAVFEPSEAEISHTQKATLVCLATGFYPDHVELSWWVNGKEVHSGVSTDPQPLKEQPALNDSRYCLSSRLRVSATFWQNPRNHFRCQVQFYGLSENDEWTQDRAKPVTQIVSAEAWGRADCGSQSFGLLDPKLCYLLDGILFIYGVILTALFLRSKRSRLLHSDYMNMTPRRPGPTRKHYQPYAPPRDFAAYRSRVKFSRSADAPAYQQGQNQLYNELNLGRREEYDVLDKRRGRDPEMGGKPQRRKNPQEGLYNELQKDKMAEAYSEIGMKGERRRGKGHDGLYQGLSTATKDTYDALHMQALPPRRAKRSGSGATNFSLLKQAGDVEENPGPTSMDWIWRILFLVGAATGAHSFEQVQLVQSGAEVKKPGESVKVSCKASGYTFTEYTIHWVRQAPGQGLEWMGNINPNNGGTTYNQKFEDRVTITADKSTSTAYMELSSLRSEDTAVYYCARGWNFDYWGQGTTVTVSSTREQKLISEEDGSGIQNPDPAVYQLRDSKSSDKSVCLFTDFDSQTNVSQSKDSDVYITDKTVLDMRSMDFKSNSAVAWSNKSDFACANAFNNSIIPEDTFFPSPESSCGTQSFGLLDPKLCYLLDGILFIYGVILTALFLRSKRSRLLHSDYMNMTPRRPGPTRKHYQPYAPPRDFAAYRSRVKFSRSADAPAYQQGQNQLYNELNLGRREEYDVLDKRRGRDPEMGGKPQRRKNPQEGLYNELQKDKMAEAYSEIGMKGERRRGKGHDGLYQGLSTATKDTYDALHMQALPPR

SEQ ID NO: 20539 - protein, 887 aa, Artificial Sequence
  Synthetic Polypeptide
MALPVTALLLPLALLLHAARPDIQMTQSPSSLSASVGDRVTITCKASQDVGTAVDWYQQKPGKAPKLLISWASTRHTGVPSRFSGSGSGTDFTLTISSLQPEDFATYFCQQYNSYPLTFGQGTKVEIKRTVLEGKPIPNPLLGLDSTGSGEDLKNVFPPEVAVFEPSEAEISHTQKATLVCLATGFYPDHVELSWWVNGKEVHSGVSTDPQPLKEQPALNDSRYCLSSRLRVSATFWQNPRNHFRCQVQFYGLSENDEWTQDRAKPVTQIVSAEAWGRADCGSQSFGLLDPKLCYLLDGILFIYGVILTALFLRVKFSRSADAPAYQQGQNQLYNELNLGRREEYDVLDKRRGRDPEMGGKPQRRKNPQEGLYNELQKDKMAEAYSEIGMKGERRRGKGHDGLYQGLSTATKDTYDALHMQALPPRRAKRSGSGATNFSLLKQAGDVEENPGPTSMDWIWRILFLVGAATGAHSFEQVQLVQSGAEVKKPGESVKVSCKASGYTFTEYTIHWVRQAPGQGLEWMGNINPNNGGTTYNQKFEDRVTITADKSTSTAYMELSSLRSEDTAVYYCARGWNFDYWGQGTTVTVSSTREQKLISEEDLGSGIQNPDPAVYQLRDSKSSDKSVCLFTDFDSQTNVSQSKDSDVYITDKTVLDMRSMDFKSNSAVAWSNKSDFACANAFNNSIIPEDTFFPSPESSCGTQSFGLLDPKLCYLLDGILFIYGVILTALFLKRGRKKLLYIFKQPFMRPVQTTQEEDGCSCRFPEEEEGGCELRVKFSRSADAPAYQQGQNQLYNELNLGRREEYDVLDKRRGRDPEMGGKPQRRKNPQEGLYNELQKDKMAEAYSEIGMKGERRRGKGHDGLYQGLSTATKDTYDALHMQALPPR

SEQ ID NO: 20540 - protein, 929 aa, Artificial Sequence
  Synthetic Polypeptide
MALPVTALLLPLALLLHAARPDIQMTQSPSSLSASVGDRVTITCKASQDVGTAVDWYQQKPGKAPKLLISWASTRHTGVPSRFSGSGSGTDFTLTISSLQPEDFATYFCQQYNSYPLTFGQGTKVEIKRTVLEGKPIPNPLLGLDSTGSGEDLKNVFPPEVAVFEPSEAEISHTQKATLVCLATGFYPDHVELSWWVNGKEVHSGVSTDPQPLKEQPALNDSRYCLSSRLRVSATFWQNPRNHFRCQVQFYGLSENDEWTQDRAKPVTQIVSAEAWGRADCGSQSFGLLDPKLCYLLDGILFIYGVILTALFLKRGRKKLLYIFKQPFMRPVQTTQEEDGCSCRFPEEEEGGCELRVKFSRSADAPAYQQGQNQLYNELNLGRREEYDVLDKRRGRDPEMGGKPQRRKNPQEGLYNELQKDKMAEAYSEIGMKGERRRGKGHDGLYQGLSTATKDTYDALHMQALPPRRAKRSGSGATNFSLLKQAGDVEENPGPTSMDWIWRILFLVGAATGAHSFEQVQLVQSGAEVKKPGESVKVSCKASGYTFTEYTIHWVRQAPGQGLEWMGNINPNNGGTTYNQKFEDRVTITADKSTSTAYMELSSLRSEDTAVYYCARGWNFDYWGQGTTVTVSSTREQKLISEEDLGSGIQNPDPAVYQLRDSKSSDKSVCLFTDFDSQTNVSQSKDSDVYITDKTVLDMRSMDFKSNSAVAWSNKSDFACANAFNNSIIPEDTFFPSPESSCGTQSFGLLDPKLCYLLDGILFIYGVILTALFLKRGRKKLLYIFKQPFMRPVQTTQEEDGCSCRFPEEEEGGCELRVKFSRSADAPAYQQGQNQLYNELNLGRREEYDVLDKRRGRDPEMGGKPQRRKNPQEGLYNELQKDKMAEAYSEIGMKGERRRGKGHDGLYQGLSTATKDTYDALHMQALPPR

SEQ ID NO: 20541 - protein, 819 aa, Artificial Sequence
  Synthetic Polypeptide
MALPVTALLLPLALLLHAARPDIQMTQSPSSLSASVGDRVTITCKASQDVGTAVDWYQQKPGKAPKLLISWASTRHTGVPSRFSGSGSGTDFTLTISSLQPEDFATYFCQQYNSYPLTFGQGTKVEIKRTVLEQSFGLLDPKLCYLLDGILFIYGVILTALFLRVKFSRSADAPAYQQGQNQLYNELNLGRREEYDVLDKRRGRDPEMGGKPQRRKNPQEGLYNELQKDKMAEAYSEIGMKGERRRGKGHDGLYQGLSTATKDTYDALHMQALPPRRAKRSGSGATNFSLLKQAGDVEENPGPTSMDWIWRILFLVGAATGAHSFEQVQLVQSGAEVKKPGESVKVSCKASGYTFTEYTIHWVRQAPGQGLEWMGNINPNNGGTTYNQKFEDRVTITADKSTSTAYMELSSLRSEDTAVYYCARGWNFDYWGQGTTVTVSSTRQSFGLLDPKLCYLLDGILFIYGVILTALFLRVKFSRSADAPAYQQGQNQLYNELNLGRREEYDVLDKRRGRDPEMGGKPQRRKNPQEGLYNELQKDKMAEAYSEIGMKGERRRGKGHDGLYQGLSTATKDTYDALHMQALPPRRAKRSGSGVKQTLNFDLLKLAGDVESNPGPSRGHMTEYKPTVRLATRDDVPRAVRTLAAAFADYPATRHTVDPDRHIERVTELQELFLTRVGLDIGKVWVADDGAAVAVWTTPESVEAGAVFAEIGPRMAELSGSRLAAQQQMEGLLAPHRPKEPAWFLATVGVSPDHQGKGLGSAVVLPGVEAAERAGVPAFLETSAPRNLPFYERLGFTVTADVEVPEGPRTWCMTRKPGA

SEQ ID NO: 20542 - protein, 644 aa, Artificial Sequence
  Synthetic Polypeptide
MALPVTALLLPLALLLHAARPDIQMTQSPSSLSASVGDRVTITCKASQDVGTAVDWYQQKPGKAPKLLISWASTRHTGVPSRFSGSGSGTDFTLTISSLQPEDFATYFCQQYNSYPLTFGQGTKVEIKRTVLEGQPKANPTVTLFPPSSEELQANKATLVCLISDFYPGAVTVAWKADGSPVKAGVETTKPSKQSNNKYAASSYLSLTPEQWKSHRSYSCQVTHEGSTVEKTVAPTECSPIKTDVITMDPKDNCSKDANDTLLLQLTNTSAYYMYLLLLLKSVVYFAIITCCLLRRTAFCCNGEKSRAKRSGSGATNFSLLKQAGDVEENPGPTSMDWIWRILFLVGAATGAHSFEQVQLVQSGAEVKKPGESVKVSCKASGYTFTEYTIHWVRQAPGQGLEWMGNINPNNGGTTYNQKFEDRVTITADKSTSTAYMELSSLRSEDTAVYYCARGWNFDYWGQGTTVTVSSTRASTKGPSVFPLAPSSKSTSGGTAALGCLVKDYFPEPVTVSWNSGALTSGVHTFPAVLQSSGLYSLSSVVTVPSSSLGTQTYICNVNHKPSNTKVDKRVEPKSCEVKTDSTDHVKPKETENTKQPSKSCHKPKAIVHTEKVNMMSLTVLGLRMLFAKTVAVNFLLTAKLFFL

SEQ ID NO: 20543 - protein, 622 aa, Artificial Sequence
  Synthetic Polypeptide
MALPVTALLLPLALLLHAARPDIQMTQSPSSLSASVGDRVTITCKASQDVGTAVDWYQQKPGKAPKLLISWASTRHTGVPSRFSGSGSGTDFTLTISSLQPEDFATYFCQQYNSYPLTFGQGTKVEIKRTVLEGQPKANPTVTLFPPSSEELQANKATLVCLISDFYPGAVTVAWKADGSPVKAGVETTKPSKQSNNKYAASSYLSLTPEQWKSHRSYSCQVTHEGSTVEKTVAPTECSGRADCGITSASYHQGVLSATILYEILLGKATLYAVLVSALVLMAMVKRKDSRGRAKRSGSGATNFSLLKQAGDVEENPGPTSMDWIWRILFLVGAATGAHSFEQVQLVQSGAEVKKPGESVKVSCKASGYTFTEYTIHWVRQAPGQGLEWMGNINPNNGGTTYNQKFEDRVTITADKSTSTAYMELSSLRSEDTAVYYCARGWNFDYWGQGTTVTVSSTRASTKGPSVFPLAPSSKSTSGGTAALGCLVKDYFPEPVTVSWNSGALTSGVHTFPAVLQSSGLYSLSSVVTVPSSSLGTQTYICNVNHKPSNTKVDKRVEPKSCIPEDTFFPSSDVPCDVKLVEKSFETDTNLNFQNLSVIGFRILLLKVAGFNLLMTLRLWSS

SEQ ID NO: 20544 - protein, 622 aa, Artificial Sequence
  Synthetic Polypeptide
MALPVTALLLPLALLLHAARPDIQMTQSPSSLSASVGDRVTITCKASQDVGTAVDWYQQKPGKAPKLLISWASTRHTGVPSRFSGSGSGTDFTLTISSLQPEDFATYFCQQYNSYPLTFGQGTKVEIKRTVLEGQPKANPTVTLFPPSSEELQANKATLVCLISDFYPGAVTVAWKADGSPVKAGVETTKPSKQSNNKYAASSYLSLTPEQWKSHRSYSCQVTHEGSTVEKTVAPTECSGRADCGFTSESYQQGVLSATILYEILLGKATLYAVLVSALVLMAMVKRKDSRGRAKRSGSGATNFSLLKQAGDVEENPGPTSMDWIWRILFLVGAATGAHSFEQVQLVQSGAEVKKPGESVKVSCKASGYTFTEYTIHWVRQAPGQGLEWMGNINPNNGGTTYNQKFEDRVTITADKSTSTAYMELSSLRSEDTAVYYCARGWNFDYWGQGTTVTVSSTRASTKGPSVFPLAPSSKSTSGGTAALGCLVKDYFPEPVTVSWNSGALTSGVHTFPAVLQSSGLYSLSSVVTVPSSSLGTQTYICNVNHKPSNTKVDKRVEPKSCIPEDTFFPSPESSCDVKLVEKSFETDTNLNFQNLSVIGFRILLLKVAGFNLLMTLRLWSS

SEQ ID NO: 20545 - protein, 448 aa, Artificial Sequence
  Synthetic Polypeptide
MALPVTALLLPLALLLHAARPDIQMTQSPSSLSASVGDRVTITCKASQDVGTAVDWYQQKPGKAPKLLISWASTRHTGVPSRFSGSGSGTDFTLTISSLQPEDFATYFCQQYNSYPLTFGQGTKVEIKRTVGGGGSGGGGSGGGGSQVQLVQSGAEVKKPGESVKVSCKASGYTFTEYTIHWVRQAPGQGLEWMGNINPNNGGTTYNQKFEDRVTITADKSTSTAYMELSSLRSEDTAVYYCARGWNFDYWGQGTTVTVSSTRDGNEEMGGITQTPYKVSISGTTVILTCPQYPGSEILWQHNDKNIGGDEDDKNIGSDEDHLSLKEFSELEQSGYYVCYPRGSKPEDANFYLYLRARVCENCMEMDVMSVATIVIVDICITGGLLLLVYYWSKNRKAKAKPVTRGAGAGGRQRGQNKERPPPVPNPDYEPIRKGQRDLYSGLNQRRI

SEQ ID NO: 20546 - protein, 413 aa, Artificial Sequence
  Synthetic Polypeptide
MALPVTALLLPLALLLHAARPDIQMTQSPSSLSASVGDRVTITCKASQDVGTAVDWYQQKPGKAPKLLISWASTRHTGVPSRFSGSGSGTDFTLTISSLQPEDFATYFCQQYNSYPLTFGQGTKVEIKRTVGGGGSGGGGSGGGGSQVQLVQSGAEVKKPGESVKVSCKASGYTFTEYTIHWVRQAPGQGLEWMGNINPNNGGTTYNQKFEDRVTITADKSTSTAYMELSSLRSEDTAVYYCARGWNFDYWGQGTTVTVSSTRFKIPIEELEDRVFVNCNTSITWVEGTVGTLLSDITRLDLGKRILDPRGIYRCNGTDIYKDKESTVQVHYRMCQSCVELDPATVAGIIVTDVIATLLLALGVFCFAGHETGRLSGAADTQALLRNDQVYQPLRDRDDAQYSHLGGNWARNK

SEQ ID NO: 20547 - protein, 423 aa, Artificial Sequence
  Synthetic Polypeptide
MALPVTALLLPLALLLHAARPDIQMTQSPSSLSASVGDRVTITCKASQDVGTAVDWYQQKPGKAPKLLISWASTRHTGVPSRFSGSGSGTDFTLTISSLQPEDFATYFCQQYNSYPLTFGQGTKVEIKRTVGGGGSGGGGSGGGGSQVQLVQSGAEVKKPGESVKVSCKASGYTFTEYTIHWVRQAPGQGLEWMGNINPNNGGTTYNQKFEDRVTITADKSTSTAYMELSSLRSEDTAVYYCARGWNFDYWGQGTTVTVSSTRQSIKGNHLVKVYDYQEDGSVLLTCDAEAKNITWFKDGKMIGFLTEDKKKWNLGSNAKDPRGMYQCKGSQNKSKPLQVYYRMCQNCIELNAATISGFLFAEIVSIFVLAVGVYFIAGQDGVRQSRASDKQTLLPNDQLYQPLKDREDDQYSHLQGNQLRRN

SEQ ID NO: 20548 - protein, 406 aa, Artificial Sequence
  Synthetic Polypeptide
MALPVTALLLPLALLLHAARPDIQMTQSPSSLSASVGDRVTITCKASQDVGTAVDWYQQKPGKAPKLLISWASTRHTGVPSRFSGSGSGTDFTLTISSLQPEDFATYFCQQYNSYPLTFGQGTKVEIKRTVGGGGSGGGGSGGGGSQVQLVQSGAEVKKPGESVKVSCKASGYTFTEYTIHWVRQAPGQGLEWMGNINPNNGGTTYNQKFEDRVTITADKSTSTAYMELSSLRSEDTAVYYCARGWNFDYWGQGTTVTVSSTRQSFGLLDPKLCYLLDGILFIYGVILTALFLRVKFSRSADAPAYQQGQNQLYNELNLGRREEYDVLDKRRGRDPEMGGKPQRRKNPQEGLYNELQKDKMAEAYSEIGMKGERRRGKGHDGLYQGLSTATKDTYDALHMQALPPR

SEQ ID NO: 20549 - protein, 448 aa, Artificial Sequence
  Synthetic Polypeptide
MALPVTALLLPLALLLHAARPQVQLVQSGAEVKKPGESVKVSCKASGYTFTEYTIHWVRQAPGQGLEWMGNINPNNGGTTYNQKFEDRVTITADKSTSTAYMELSSLRSEDTAVYYCARGWNFDYWGQGTTVTVSSGGGGSGGGGSGGGGSDIQMTQSPSSLSASVGDRVTITCKASQDVGTAVDWYQQKPGKAPKLLISWASTRHTGVPSRFSGSGSGTDFTLTISSLQPEDFATYFCQQYNSYPLTFGQGTKVEIKRTVTRDGNEEMGGITQTPYKVSISGTTVILTCPQYPGSEILWQHNDKNIGGDEDDKNIGSDEDHLSLKEFSELEQSGYYVCYPRGSKPEDANFYLYLRARVCENCMEMDVMSVATIVIVDICITGGLLLLVYYWSKNRKAKAKPVTRGAGAGGRQRGQNKERPPPVPNPDYEPIRKGQRDLYSGLNQRRI

SEQ ID NO: 20550 - protein, 413 aa, Artificial Sequence
  Synthetic Polypeptide
MALPVTALLLPLALLLHAARPQVQLVQSGAEVKKPGESVKVSCKASGYTFTEYTIHWVRQAPGQGLEWMGNINPNNGGTTYNQKFEDRVTITADKSTSTAYMELSSLRSEDTAVYYCARGWNFDYWGQGTTVTVSSGGGGSGGGGSGGGGSDIQMTQSPSSLSASVGDRVTITCKASQDVGTAVDWYQQKPGKAPKLLISWASTRHTGVPSRFSGSGSGTDFTLTISSLQPEDFATYFCQQYNSYPLTFGQGTKVEIKRTVTRFKIPIEELEDRVFVNCNTSITWVEGTVGTLLSDITRLDLGKRILDPRGIYRCNGTDIYKDKESTVQVHYRMCQSCVELDPATVAGIIVTDVIATLLLALGVFCFAGHETGRLSGAADTQALLRNDQVYQPLRDRDDAQYSHLGGNWARNK

SEQ ID NO: 20551 - protein, 423 aa, Artificial Sequence
  Synthetic Polypeptide
MALPVTALLLPLALLLHAARPQVQLVQSGAEVKKPGESVKVSCKASGYTFTEYTIHWVRQAPGQGLEWMGNINPNNGGTTYNQKFEDRVTITADKSTSTAYMELSSLRSEDTAVYYCARGWNFDYWGQGTTVTVSSGGGGSGGGGSGGGGSDIQMTQSPSSLSASVGDRVTITCKASQDVGTAVDWYQQKPGKAPKLLISWASTRHTGVPSRFSGSGSGTDFTLTISSLQPEDFATYFCQQYNSYPLTFGQGTKVEIKRTVTRQSIKGNHLVKVYDYQEDGSVLLTCDAEAKNITWFKDGKMIGFLTEDKKKWNLGSNAKDPRGMYQCKGSQNKSKPLQVYYRMCQNCIELNAATISGFLFAEIVSIFVLAVGVYFIAGQDGVRQSRASDKQTLLPNDQLYQPLKDREDDQYSHLQGNQLRRN

SEQ ID NO: 20552 - protein, 406 aa, Artificial Sequence
  Synthetic Polypeptide
MALPVTALLLPLALLLHAARPQVQLVQSGAEVKKPGESVKVSCKASGYTFTEYTIHWVRQAPGQGLEWMGNINPNNGGTTYNQKFEDRVTITADKSTSTAYMELSSLRSEDTAVYYCARGWNFDYWGQGTTVTVSSGGGGSGGGGSGGGGSDIQMTQSPSSLSASVGDRVTITCKASQDVGTAVDWYQQKPGKAPKLLISWASTRHTGVPSRFSGSGSGTDFTLTISSLQPEDFATYFCQQYNSYPLTFGQGTKVEIKRTVTRQSFGLLDPKLCYLLDGILFIYGVILTALFLRVKFSRSADAPAYQQGQNQLYNELNLGRREEYDVLDKRRGRDPEMGGKPQRRKNPQEGLYNELQKDKMAEAYSEIGMKGERRRGKGHDGLYQGLSTATKDTYDALHMQALPPR

SEQ ID NO: 20553 - protein, 639 aa, Artificial Sequence
  Synthetic Polypeptide
MALPVTALLLPLALLLHAARPDIQMTQSPSSLSASVGDRVTITCKASQDVGTAVDWYQQKPGKAPKLLISWASTRHTGVPSRFSGSGSGTDFTLTISSLQPEDFATYFCQQYNSYPLTFGQGTKVEIKRTVGGGGSGGGGSGGGGSQVQLVQSGAEVKKPGESVKVSCKASGYTFTEYTIHWVRQAPGQGLEWMGNINPNNGGTTYNQKFEDRVTITADKSTSTAYMELSSLRSEDTAVYYCARGWNFDYWGQGTTVTVSSTRGSGIQNPDPAVYQLRDSKSSDKSVCLFTDFDSQTNVSQSKDSDVYITDKTVLDMRSMDFKSNSAVAWSNKSDFACANAFNNSIIPEDTFFPSPESSCDVKLVEKSFETDTNLNFQNLSVIGFRILLLKVAGFNLLMTLRLWSSRAKRSGSGVKQTLNFDLLKLAGDVESNPGPSRGHMTEYKPTVRLATRDDVPRAVRTLAAAFADYPATRHTVDPDRHIERVTELQELFLTRVGLDIGKVWVADDGAAVAVWTTPESVEAGAVFAEIGPRMAELSGSRLAAQQQMEGLLAPHRPKEPAWFLATVGVSPDHQGKGLGSAVVLPGVEAAERAGVPAFLETSAPRNLPFYERLGFTVTADVEVPEGPRTWCMTRKPGA

SEQ ID NO: 20554 - protein, 671 aa, Artificial Sequence
  Synthetic Polypeptide
MALPVTALLLPLALLLHAARPDIQMTQSPSSLSASVGDRVTITCKASQDVGTAVDWYQQKPGKAPKLLISWASTRHTGVPSRFSGSGSGTDFTLTISSLQPEDFATYFCQQYNSYPLTFGQGTKVEIKRTVGGGGSGGGGSGGGGSQVQLVQSGAEVKKPGESVKVSCKASGYTFTEYTIHWVRQAPGQGLEWMGNINPNNGGTTYNQKFEDRVTITADKSTSTAYMELSSLRSEDTAVYYCARGWNFDYWGQGTTVTVSSLEDLKNVFPPEVAVFEPSEAEISHTQKATLVCLATGFYPDHVELSWWVNGKEVHSGVSTDPQPLKEQPALNDSRYCLSSRLRVSATFWQNPRNHFRCQVQFYGLSENDEWTQDRAKPVTQIVSAEAWGRADCGFTSESYQQGVLSATILYEILLGKATLYAVLVSALVLMAMVKRKDSRGRAKRSGSGATNFSLLKQAGDVEENPGPTRGHMTEYKPTVRLATRDDVPRAVRTLAAAFADYPATRHTVDPDRHIERVTELQELFLTRVGLDIGKVWVADDGAAVAVWTTPESVEAGAVFAEIGPRMAELSGSRLAAQQQMEGLLAPHRPKEPAWFLATVGVSPDHQGKGLGSAVVLPGVEAAERAGVPAFLETSAPRNLPFYERLGFTVTADVEVPEGPRTWCMTRKPGA

SEQ ID NO: 20555 - protein, 721 aa, Artificial Sequence
  Synthetic Polypeptide
MALPVTALLLPLALLLHAARPDIQMTQSPSSLSASVGDRVTITCKASQDVGTAVDWYQQKPGKAPKLLISWASTRHTGVPSRFSGSGSGTDFTLTISSLQPEDFATYFCQQYNSYPLTFGQGTKVEIKRTVGGGGSGGGGSGGGGSQVQLVQSGAEVKKPGESVKVSCKASGYTFTEYTIHWVRQAPGQGLEWMGNINPNNGGTTYNQKFEDRVTITADKSTSTAYMELSSLRSEDTAVYYCARGWNFDYWGQGTTVTVSSTREQKLISEEDLGSGTPFPSLAPPIMLLVDGKQQMVVVCLVLDVAPPGLDSPIWFSAGNGSALDAFTYGPSPATDGTWTNLAHLSLPSEELASWEPLVCHTGPGAEGHSRSTQPMHLSGEASTARTCPQEPLRGTPGGALWLGVLRLLLFKLLLFDLLLTCSCLCDPAGPLPSPATTTRLRALGSHRLHPATETGGREATSSPRPQPRDRRWGDTPPGRKPGSPVRAKRSGSGVKQTLNFDLLKLAGDVESNPGPSRSRGHMTEYKPTVRLATRDDVPRAVRTLAAAFADYPATRHTVDPDRHIERVTELQELFLTRVGLDIGKVWVADDGAAVAVWTTPESVEAGAVFAEIGPRMAELSGSRLAAQQQMEGLLAPHRPKEPAWFLATVGVSPDHQGKGLGSAVVLPGVEAAERAGVPAFLETSAPRNLPFYERLGFTVTADVEVPEGPRTWCMTRKPGA

SEQ ID NO: 20556 - protein, 541 aa, Artificial Sequence
  Synthetic Polypeptide
MALPVTALLLPLALLLHAARPDIQMTQSPSSLSASVGDRVTITCKASQDVGTAVDWYQQKPGKAPKLLISWASTRHTGVPSRFSGSGSGTDFTLTISSLQPEDFATYFCQQYNSYPLTFGQGTKVEIKRTVLEDLKNVFPPEVAVFEPSEAEISHTQKATLVCLATGFYPDHVELSWWVNGKEVHSGVSTDPQPLKEQPALNDSRYCLSSRLRVSATFWQNPRNHFRCQVQFYGLSENDEWTQDRAKPVTQIVSAEAWGRADCGFTSESYQQGVLSATILYEILLGKATLYAVLVSALVLMAMVKRKDSRGRAKRSGSGATNFSLLKQAGDVEENPGPTRGHMTEYKPTVRLATRDDVPRAVRTLAAAFADYPATRHTVDPDRHIERVTELQELFLTRVGLDIGKVWVADDGAAVAVWTTPESVEAGAVFAEIGPRMAELSGSRLAAQQQMEGLLAPHRPKEPAWFLATVGVSPDHQGKGLGSAVVLPGVEAAERAGVPAFLETSAPRNLPFYERLGFTVTADVEVPEGPRTWCMTRKPGA

SEQ ID NO: 20557 - protein, 311 aa, Artificial Sequence
  Synthetic Polypeptide
MALPVTALLLPLALLLHAARPDIQMTQSPSSLSASVGDRVTITCKASQDVGTAVDWYQQKPGKAPKLLISWASTRHTGVPSRFSGSGSGTDFTLTISSLQPEDFATYFCQQYNSYPLTFGQGTKVEIKRTVLEDLKNVFPPEVAVFEPSEAEISHTQKATLVCLATGFYPDHVELSWWVNGKEVHSGVSTDPQPLKEQPALNDSRYCLSSRLRVSATFWQNPRNHFRCQVQFYGLSENDEWTQDRAKPVTQIVSAEAWGRADCGFTSESYQQGVLSATILYEILLGKATLYAVLVSALVLMAMVKRKDSRG

SEQ ID NO: 20558 - protein, 444 aa, Artificial Sequence
  Synthetic Polypeptide
MDWIWRILFLVGAATGAHSFEQVQLVQSGAEVKKPGESVKVSCKASGYTFTEYTIHWVRQAPGQGLEWMGNINPNNGGTTYNQKFEDRVTITADKSTSTAYMELSSLRSEDTAVYYCARGWNFDYWGQGTTVTVSSTRIQNPDPAVYQLRDSKSSDKSVCLFTDFDSQTNVSQSKDSDVYITDKTVLDMRSMDFKSNSAVAWSNKSDFACANAFNNSIIPEDTFFPSPESSCDVKLVEKSFETDTNLNFQNLSVIGFRILLLKVAGFNLLMTLRLWSSRAKRSGSGVKQTLNFDLLKLAGDVESNPGPSRGHMAKPLSQEESTLIERATATINSIPISEDYSVASAALSSDGRIFTGVNVYHFTGGPCAELVVLGTAAAAAAGNLTCIVAIGNENRGILSPCGRCRQVLLDLHPGIKAIVKDSDGQPTAVGIRELLPSGYVWEG

SEQ ID NO: 20559 - protein, 278 aa, Artificial Sequence
  Synthetic Polypeptide
MDWIWRILFLVGAATGAHSFEQVQLVQSGAEVKKPGESVKVSCKASGYTFTEYTIHWVRQAPGQGLEWMGNINPNNGGTTYNQKFEDRVTITADKSTSTAYMELSSLRSEDTAVYYCARGWNFDYWGQGTTVTVSSTRIQNPDPAVYQLRDSKSSDKSVCLFTDFDSQTNVSQSKDSDVYITDKTVLDMRSMDFKSNSAVAWSNKSDFACANAFNNSIIPEDTFFPSPESSCDVKLVEKSFETDTNLNFQNLSVIGFRILLLKVAGFNLLMTLRLWSS

SEQ ID NO: 20560 - protein, 559 aa, Artificial Sequence
  Synthetic Polypeptide
MALPVTALLLPLALLLHAARPDIQMTQSPSSLSASVGDRVTITCKASQDVGTAVDWYQQKPGKAPKLLISWASTRHTGVPSRFSGSGSGTDFTLTISSLQPEDFATYFCQQYNSYPLTFGQGTKVEIKRTVLEGKPIPNPLLGLDSTGSGEDLKNVFPPEVAVFEPSEAEISHTQKATLVCLATGFYPDHVELSWWVNGKEVHSGVCTDPQPLKEQPALNDSRYCLSSRLRVSATFWQNPRNHFRCQVQFYGLSENDEWTQDRAKPVTQIVSAEAWGRADCGFTSESYQQGVLSATILYEILLGKATLYAVLVSALVLMAMVKRKDSRGRAKRSGSGATNFSLLKQAGDVEENPGPTRGHMTEYKPTVRLATRDDVPRAVRTLAAAFADYPATRHTVDPDRHIERVTELQELFLTRVGLDIGKVWVADDGAAVAVWTTPESVEAGAVFAEIGPRMAELSGSRLAAQQQMEGLLAPHRPKEPAWFLATVGVSPDHQGKGLGSAVVLPGVEAAERAGVPAFLETSAPRNLPFYERLGFTVTADVEVPEGPRTWCMTRKPGA

SEQ ID NO: 20561 - protein, 329 aa, Artificial Sequence
  Synthetic Polypeptide
MALPVTALLLPLALLLHAARPDIQMTQSPSSLSASVGDRVTITCKASQDVGTAVDWYQQKPGKAPKLLISWASTRHTGVPSRFSGSGSGTDFTLTISSLQPEDFATYFCQQYNSYPLTFGQGTKVEIKRTVLEGKPIPNPLLGLDSTGSGEDLKNVFPPEVAVFEPSEAEISHTQKATLVCLATGFYPDHVELSWWVNGKEVHSGVCTDPQPLKEQPALNDSRYCLSSRLRVSATFWQNPRNHFRCQVQFYGLSENDEWTQDRAKPVTQIVSAEAWGRADCGFTSESYQQGVLSATILYEILLGKATLYAVLVSALVLMAMVKRKDSRG

SEQ ID NO: 20562 - protein, 456 aa, Artificial Sequence
  Synthetic Polypeptide
MDWIWRILFLVGAATGAHSFEQVQLVQSGAEVKKPGESVKVSCKASGYTFTEYTIHWVRQAPGQGLEWMGNINPNNGGTTYNQKFEDRVTITADKSTSTAYMELSSLRSEDTAVYYCARGWNFDYWGQGTTVTVSSTREQKLISEEDGSGIQNPDPAVYQLRDSKSSDKSVCLFTDFDSQTNVSQSKDSDVYITDKCVLDMRSMDFKSNSAVAWSNKSDFACANAFNNSIIPEDTFFPSPESSCDVKLVEKSFETDTNLNFQNLSVIGFRILLLKVAGFNLLMTLRLWSSRAKRSGSGVKQTLNFDLLKLAGDVESNPGPSRGHMAKPLSQEESTLIERATATINSIPISEDYSVASAALSSDGRIFTGVNVYHFTGGPCAELVVLGTAAAAAAGNLTCIVAIGNENRGILSPCGRCRQVLLDLHPGIKAIVKDSDGQPTAVGIRELLPSGYVWEG

SEQ ID NO: 20563 - protein, 290 aa, Artificial Sequence
  Synthetic Polypeptide
MDWIWRILFLVGAATGAHSFEQVQLVQSGAEVKKPGESVKVSCKASGYTFTEYTIHWVRQAPGQGLEWMGNINPNNGGTTYNQKFEDRVTITADKSTSTAYMELSSLRSEDTAVYYCARGWNFDYWGQGTTVTVSSTREQKLISEEDGSGIQNPDPAVYQLRDSKSSDKSVCLFTDFDSQTNVSQSKDSDVYITDKCVLDMRSMDFKSNSAVAWSNKSDFACANAFNNSIIPEDTFFPSPESSCDVKLVEKSFETDTNLNFQNLSVIGFRILLLKVAGFNLLMTLRLWSS

SEQ ID NO: 20564 - protein, 639 aa, Artificial Sequence
  Synthetic Polypeptide
MALPVTALLLPLALLLHAARPDIQMTQSPSSLSASVGDRVTITCKASQDVGTAVDWYQQKPGKAPKLLISWASTRHTGVPSRFSGSGSGTDFTLTISSLQPEDFATYFCQQYNSYPLTFGQGTKVEIKRTVGGGGSGGGGSGGGGSQVQLVQSGAEVKKPGESVKVSCKASGYTFTEYTIHWVRQAPGQGLEWMGNINPNNGGTTYNQKFEDRVTITADKSTSTAYMELSSLRSEDTAVYYCARGWNFDYWGQGTTVTVSSTRGSGIQNPDPAVYQLRDSKSSDKSVCLFTDFDSQTNVSQSKDSDVYITDKTVLDMRSMDFKSNSAVAWSNKSDFACANAFNNSIIPEDTFFPSSDVPCDVKLVEKSFETDTNLNFQNLSVIGFRILLLKVAGFNLLMTLRLWSSRAKRSGSGVKQTLNFDLLKLAGDVESNPGPSRGHMTEYKPTVRLATRDDVPRAVRTLAAAFADYPATRHTVDPDRHIERVTELQELFLTRVGLDIGKVWVADDGAAVAVWTTPESVEAGAVFAEIGPRMAELSGSRLAAQQQMEGLLAPHRPKEPAWFLATVGVSPDHQGKGLGSAVVLPGVEAAERAGVPAFLETSAPRNLPFYERLGFTVTADVEVPEGPRTWCMTRKPGA

SEQ ID NO: 20565 - protein, 671 aa, Artificial Sequence
  Synthetic Polypeptide
MALPVTALLLPLALLLHAARPDIQMTQSPSSLSASVGDRVTITCKASQDVGTAVDWYQQKPGKAPKLLISWASTRHTGVPSRFSGSGSGTDFTLTISSLQPEDFATYFCQQYNSYPLTFGQGTKVEIKRTVGGGGSGGGGSGGGGSQVQLVQSGAEVKKPGESVKVSCKASGYTFTEYTIHWVRQAPGQGLEWMGNINPNNGGTTYNQKFEDRVTITADKSTSTAYMELSSLRSEDTAVYYCARGWNFDYWGQGTTVTVSSLEDLKNVFPPEVAVFEPSKAEIAHTQKATLVCLATGFYPDHVELSWWVNGKEVHSGVSTDPQPLKEQPALNDSRYCLSSRLRVSATFWQNPRNHFRCQVQFYGLSENDEWTQDRAKPVTQIVSAEAWGRADCGITSASYHQGVLSATILYEILLGKATLYAVLVSALVLMAMVKRKDSRGRAKRSGSGATNFSLLKQAGDVEENPGPTRGHMTEYKPTVRLATRDDVPRAVRTLAAAFADYPATRHTVDPDRHIERVTELQELFLTRVGLDIGKVWVADDGAAVAVWTTPESVEAGAVFAEIGPRMAELSGSRLAAQQQMEGLLAPHRPKEPAWFLATVGVSPDHQGKGLGSAVVLPGVEAAERAGVPAFLETSAPRNLPFYERLGFTVTADVEVPEGPRTWCMTRKPGA

SEQ ID NO: 20566 - protein, 694 aa, Artificial Sequence
  Synthetic Polypeptide
MALPVTALLLPLALLLHAARPDIQMTQSPSSLSASVGDRVTITCKASQDVGTAVDWYQQKPGKAPKLLISWASTRHTGVPSRFSGSGSGTDFTLTISSLQPEDFATYFCQQYNSYPLTFGQGTKVEIKRTVGGGGSGGGGSGGGGSQVQLVQSGAEVKKPGESVKVSCKASGYTFTEYTIHWVRQAPGQGLEWMGNINPNNGGTTYNQKFEDRVTITADKSTSTAYMELSSLRSEDTAVYYCARGWNFDYWGQGTTVTVSSTRGSGGGGSGGGGSGDGNEEMGGITQTPYKVSISGTTVILTCPQYPGSEILWQHNDKNIGGDEDDKNIGSDEDHLSLKEFSELEQSGYYVCYPRGSKPEDANFYLYLRARVCENCMEMDVMSVATIVIVDICITGGLLLLVYYWSKNRKAKAKPVTRGAGAGGRQRGQNKERPPPVPNPDYEPIRKGQRDLYSGLNQRRIRAKRSGSGVKQTLNFDLLKLAGDVESNPGPSRGHMTEYKPTVRLATRDDVPRAVRTLAAAFADYPATRHTVDPDRHIERVTELQELFLTRVGLDIGKVWVADDGAAVAVWTTPESVEAGAVFAEIGPRMAELSGSRLAAQQQMEGLLAPHRPKEPAWFLATVGVSPDHQGKGLGSAVVLPGVEAAERAGVPAFLETSAPRNLPFYERLGFTVTADVEVPEGPRTWCMTRKPGA

SEQ ID NO: 20567 - protein, 659 aa, Artificial Sequence
  Synthetic Polypeptide
MALPVTALLLPLALLLHAARPDIQMTQSPSSLSASVGDRVTITCKASQDVGTAVDWYQQKPGKAPKLLISWASTRHTGVPSRFSGSGSGTDFTLTISSLQPEDFATYFCQQYNSYPLTFGQGTKVEIKRTVGGGGSGGGGSGGGGSQVQLVQSGAEVKKPGESVKVSCKASGYTFTEYTIHWVRQAPGQGLEWMGNINPNNGGTTYNQKFEDRVTITADKSTSTAYMELSSLRSEDTAVYYCARGWNFDYWGQGTTVTVSSTRGSGGGGSGGGGSGFKIPIEELEDRVFVNCNTSITWVEGTVGTLLSDITRLDLGKRILDPRGIYRCNGTDIYKDKESTVQVHYRMCQSCVELDPATVAGIIVTDVIATLLLALGVFCFAGHETGRLSGAADTQALLRNDQVYQPLRDRDDAQYSHLGGNWARNKRAKRSGSGVKQTLNFDLLKLAGDVESNPGPSRGHMTEYKPTVRLATRDDVPRAVRTLAAAFADYPATRHTVDPDRHIERVTELQELFLTRVGLDIGKVWVADDGAAVAVWTTPESVEAGAVFAEIGPRMAELSGSRLAAQQQMEGLLAPHRPKEPAWFLATVGVSPDHQGKGLGSAVVLPGVEAAERAGVPAFLETSAPRNLPFYERLGFTVTADVEVPEGPRTWCMTRKPGA

SEQ ID NO: 20568 - protein, 669 aa, Artificial Sequence
  Synthetic Polypeptide
MALPVTALLLPLALLLHAARPDIQMTQSPSSLSASVGDRVTITCKASQDVGTAVDWYQQKPGKAPKLLISWASTRHTGVPSRFSGSGSGTDFTLTISSLQPEDFATYFCQQYNSYPLTFGQGTKVEIKRTVGGGGSGGGGSGGGGSQVQLVQSGAEVKKPGESVKVSCKASGYTFTEYTIHWVRQAPGQGLEWMGNINPNNGGTTYNQKFEDRVTITADKSTSTAYMELSSLRSEDTAVYYCARGWNFDYWGQGTTVTVSSTRGSGGGGSGGGGSGQSIKGNHLVKVYDYQEDGSVLLTCDAEAKNITWFKDGKMIGFLTEDKKKWNLGSNAKDPRGMYQCKGSQNKSKPLQVYYRMCQNCIELNAATISGFLFAEIVSIFVLAVGVYFIAGQDGVRQSRASDKQTLLPNDQLYQPLKDREDDQYSHLQGNQLRRNRAKRSGSGVKQTLNFDLLKLAGDVESNPGPSRGHMTEYKPTVRLATRDDVPRAVRTLAAAFADYPATRHTVDPDRHIERVTELQELFLTRVGLDIGKVWVADDGAAVAVWTTPESVEAGAVFAEIGPRMAELSGSRLAAQQQMEGLLAPHRPKEPAWFLATVGVSPDHQGKGLGSAVVLPGVEAAERAGVPAFLETSAPRNLPFYERLGFTVTADVEVPEGPRTWCMTRKPGA

SEQ ID NO: 20569 - protein, 652 aa, Artificial Sequence
  Synthetic Polypeptide
MALPVTALLLPLALLLHAARPDIQMTQSPSSLSASVGDRVTITCKASQDVGTAVDWYQQKPGKAPKLLISWASTRHTGVPSRFSGSGSGTDFTLTISSLQPEDFATYFCQQYNSYPLTFGQGTKVEIKRTVGGGGSGGGGSGGGGSQVQLVQSGAEVKKPGESVKVSCKASGYTFTEYTIHWVRQAPGQGLEWMGNINPNNGGTTYNQKFEDRVTITADKSTSTAYMELSSLRSEDTAVYYCARGWNFDYWGQGTTVTVSSTRGSGGGGSGGGGSGQSFGLLDPKLCYLLDGILFIYGVILTALFLRVKFSRSADAPAYQQGQNQLYNELNLGRREEYDVLDKRRGRDPEMGGKPQRRKNPQEGLYNELQKDKMAEAYSEIGMKGERRRGKGHDGLYQGLSTATKDTYDALHMQALPPRRAKRSGSGVKQTLNFDLLKLAGDVESNPGPSRGHMTEYKPTVRLATRDDVPRAVRTLAAAFADYPATRHTVDPDRHIERVTELQELFLTRVGLDIGKVWVADDGAAVAVWTTPESVEAGAVFAEIGPRMAELSGSRLAAQQQMEGLLAPHRPKEPAWFLATVGVSPDHQGKGLGSAVVLPGVEAAERAGVPAFLETSAPRNLPFYERLGFTVTADVEVPEGPRTWCMTRKPGA

SEQ ID NO: 20570 - protein, 753 aa, Artificial Sequence
  Synthetic Polypeptide
MALPVTALLLPLALLLHAARPEVQLVESGGGLVQPGGSLRLSCAASGFSFSDFWMSWVRQAPGKGLEWVATISQAGSEKDYVDSVKGRFTISRDNAKKSLYLQMNSLRAEDTAVYYCASGVYSFDYRGQGTLVTVSSGTGGGGSGGGGSGGGGSEFDIQMTQSPSSLSASVGDRVTITCKASQDVGTAVDWYQQKPGKAPKLLISWASTRHTGVPSRFSGSGSGTDFTLTISSLQPEDFATYFCQQYNSYPLTFGQGTKVEIKRTVLEDLKNVFPPEVAVFEPSEAEISHTQKATLVCLATGFYPDHVELSWWVNGKEVHSGVCTDPQPLKEQPALNDSRYCLSSRLRVSATFWQNPRNHFRCQVQFYGLSENDEWTQDRAKPVTQIVSAEAWGRADCGFTSESYQQGVLSATILYEILLGKATLYAVLVSALVLMAMVKRKDSRGRAKRSGSGATNFSLLKQAGDVEENPGPTSMDWIWRILFLVGAATGAHSFEQVQLVQSGAEVKKPGESVKVSCKASGYTFTEYTIHWVRQAPGQGLEWMGNINPNNGGTTYNQKFEDRVTITADKSTSTAYMELSSLRSEDTAVYYCARGWNFDYWGQGTTVTVSSTRIQNPDPAVYQLRDSKSSDKSVCLFTDFDSQTNVSQSKDSDVYITDKCVLDMRSMDFKSNSAVAWSNKSDFACANAFNNSIIPEDTFFPSPESSCDVKLVEKSFETDTNLNFQNLSVIGFRILLLKVAGFNLLMTLRLWSS

SEQ ID NO: 20571 - protein, 757 aa, Artificial Sequence
  Synthetic Polypeptide
MALPVTALLLPLALLLHAARPEVQLVESGGGLVQPGGSLRLSCAASGFSFSDFWMSWVRQAPGKGLEWVATISQAGSEKDYVDSVKGRFTISRDNAKKSLYLQMNSLRAEDTAVYYCASGVYSFDYRGQGTLVTVSSGTGGGGSGGGGSGGGGSEFDIQMTQSPSSLSASVGDRVTITCKASQDVGTAVDWYQQKPGKAPKLLISWASTRHTGVPSRFSGSGSGTDFTLTISSLQPEDFATYFCQQYNSYPLTFGQGTKVEIKRTVLEIQNPDPAVYQLRDSKSSDKSVCLFTDFDSQTNVSQSKDSDVYITDKCVLDMRSMDFKSNSAVAWSNKSDFACANAFNNSIIPEDTFFPSPESSCDVKLVEKSFETDTNLNFQNLSVIGFRILLLKVAGFNLLMTLRLWSSRAKRSGSGVKQTLNFDLLKLAGDVESNPGPTSMDWIWRILFLVGAATGAHSFEQVQLVQSGAEVKKPGESVKVSCKASGYTFTEYTIHWVRQAPGQGLEWMGNINPNNGGTTYNQKFEDRVTITADKSTSTAYMELSSLRSEDTAVYYCARGWNFDYWGQGTTVTVSSTREDLKNVFPPEVAVFEPSEAEISHTQKATLVCLATGFYPDHVELSWWVNGKEVHSGVCTDPQPLKEQPALNDSRYCLSSRLRVSATFWQNPRNHFRCQVQFYGLSENDEWTQDRAKPVTQIVSAEAWGRADCGFTSESYQQGVLSATILYEILLGKATLYAVLVSALVLMAMVKRKDSRG

SEQ ID NO: 20572 - protein, 949 aa, Artificial Sequence
  Synthetic Polypeptide
MALPVTALLLPLALLLHAARPEVQLVESGGGLVQPGGSLRLSCAASGFSFSDFWMSWVRQAPGKGLEWVATISQAGSEKDYVDSVKGRFTISRDNAKKSLYLQMNSLRAEDTAVYYCASGVYSFDYRGQGTLVTVSSGTGGGGSGGGGSGGGGSEFDIQMTQSPSSLSASVGDRVTITCKASQDVGTAVDWYQQKPGKAPKLLISWASTRHTGVPSRFSGSGSGTDFTLTISSLQPEDFATYFCQQYNSYPLTFGQGTKVEIKRTVLEDLKNVFPPEVAVFEPSEAEISHTQKATLVCLATGFYPDHVELSWWVNGKEVHSGVSTDPQPLKEQPALNDSRYCLSSRLRVSATFWQNPRNHFRCQVQFYGLSENDEWTQDRAKPVTQIVSAEAWGRADCGSQSFGLLDPKLCYLLDGILFIYGVILTALFLRVKFSRSADAPAYQQGQNQLYNELNLGRREEYDVLDKRRGRDPEMGGKPQRRKNPQEGLYNELQKDKMAEAYSEIGMKGERRRGKGHDGLYQGLSTATKDTYDALHMQALPPRRAKRSGSGATNFSLLKQAGDVEENPGPTSMDWIWRILFLVGAATGAHSFEQVQLVQSGAEVKKPGESVKVSCKASGYTFTEYTIHWVRQAPGQGLEWMGNINPNNGGTTYNQKFEDRVTITADKSTSTAYMELSSLRSEDTAVYYCARGWNFDYWGQGTTVTVSSTRIQNPDPAVYQLRDSKSSDKSVCLFTDFDSQTNVSQSKDSDVYITDKTVLDMRSMDFKSNSAVAWSNKSDFACANAFNNSIIPEDTFFPSPESSCGTQSFGLLDPKLCYLLDGILFIYGVILTALFLRVKFSRSADAPAYQQGQNQLYNELNLGRREEYDVLDKRRGRDPEMGGKPQRRKNPQEGLYNELQKDKMAEAYSEIGMKGERRRGKGHDGLYQGLSTATKDTYDALHMQALPPR

SEQ ID NO: 20573 - protein, 779 aa, Artificial Sequence
  Synthetic Polypeptide
MALPVTALLLPLALLLHAARPEVQLVESGGGLVQPGGSLRLSCAASGFSFSDFWMSWVRQAPGKGLEWVATISQAGSEKDYVDSVKGRFTISRDNAKKSLYLQMNSLRAEDTAVYYCASGVYSFDYRGQGTLVTVSSGTGGGGSGGGGSGGGGSEFDIQMTQSPSSLSASVGDRVTITCKASQDVGTAVDWYQQKPGKAPKLLISWASTRHTGVPSRFSGSGSGTDFTLTISSLQPEDFATYFCQQYNSYPLTFGQGTKVEIKRTVLEGQPKANPTVTLFPPSSEELQANKATLVCLISDFYPGAVTVAWKADGSPVKAGVETTKPSKQSNNKYAASSYLSLTPEQWKSHRSYSCQVTHEGSTVEKTVAPTECSPIKTDVITMDPKDNCSKDANDTLLLQLTNTSAYYMYLLLLLKSVVYFAIITCCLLRRTAFCCNGEKSRAKRSGSGATNFSLLKQAGDVEENPGPTSMDWIWRILFLVGAATGAHSFEQVQLVQSGAEVKKPGESVKVSCKASGYTFTEYTIHWVRQAPGQGLEWMGNINPNNGGTTYNQKFEDRVTITADKSTSTAYMELSSLRSEDTAVYYCARGWNFDYWGQGTTVTVSSTRASTKGPSVFPLAPSSKSTSGGTAALGCLVKDYFPEPVTVSWNSGALTSGVHTFPAVLQSSGLYSLSSVVTVPSSSLGTQTYICNVNHKPSNTKVDKRVEPKSCEVKTDSTDHVKPKETENTKQPSKSCHKPKAIVHTEKVNMMSLTVLGLRMLFAKTVAVNFLLTAKLFFL

SEQ ID NO: 20574 - protein, 760 aa, Artificial Sequence
  Synthetic Polypeptide
MALPVTALLLPLALLLHAARPEVQLVESGGGLVQPGGSLRLSCAASGFSFSDFWMSWVRQAPGKGLEWVATISQAGSEKDYVDSVKGRFTISRDNAKKSLYLQMNSLRAEDTAVYYCASGVYSFDYRGQGTLVTVSSGTGGGGSGGGGSGGGGSEFDIQMTQSPSSLSASVGDRVTITCKASQDVGTAVDWYQQKPGKAPKLLISWASTRHTGVPSRFSGSGSGTDFTLTISSLQPEDFATYFCQQYNSYPLTFGQGTKVEIKRTVLEGQPKANPTVTLFPPSSEELQANKATLVCLISDFYPGAVTVAWKADGSPVKAGVETTKPSKQSNNKYAASSYLSLTPEQWKSHRSYSCQVTHEGSTVEKTVAPTECSGRADCGFTSESYQQGVLSATILYEILLGKATLYAVLVSALVLMAMVKRKDSRGRAKRSGSGVKQTLNFDLLKLAGDVESNPGPTSMDWIWRILFLVGAATGAHSFEQVQLVQSGAEVKKPGESVKVSCKASGYTFTEYTIHWVRQAPGQGLEWMGNINPNNGGTTYNQKFEDRVTITADKSTSTAYMELSSLRSEDTAVYYCARGWNFDYWGQGTTVTVSSTRASTKGPSVFPLAPSSKSTSGGTAALGCLVKDYFPEPVTVSWNSGALTSGVHTFPAVLQSSGLYSLSSVVTVPSSSLGTQTYICNVNHKPSNTKVDKRVEPKSCIPEDTFFPSPESSCDVKLVEKSFETDTNLNFQNLSVIGFRILLLKVAGFNLLMTLRLWSS

SEQ ID NO: 20575 - protein, 894 aa, Artificial Sequence
  Synthetic Polypeptide
MALPVTALLLPLALLLHAARPEVQLVESGGGLVQPGGSLRLSCAASGFSFSDFWMSWVRQAPGKGLEWVATISQAGSEKDYVDSVKGRFTISRDNAKKSLYLQMNSLRAEDTAVYYCASGVYSFDYRGQGTLVTVSSGTGGGGSGGGGSGGGGSEFDIQMTQSPSSLSASVGDRVTITCKASQDVGTAVDWYQQKPGKAPKLLISWASTRHTGVPSRFSGSGSGTDFTLTISSLQPEDFATYFCQQYNSYPLTFGQGTKVEIKRTVLEIQNPDPAVYQLRDSKSSDKSVCLFTDFDSQTNVSQSKDSDVYITDKCVLDMRSMDFKSNSAVAWSNKSDFACANAFNNSIIPEDTFFPSPESSCDVKLVEKSFETDTNLNFQNLSVIGFRILLLKVAGFNLLMTLRLWSSRAKRSGSGVKQTLNFDLLKLAGDVESNPGPTSMDWIWRILFLVGAATGAHSGPQLQLQESGPGLVKPSETLSLTCTVSGDSISSGDYYWGWIRQPPGKGLEWIGHIYYSGVTYYNPSLKSRVTISVDTSRNQFSLKLSSVTAADTAVYYCTREDSSNWRSRGQGTLVTVSSGSGGGGSGGGGSGGGGSFEQVQLVQSGAEVKKPGESVKVSCKASGYTFTEYTIHWVRQAPGQGLEWMGNINPNNGGTTYNQKFEDRVTITADKSTSTAYMELSSLRSEDTAVYYCARGWNFDYWGQGTTVTVSSTREDLKNVFPPEVAVFEPSEAEISHTQKATLVCLATGFYPDHVELSWWVNGKEVHSGVCTDPQPLKEQPALNDSRYCLSSRLRVSATFWQNPRNHFRCQVQFYGLSENDEWTQDRAKPVTQIVSAEAWGRADCGFTSESYQQGVLSATILYEILLGKATLYAVLVSALVLMAMVKRKDSRG

SEQ ID NO: 20576 - protein, 1086 aa, Artificial Sequence
  Synthetic Polypeptide
MALPVTALLLPLALLLHAARPEVQLVESGGGLVQPGGSLRLSCAASGFSFSDFWMSWVRQAPGKGLEWVATISQAGSEKDYVDSVKGRFTISRDNAKKSLYLQMNSLRAEDTAVYYCASGVYSFDYRGQGTLVTVSSGTGGGGSGGGGSGGGGSEFDIQMTQSPSSLSASVGDRVTITCKASQDVGTAVDWYQQKPGKAPKLLISWASTRHTGVPSRFSGSGSGTDFTLTISSLQPEDFATYFCQQYNSYPLTFGQGTKVEIKRTVLEDLKNVFPPEVAVFEPSEAEISHTQKATLVCLATGFYPDHVELSWWVNGKEVHSGVSTDPQPLKEQPALNDSRYCLSSRLRVSATFWQNPRNHFRCQVQFYGLSENDEWTQDRAKPVTQIVSAEAWGRADCGSQSFGLLDPKLCYLLDGILFIYGVILTALFLRVKFSRSADAPAYQQGQNQLYNELNLGRREEYDVLDKRRGRDPEMGGKPQRRKNPQEGLYNELQKDKMAEAYSEIGMKGERRRGKGHDGLYQGLSTATKDTYDALHMQALPPRRAKRSGSGATNFSLLKQAGDVEENPGPTSMDWIWRILFLVGAATGAHSGPQLQLQESGPGLVKPSETLSLTCTVSGDSISSGDYYWGWIRQPPGKGLEWIGHIYYSGVTYYNPSLKSRVTISVDTSRNQFSLKLSSVTAADTAVYYCTREDSSNWRSRGQGTLVTVSSGSGGGGSGGGGSGGGGSFEQVQLVQSGAEVKKPGESVKVSCKASGYTFTEYTIHWVRQAPGQGLEWMGNINPNNGGTTYNQKFEDRVTITADKSTSTAYMELSSLRSEDTAVYYCARGWNFDYWGQGTTVTVSSTRIQNPDPAVYQLRDSKSSDKSVCLFTDFDSQTNVSQSKDSDVYITDKTVLDMRSMDFKSNSAVAWSNKSDFACANAFNNSIIPEDTFFPSPESSCGTQSFGLLDPKLCYLLDGILFIYGVILTALFLRVKFSRSADAPAYQQGQNQLYNELNLGRREEYDVLDKRRGRDPEMGGKPQRRKNPQEGLYNELQKDKMAEAYSEIGMKGERRRGKGHDGLYQGLSTATKDTYDALHMQALPPR

SEQ ID NO: 20577 - protein, 916 aa, Artificial Sequence
  Synthetic Polypeptide
MALPVTALLLPLALLLHAARPEVQLVESGGGLVQPGGSLRLSCAASGFSFSDFWMSWVRQAPGKGLEWVATISQAGSEKDYVDSVKGRFTISRDNAKKSLYLQMNSLRAEDTAVYYCASGVYSFDYRGQGTLVTVSSGTGGGGSGGGGSGGGGSEFDIQMTQSPSSLSASVGDRVTITCKASQDVGTAVDWYQQKPGKAPKLLISWASTRHTGVPSRFSGSGSGTDFTLTISSLQPEDFATYFCQQYNSYPLTFGQGTKVEIKRTVLEGQPKANPTVTLFPPSSEELQANKATLVCLISDFYPGAVTVAWKADGSPVKAGVETTKPSKQSNNKYAASSYLSLTPEQWKSHRSYSCQVTHEGSTVEKTVAPTECSPIKTDVITMDPKDNCSKDANDTLLLQLTNTSAYYMYLLLLLKSVVYFAIITCCLLRRTAFCCNGEKSRAKRSGSGATNFSLLKQAGDVEENPGPTSMDWIWRILFLVGAATGAHSGPQLQLQESGPGLVKPSETLSLTCTVSGDSISSGDYYWGWIRQPPGKGLEWIGHIYYSGVTYYNPSLKSRVTISVDTSRNQFSLKLSSVTAADTAVYYCTREDSSNWRSRGQGTLVTVSSGSGGGGSGGGGSGGGGSFEQVQLVQSGAEVKKPGESVKVSCKASGYTFTEYTIHWVRQAPGQGLEWMGNINPNNGGTTYNQKFEDRVTITADKSTSTAYMELSSLRSEDTAVYYCARGWNFDYWGQGTTVTVSSTRASTKGPSVFPLAPSSKSTSGGTAALGCLVKDYFPEPVTVSWNSGALTSGVHTFPAVLQSSGLYSLSSVVTVPSSSLGTQTYICNVNHKPSNTKVDKRVEPKSCEVKTDSTDHVKPKETENTKQPSKSCHKPKAIVHTEKVNMMSLTVLGLRMLFAKTVAVNFLLTAKLFFL

SEQ ID NO: 20578 - protein, 897 aa, Artificial Sequence
  Synthetic Polypeptide
MALPVTALLLPLALLLHAARPEVQLVESGGGLVQPGGSLRLSCAASGFSFSDFWMSWVRQAPGKGLEWVATISQAGSEKDYVDSVKGRFTISRDNAKKSLYLQMNSLRAEDTAVYYCASGVYSFDYRGQGTLVTVSSGTGGGGSGGGGSGGGGSEFDIQMTQSPSSLSASVGDRVTITCKASQDVGTAVDWYQQKPGKAPKLLISWASTRHTGVPSRFSGSGSGTDFTLTISSLQPEDFATYFCQQYNSYPLTFGQGTKVEIKRTVLEGQPKANPTVTLFPPSSEELQANKATLVCLISDFYPGAVTVAWKADGSPVKAGVETTKPSKQSNNKYAASSYLSLTPEQWKSHRSYSCQVTHEGSTVEKTVAPTECSGRADCGFTSESYQQGVLSATILYEILLGKATLYAVLVSALVLMAMVKRKDSRGRAKRSGSGVKQTLNFDLLKLAGDVESNPGPTSMDWIWRILFLVGAATGAHSGPQLQLQESGPGLVKPSETLSLTCTVSGDSISSGDYYWGWIRQPPGKGLEWIGHIYYSGVTYYNPSLKSRVTISVDTSRNQFSLKLSSVTAADTAVYYCTREDSSNWRSRGQGTLVTVSSGSGGGGSGGGGSGGGGSFEQVQLVQSGAEVKKPGESVKVSCKASGYTFTEYTIHWVRQAPGQGLEWMGNINPNNGGTTYNQKFEDRVTITADKSTSTAYMELSSLRSEDTAVYYCARGWNFDYWGQGTTVTVSSTRASTKGPSVFPLAPSSKSTSGGTAALGCLVKDYFPEPVTVSWNSGALTSGVHTFPAVLQSSGLYSLSSVVTVPSSSLGTQTYICNVNHKPSNTKVDKRVEPKSCIPEDTFFPSPESSCDVKLVEKSFETDTNLNFQNLSVIGFRILLLKVAGFNLLMTLRLWSS

SEQ ID NO: 20579 - protein, 754 aa, Artificial Sequence
  Synthetic Polypeptide
MALPVTALLLPLALLLHAARPEVQVLESGGGLVQPGGSLRLSCAASGFTFSNFAMSWVRQAPGKGLEWVSTISGSAGTTDYADSVKGRFTISRDNSKKTLYLQMNSLRVEDTAVYYCADGRGPFFDYRGQGTLVTVSSGTGGGGSGGGGSGGGGSEFDIQMTQSPSSLSASVGDRVTITCKASQDVGTAVDWYQQKPGKAPKLLISWASTRHTGVPSRFSGSGSGTDFTLTISSLQPEDFATYFCQQYNSYPLTFGQGTKVEIKRTVLEDLKNVFPPEVAVFEPSEAEISHTQKATLVCLATGFYPDHVELSWWVNGKEVHSGVCTDPQPLKEQPALNDSRYCLSSRLRVSATFWQNPRNHFRCQVQFYGLSENDEWTQDRAKPVTQIVSAEAWGRADCGFTSESYQQGVLSATILYEILLGKATLYAVLVSALVLMAMVKRKDSRGRAKRSGSGATNFSLLKQAGDVEENPGPTSMDWIWRILFLVGAATGAHSFEQVQLVQSGAEVKKPGESVKVSCKASGYTFTEYTIHWVRQAPGQGLEWMGNINPNNGGTTYNQKFEDRVTITADKSTSTAYMELSSLRSEDTAVYYCARGWNFDYWGQGTTVTVSSTRIQNPDPAVYQLRDSKSSDKSVCLFTDFDSQTNVSQSKDSDVYITDKCVLDMRSMDFKSNSAVAWSNKSDFACANAFNNSIIPEDTFFPSPESSCDVKLVEKSFETDTNLNFQNLSVIGFRILLLKVAGFNLLMTLRLWSS

SEQ ID NO: 20580 - protein, 755 aa, Artificial Sequence
  Synthetic Polypeptide
MALPVTALLLPLALLLHAARPDIQMTQSPSSLSASVGDRVTITCKASQDVGTAVDWYQQKPGKAPKLLISWASTRHTGVPSRFSGSGSGTDFTLTISSLQPEDFATYFCQQYNSYPLTFGQGTKVEIKRTVLEDLKNVFPPEVAVFEPSEAEISHTQKATLVCLATGFYPDHVELSWWVNGKEVHSGVCTDPQPLKEQPALNDSRYCLSSRLRVSATFWQNPRNHFRCQVQFYGLSENDEWTQDRAKPVTQIVSAEAWGRADCGFTSESYQQGVLSATILYEILLGKATLYAVLVSALVLMAMVKRKDSRGRAKRSGSGATNFSLLKQAGDVEENPGPTSMDWIWRILFLVGAATGAHSGPEVQLVESGGGLVQAGGSLRLSCAASGRTFSMGWFRQAPGKEREFVAAITYSGGSPYYADSVKGRFTISRDNAKNTVYLQMNSLKPEDTAVYYCAANPTYGSDWNAENWGQGTQVTVSSGSGGGGSGGGGSGGGGSFEQVQLVQSGAEVKKPGESVKVSCKASGYTFTEYTIHWVRQAPGQGLEWMGNINPNNGGTTYNQKFEDRVTITADKSTSTAYMELSSLRSEDTAVYYCARGWNFDYWGQGTTVTVSSTRIQNPDPAVYQLRDSKSSDKSVCLFTDFDSQTNVSQSKDSDVYITDKCVLDMRSMDFKSNSAVAWSNKSDFACANAFNNSIIPEDTFFPSPESSCDVKLVEKSFETDTNLNFQNLSVIGFRILLLKVAGFNLLMTLRLWSS

SEQ ID NO: 20581 - protein, 882 aa, Artificial Sequence
  Synthetic Polypeptide
MALPVTALLLPLALLLHAARPDIQMTQSPSSLSASVGDRVTITCKASQDVGTAVDWYQQKPGKAPKLLISWASTRHTGVPSRFSGSGSGTDFTLTISSLQPEDFATYFCQQYNSYPLTFGQGTKVEIKRTVLEDLKNVFPPEVAVFEPSEAEISHTQKATLVCLATGFYPDHVELSWWVNGKEVHSGVCTDPQPLKEQPALNDSRYCLSSRLRVSATFWQNPRNHFRCQVQFYGLSENDEWTQDRAKPVTQIVSAEAWGRADCGFTSESYQQGVLSATILYEILLGKATLYAVLVSALVLMAMVKRKDSRGRAKRSGSGATNFSLLKQAGDVEENPGPTSMDWIWRILFLVGAATGAHSQLQLQESGPGLVKPSETLSLTCTVSGGSISSGDYYWGWIRQPPGKGLEWIGSISYSGSTYYNPSLKSRVTISVDTSRNQFSLKLSSVTAADTAVYYCTREDSSNWRSRGQGTLVTVSSSGGGGSGGGGSEVQLVESGGGLVQAGGSLRLSCAASGRTFSMGWFRQAPGKEREFVAAITYSGGSPYYADSVKGRFTISRDNAKNTVYLQMNSLKPEDTAVYYCAANPTYGSDWNAENWGQGTQVTVSSGSGGGGSGGGGSGGGGSFEQVQLVQSGAEVKKPGESVKVSCKASGYTFTEYTIHWVRQAPGQGLEWMGNINPNNGGTTYNQKFEDRVTITADKSTSTAYMELSSLRSEDTAVYYCARGWNFDYWGQGTTVTVSSTRIQNPDPAVYQLRDSKSSDKSVCLFTDFDSQTNVSQSKDSDVYITDKCVLDMRSMDFKSNSAVAWSNKSDFACANAFNNSIIPEDTFFPSPESSCDVKLVEKSFETDTNLNFQNLSVIGFRILLLKVAGFNLLMTLRLWSS

SEQ ID NO: 20582 - protein, 891 aa, Artificial Sequence
  Synthetic Polypeptide
MALPVTALLLPLALLLHAARPEVQVLESGGGLVQPGGSLRLSCAASGFTFSNFAMSWVRQAPGKGLEWVSTISGSAGTTDYADSVKGRFTISRDNSKKTLYLQMNSLRVEDTAVYYCADGRGPFFDYRGQGTLVTVSSGTGGGGSGGGGSGGGGSEFDIQMTQSPSSLSASVGDRVTITCKASQDVGTAVDWYQQKPGKAPKLLISWASTRHTGVPSRFSGSGSGTDFTLTISSLQPEDFATYFCQQYNSYPLTFGQGTKVEIKRTVLEDLKNVFPPEVAVFEPSEAEISHTQKATLVCLATGFYPDHVELSWWVNGKEVHSGVCTDPQPLKEQPALNDSRYCLSSRLRVSATFWQNPRNHFRCQVQFYGLSENDEWTQDRAKPVTQIVSAEAWGRADCGFTSESYQQGVLSATILYEILLGKATLYAVLVSALVLMAMVKRKDSRGRAKRSGSGATNFSLLKQAGDVEENPGPTSMDWIWRILFLVGAATGAHSGPEVQLVESGGGLVQAGGSLRLSCAASGRTFSMGWFRQAPGKEREFVAAITYSGGSPYYASSVRGRFTISRDNAKNTVYLQMNSLKPEDTAVYYCAANPTYGSDWNAENWGQGTQVTVSSGSGGGGSGGGGSGGGGSFEQVQLVQSGAEVKKPGESVKVSCKASGYTFTEYTIHWVRQAPGQGLEWMGNINPNNGGTTYNQKFEDRVTITADKSTSTAYMELSSLRSEDTAVYYCARGWNFDYWGQGTTVTVSSTRIQNPDPAVYQLRDSKSSDKSVCLFTDFDSQTNVSQSKDSDVYITDKCVLDMRSMDFKSNSAVAWSNKSDFACANAFNNSIIPEDTFFPSPESSCDVKLVEKSFETDTNLNFQNLSVIGFRILLLKVAGFNLLMTLRLWSS

SEQ ID NO: 20583 - protein, 720 aa, Artificial Sequence
  Synthetic Polypeptide
MALPVTALLLPLALLLHAARPDIQMTQSPSSLSASVGDRVTITCKASQDVGTAVDWYQQKPGKAPKLLIYWASTRHTGVPSRFSGSGSGTDFTLTISSLQPEDFATYYCQQYNSYPLTFGQGTKVEIKRGGGGSGGGGSGGGGSEVQLQQSGPELVKPGTSVRISCKTSGYTFTEYTIHWVKQSHGKSLEWIGNINPNNGGTTYNQKFEDKATLTVDKSSSTAYMELRSLTSEDSAVYYCAAGWNFDYWGQGTTLTVSSTREQKLISEEDLAKPTTTPAPRPPTPAPTIASQPLSLRPEACRPAAGGAVHTRGLDFACDIYIWAPLAGTCGVLLLSLVITLYCKRGRKKLLYIFKQPFMRPVQTTQEEDGCSCRFPEEEEGGCELRVKFSRSADAPAYQQGQNQLYNELNLGRREEYDVLDKRRGRDPEMGGKPRRKNPQEGLYNELQKDKMAEAYSEIGMKGERRRGKGHDGLYQGLSTATKDTYDALHMQALPPRSSGSGEGRGSLLTCGDVEENPGPHMTEYKPTVRLATRDDVPRAVRTLAAAFADYPATRHTVDPDRHIERVTELQELFLTRVGLDIGKVWVADDGAAVAVWTTPESVEAGAVFAEIGPRMAELSGSRLAAQQQMEGLLAPHRPKEPAWFLATVGVSPDHQGKGLGSAVVLPGVEAAERAGVPAFLETSAPRNLPFYERLGFTVTADVEVPEGPRTWCMTRKPGA

SEQ ID NO: 20584 - protein, 714 aa, Artificial Sequence
  Synthetic Polypeptide
MALPVTALLLPLALLLHAARPDIQMTQSPSSLSASVGDRVTITCKASQDVGTAVDWYQQKPGKAPKLLIYWASTRHTGVPSRFSGSGSGTDFTLTISSLQPEDFATYYCQQYNSYPLTFGQGTKVEIKRGGGGSGGGGSGGGGSEVQLQQSGPELVKPGTSVRISCKTSGYTFTEYTIHWVKQSHGKSLEWIGNINPNNGGTTYNQKFEDKATLTVDKSSSTAYMELRSLTSEDSAVYYCAAGWNFDYWGQGTTLTVSSTREQKLISEEDLKIEVMYPPPYLDNEKSNGTIIHVKGKHLCPSPLFPGPSKPFWVLVVVGGVLACYSLLVTVAFIIFWVRSKRSRLLHSDYMNMTPRRPGPTRKHYQPYAPPRDFAAYRSRVKFSRSADAPAYQQGQNQLYNELNLGRREEYDVLDKRRGRDPEMGGKPRRKNPQEGLYNELQKDKMAEAYSEIGMKGERRRGKGHDGLYQGLSTATKDTYDALHMQALPPRSSGSGEGRGSLLTCGDVEENPGPHMTEYKPTVRLATRDDVPRAVRTLAAAFADYPATRHTVDPDRHIERVTELQELFLTRVGLDIGKVWVADDGAAVAVWTTPESVEAGAVFAEIGPRMAELSGSRLAAQQQMEGLLAPHRPKEPAWFLATVGVSPDHQGKGLGSAVVLPGVEAAERAGVPAFLETSAPRNLPFYERLGFTVTADVEVPEGPRTWCMTRKPGA

SEQ ID NO: 20585 - protein, 491 aa, Artificial Sequence
  Synthetic Polypeptide
MALPVTALLLPLALLLHAARPDIQMTQSPSSLSASVGDRVTITCKASQDVGTAVDWYQQKPGKAPKLLIYWASTRHTGVPSRFSGSGSGTDFTLTISSLQPEDFATYYCQQYNSYPLTFGQGTKVEIKRGGGGSGGGGSGGGGSEVQLQQSGPELVKPGTSVRISCKTSGYTFTEYTIHWVKQSHGKSLEWIGNINPNNGGTTYNQKFEDKATLTVDKSSSTAYMELRSLTSEDSAVYYCAAGWNFDYWGQGTTLTVSSTREQKLISEEDLKIEVMYPPPYLDNEKSNGTIIHVKGKHLCPSPLFPGPSKPFWVLVVVGGVLACYSLLVTVAFIIFWVRSKRSRLLHSDYMNMTPRRPGPTRKHYQPYAPPRDFAAYRSRVKFSRSADAPAYQQGQNQLYNELNLGRREEYDVLDKRRGRDPEMGGKPRRKNPQEGLYNELQKDKMAEAYSEIGMKGERRRGKGHDGLYQGLSTATKDTYDALHMQALPPR

SEQ ID NO: 20586 - protein, 497 aa, Artificial Sequence
  Synthetic Polypeptide
MALPVTALLLPLALLLHAARPDIQMTQSPSSLSASVGDRVTITCKASQDVGTAVDWYQQKPGKAPKLLIYWASTRHTGVPSRFSGSGSGTDFTLTISSLQPEDFATYYCQQYNSYPLTFGQGTKVEIKRGGGGSGGGGSGGGGSEVQLQQSGPELVKPGTSVRISCKTSGYTFTEYTIHWVKQSHGKSLEWIGNINPNNGGTTYNQKFEDKATLTVDKSSSTAYMELRSLTSEDSAVYYCAAGWNFDYWGQGTTLTVSSTREQKLISEEDLAKPTTTPAPRPPTPAPTIASQPLSLRPEACRPAAGGAVHTRGLDFACDIYIWAPLAGTCGVLLLSLVITLYCKRGRKKLLYIFKQPFMRPVQTTQEEDGCSCRFPEEEEGGCELRVKFSRSADAPAYQQGQNQLYNELNLGRREEYDVLDKRRGRDPEMGGKPRRKNPQEGLYNELQKDKMAEAYSEIGMKGERRRGKGHDGLYQGLSTATKDTYDALHMQALPPR

SEQ ID NO: 20587 - protein, 497 aa, Artificial Sequence
  Synthetic Polypeptide
MALPVTALLLPLALLLHAARPEVQLQQSGPELVKPGTSVRISCKTSGYTFTEYTIHWVKQSHGKSLEWIGNINPNNGGTTYNQKFEDKATLTVDKSSSTAYMELRSLTSEDSAVYYCAAGWNFDYWGQGTTLTVSSGGGGSGGGGSGGGGSDIQMTQSPSSLSASVGDRVTITCKASQDVGTAVDWYQQKPGKAPKLLIYWASTRHTGVPSRFSGSGSGTDFTLTISSLQPEDFATYYCQQYNSYPLTFGQGTKVEIKRTREQKLISEEDLAKPTTTPAPRPPTPAPTIASQPLSLRPEACRPAAGGAVHTRGLDFACDIYIWAPLAGTCGVLLLSLVITLYCKRGRKKLLYIFKQPFMRPVQTTQEEDGCSCRFPEEEEGGCELRVKFSRSADAPAYQQGQNQLYNELNLGRREEYDVLDKRRGRDPEMGGKPRRKNPQEGLYNELQKDKMAEAYSEIGMKGERRRGKGHDGLYQGLSTATKDTYDALHMQALPPR

SEQ ID NO: 20588 - protein, 910 aa, Artificial Sequence
  Synthetic Polypeptide
MALPVTALLLPLALLLHAARPDIQMTQSPSSLSASVGDRVTITCKASQDVGTAVDWYQQKPGKAPKLLIYWASTRHTGVPSRFSGSGSGTDFTLTISSLQPEDFATYYCQQYNSYPLTFGQGTKVEIKRGGGGSGGGGSGGGGSEVQLQQSGPELVKPGTSVRISCKTSGYTFTEYTIHWVKQSHGKSLEWIGNINPNNGGTTYNQKFEDKATLTVDKSSSTAYMELRSLTSEDSAVYYCAAGWNFDYWGQGTTLTVSSTREQKLISEEDLAKPTTTPAPRPPTPAPTIASQPLSLRPEACRPAAGGAVHTRGLDFACDIYIWAPLAGTCGVLLLSLVITLYCGRARVKFSRSADAPAYQQGQNQLYNELNLGRREEYDVLDKRRGRDPEMGGKPRRKNPQEGLYNELQKDKMAEAYSEIGMKGERRRGKGHDGLYQGLSTATKDTYDALHMQALPPRSRGSGATNFSLLKQAGDVEENPGPGIHMATYEVLCEVARKLGTDDREVVLFLLNVFIPQPTLAQLIGALRALKEEGRLTFPLLAECLFRAGRRDLLRDLLHLDPRFLERHLAGTMSYFSPYQLTVLHVDGELCARDIRSLIFLSKDTIGSRSTPQTFLHWVYCMENLDLLGPTDVDALMSMLRSLSRVDLQRQVQTLMGLHLSGPSHSQHYRHTPLETDFYDYKDDDDKTSGSGEGRGSLLTCGDVEENPGPHMTEYKPTVRLATRDDVPRAVRTLAAAFADYPATRHTVDPDRHIERVTELQELFLTRVGLDIGKVWVADDGAAVAVWTTPESVEAGAVFAEIGPRMAELSGSRLAAQQQMEGLLAPHRPKEPAWFLATVGVSPDHQGKGLGSAVVLPGVEAAERAGVPAFLETSAPRNLPFYERLGFTVTADVEVPEGPRTWCMTRKPGA

SEQ ID NO: 20589 - protein, 850 aa, Artificial Sequence
  Synthetic Polypeptide
MALPVTALLLPLALLLHAARPDIQMTQSPSSLSASVGDRVTITCKASQDVGTAVDWYQQKPGKAPKLLIYWASTRHTGVPSRFSGSGSGTDFTLTISSLQPEDFATYYCQQYNSYPLTFGQGTKVEIKRLEIQNPDPAVYQLRDSKSSDKSVCLFTDFDSQTNVSQSKDSDVYITDKCVLDMRSMDFKSNSAVAWSNKSDFACANAFNNSIIPEDTFFPSSDVPCDVKLVEKSFETDTNLNFQNLSVIGFRILLLKVAGFNLLMTLRLWSSRAKRSGSGVKQTLNFDLLKLAGDVESNPGPTSMDWIWRILFLVGAATGAHSFEEVQLQQSGPELVKPGTSVRISCKTSGYTFTEYTIHWVKQSHGKSLEWIGNINPNNGGTTYNQKFEDKATLTVDKSSSTAYMELRSLTSEDSAVYYCAAGWNFDYWGQGTTLTVSSTREDLKNVFPPEVAVFEPSKAEIAHTQKATLVCLATGFYPDHVELSWWVNGKEVHSGVCTDPQPLKEQPALNDSRYCLSSRLRVSATFWQNPRNHFRCQVQFYGLSENDEWTQDRAKPVTQIVSAEAWGRADCGITSASYHQGVLSATILYEILLGKATLYAVLVSALVLMAMVKRKDSRGRAKRSGSGATNFSLLKQAGDVEENPGPSRGHMTEYKPTVRLATRDDVPRAVRTLAAAFADYPATRHTVDPDRHIERVTELQELFLTRVGLDIGKVWVADDGAAVAVWTTPESVEAGAVFAEIGPRMAELSGSRLAAQQQMEGLLAPHRPKEPAWFLATVGVSPDHQGKGLGSAVVLPGVEAAERAGVPAFLETSAPRNLPFYERLGFTVTADVEVPEGPRTWCMTRKPGA

SEQ ID NO: 20590 - protein, 849 aa, Artificial Sequence
  Synthetic Polypeptide
MALPVTALLLPLALLLHAARPDIQMTQSPSSLSASVGDRVTITCKASQDVGTAVDWYQQKPGKAPKLLIYWASTRHTGVPSRFSGSGSGTDFTLTISSLQPEDFATYYCQQYNSYPLTFGQGTKVEIKRLEDLKNVFPPEVAVFEPSKAEIAHTQKATLVCLATGFYPDHVELSWWVNGKEVHSGVCTDPQPLKEQPALNDSRYCLSSRLRVSATFWQNPRNHFRCQVQFYGLSENDEWTQDRAKPVTQIVSAEAWGRADCGITSASYHQGVLSATILYEILLGKATLYAVLVSALVLMAMVKRKDSRGRAKRSGSGATNFSLLKQAGDVEENPGPTSMDWIWRILFLVGAATGAHSFEEVQLQQSGPELVKPGTSVRISCKTSGYTFTEYTIHWVKQSHGKSLEWIGNINPNNGGTTYNQKFEDKATLTVDKSSSTAYMELRSLTSEDSAVYYCAAGWNFDYWGQGTTLTVSSTRIQNPDPAVYQLRDSKSSDKSVCLFTDFDSQTNVSQSKDSDVYITDKCVLDMRSMDFKSNSAVAWSNKSDFACANAFNNSIIPEDTFFPSSDVPCDVKLVEKSFETDTNLNFQNLSVIGFRILLLKVAGFNLLMTLRLWSSRAKRSGSGVKQTLNFDLLKLAGDVESNPGPSRGHMTEYKPTVRLATRDDVPRAVRTLAAAFADYPATRHTVDPDRHIERVTELQELFLTRVGLDIGKVWVADDGAAVAVWTTPESVEAGAVFAEIGPRMAELSGSRLAAQQQMEGLLAPHRPKEPAWFLATVGVSPDHQGKGLGSAVVLPGVEAAERAGVPAFLETSAPRNLPFYERLGFTVTADVEVPEGPRTWCMTRKPGA

SEQ ID NO: 20591 - protein, 616 aa, Artificial Sequence
  Synthetic Polypeptide
MALPVTALLLPLALLLHAARPDIQMTQSPSSLSASVGDRVTITCKASQDVGTAVDWYQQKPGKAPKLLIYWASTRHTGVPSRFSGSGSGTDFTLTISSLQPEDFATYYCQQYNSYPLTFGQGTKVEIKRLEDLKNVFPPEVAVFEPSEAEISHTQKATLVCLATGFYPDHVELSWWVNGKEVHSGVCTDPQPLKEQPALNDSRYCLSSRLRVSATFWQNPRNHFRCQVQFYGLSENDEWTQDRAKPVTQIVSAEAWGRADCGFTSESYQQGVLSATILYEILLGKATLYAVLVSALVLMAMVKRKDSRGRAKRSGSGATNFSLLKQAGDVEENPGPTSMDWIWRILFLVGAATGAHSFEEVQLQQSGPELVKPGTSVRISCKTSGYTFTEYTIHWVKQSHGKSLEWIGNINPNNGGTTYNQKFEDKATLTVDKSSSTAYMELRSLTSEDSAVYYCAAGWNFDYWGQGTTLTVSSTRIQNPDPAVYQLRDSKSSDKSVCLFTDFDSQTNVSQSKDSDVYITDKCVLDMRSMDFKSNSAVAWSNKSDFACANAFNNSIIPEDTFFPSPESSCDVKLVEKSFETDTNLNFQNLSVIGFRILLLKVAGFNLLMTLRLWSS

SEQ ID NO: 20592 - protein, 841 aa, Artificial Sequence
  Synthetic Polypeptide
MALPVTALLLPLALLLHAARPDIQMTQSPSSLSASVGDRVTITCKASQDVGTAVDWYQQKPGKAPKLLIYWASTRHTGVPSRFSGSGSGTDFTLTISSLQPEDFATYYCQQYNSYPLTFGQGTKVEIKRLEDLKNVFPPEVAVFEPSEAEISHTQKATLVCLATGFYPDHVELSWWVNGKEVHSGVCTDPQPLKEQPALNDSRYCLSSRLRVSATFWQNPRNHFRCQVQFYGLSENDEWTQDRAKPVTQIVSAEAWGRADCGFTSESYQQGVLSATILYEILLGKATLYAVLVSALVLMAMVKRKDSRGRAKRSGSGATNFSLLKQAGDVEENPGPTSMDWIWRILFLVGAATGAHSFEEVQLQQSGPELVKPGTSVRISCKTSGYTFTEYTIHWVKQSHGKSLEWIGNINPNNGGTTYNQKFEDKATLTVDKSSSTAYMELRSLTSEDSAVYYCAAGWNFDYWGQGTTLTVSSTRIQNPDPAVYQLRDSKSSDKSVCLFTDFDSQTNVSQSKDSDVYITDKCVLDMRSMDFKSNSAVAWSNKSDFACANAFNNSIIPEDTFFPSPESSCDVKLVEKSFETDTNLNFQNLSVIGFRILLLKVAGFNLLMTLRLWSSRAKRSGSGVKQTLNFDLLKLAGDVESNPGPSRGGIHTMATYEVLCEVARKLGTDDREVVLFLLNVFIPQPTLAQLIGALRALKEEGRLTFPLLAECLFRAGRRDLLRDLLHLDPRFLERHLAGTMSYFSPYQLTVLHVDGELCARDIRSLIFLSKDTIGSRSTPQTFLHWVYCMENLDLLGPTDVDALMSMLRSLSRVDLQRQVQTLMGLHLSGPSHSQHYRHTP

SEQ ID NO: 20593 - protein, 620 aa, Artificial Sequence
  Synthetic Polypeptide
MALPVTALLLPLALLLHAARPDIQMTQSPSSLSASVGDRVTITCKASQDVGTAVDWYQQKPGKAPKLLIYWASTRHTGVPSRFSGSGSGTDFTLTISSLQPEDFATYYCQQYNSYPLTFGQGTKVEIKRLEIQNPDPAVYQLRDSKSSDKSVCLFTDFDSQTNVSQSKDSDVYITDKCVLDMRSMDFKSNSAVAWSNKSDFACANAFNNSIIPEDTFFPSPESSCDVKLVEKSFETDTNLNFQNLSVIGFRILLLKVAGFNLLMTLRLWSSRAKRSGSGVKQTLNFDLLKLAGDVESNPGPTSMDWIWRILFLVGAATGAHSFEEVQLQQSGPELVKPGTSVRISCKTSGYTFTEYTIHWVKQSHGKSLEWIGNINPNNGGTTYNQKFEDKATLTVDKSSSTAYMELRSLTSEDSAVYYCAAGWNFDYWGQGTTLTVSSTREDLKNVFPPEVAVFEPSEAEISHTQKATLVCLATGFYPDHVELSWWVNGKEVHSGVCTDPQPLKEQPALNDSRYCLSSRLRVSATFWQNPRNHFRCQVQFYGLSENDEWTQDRAKPVTQIVSAEAWGRADCGFTSESYQQGVLSATILYEILLGKATLYAVLVSALVLMAMVKRKDSRG

SEQ ID NO: 20594 - protein, 842 aa, Artificial Sequence
  Synthetic Polypeptide
MALPVTALLLPLALLLHAARPDIQMTQSPSSLSASVGDRVTITCKASQDVGTAVDWYQQKPGKAPKLLIYWASTRHTGVPSRFSGSGSGTDFTLTISSLQPEDFATYYCQQYNSYPLTFGQGTKVEIKRLEIQNPDPAVYQLRDSKSSDKSVCLFTDFDSQTNVSQSKDSDVYITDKCVLDMRSMDFKSNSAVAWSNKSDFACANAFNNSIIPEDTFFPSPESSCDVKLVEKSFETDTNLNFQNLSVIGFRILLLKVAGFNLLMTLRLWSSRAKRSGSGVKQTLNFDLLKLAGDVESNPGPTSMDWIWRILFLVGAATGAHSFEEVQLQQSGPELVKPGTSVRISCKTSGYTFTEYTIHWVKQSHGKSLEWIGNINPNNGGTTYNQKFEDKATLTVDKSSSTAYMELRSLTSEDSAVYYCAAGWNFDYWGQGTTLTVSSTREDLKNVFPPEVAVFEPSEAEISHTQKATLVCLATGFYPDHVELSWWVNGKEVHSGVCTDPQPLKEQPALNDSRYCLSSRLRVSATFWQNPRNHFRCQVQFYGLSENDEWTQDRAKPVTQIVSAEAWGRADCGFTSESYQQGVLSATILYEILLGKATLYAVLVSALVLMAMVKRKDSRGRAKRSGSGATNFSLLKQAGDVEENPGPSRGGIHTMATYEVLCEVARKLGTDDREVVLFLLNVFIPQPTLAQLIGALRALKEEGRLTFPLLAECLFRAGRRDLLRDLLHLDPRFLERHLAGTMSYFSPYQLTVLHVDGELCARDIRSLIFLSKDTIGSRSTPQTFLHWVYCMENLDLLGPTDVDALMSMLRSLSRVDLQRQVQTLMGLHLSGPSHSQHYRHTP

SEQ ID NO: 20595 - protein, 894 aa, Artificial Sequence
  Synthetic Polypeptide
MALPVTALLLPLALLLHAARPLEGKPIPNPLLGLDSTGSGEDLKNVFPPEVAVFEPSKAEIAHTQKATLVCLATGFYPDHVELSWWVNGKEVHSGVCTDPQPLKEQPALNDSRYCLSSRLRVSATFWQNPRNHFRCQVQFYGLSENDEWTQDRAKPVTQIVSAEAWGRADCGITSASYHQGVLSATILYEILLGKATLYAVLVSALVLMAMVKRKDSRGRAKRSGSGATNFSLLKQAGDVEENPGPTSMALPVTALLLPLALLLHAARPDIQMTQSPSSLSASVGDRVTITCKASQDVGTAVDWYQQKPGKAPKLLIYWASTRHTGVPSRFSGSGSGTDFTLTISSLQPEDFATYYCQQYNSYPLTFGQGTKVEIKRGGGGSGGGGSGGGGSEVQLQQSGPELVKPGTSVRISCKTSGYTFTEYTIHWVKQSHGKSLEWIGNINPNNGGTTYNQKFEDKATLTVDKSSSTAYMELRSLTSEDSAVYYCAAGWNFDYWGQGTTLTVSSTREQKLISEEDGSGIQNPDPAVYQLRDSKSSDKSVCLFTDFDSQTNVSQSKDSDVYITDKCVLDMRSMDFKSNSAVAWSNKSDFACANAFNNSIIPEDTFFPSSDVPCDVKLVEKSFETDTNLNFQNLSVIGFRILLLKVAGFNLLMTLRLWSSRAKRSGSGVKQTLNFDLLKLAGDVESNPGPSRGHMTEYKPTVRLATRDDVPRAVRTLAAAFADYPATRHTVDPDRHIERVTELQELFLTRVGLDIGKVWVADDGAAVAVWTTPESVEAGAVFAEIGPRMAELSGSRLAAQQQMEGLLAPHRPKEPAWFLATVGVSPDHQGKGLGSAVVLPGVEAAERAGVPAFLETSAPRNLPFYERLGFTVTADVEVPEGPRTWCMTRKPGA

SEQ ID NO: 20596 - protein, 895 aa, Artificial Sequence
  Synthetic Polypeptide
MALPVTALLLPLALLLHAARPLEQKLISEEDLGSGDRPDPAVYQLRDSKSSDKSVCLFTDFDSQTNVSQSKDSDVYITDKCVLDMRSMDFKSNSAVAWSNKSDFACANAFNNSIIPEDTFFPSPESSCDVKLVEKSFETDTNLNFQNLSVIGFRILLLKVAGFNLLMTLRLWSSSSRAKRSGSGVKQTLNFDLLKLAGDVESNPGPTSMALPVTALLLPLALLLHAARPDIQMTQSPSSLSASVGDRVTITCKASQDVGTAVDWYQQKPGKAPKLLIYWASTRHTGVPSRFSGSGSGTDFTLTISSLQPEDFATYYCQQYNSYPLTFGQGTKVEIKRGGGGSGGGGSGGGGSEVQLQQSGPELVKPGTSVRISCKTSGYTFTEYTIHWVKQSHGKSLEWIGNINPNNGGTTYNQKFEDKATLTVDKSSSTAYMELRSLTSEDSAVYYCAAGWNFDYWGQGTTLTVSSTRGKPIPNPLLGLDSTGSGEDLKNVFPPEVAVFEPSEAEISHTQKATLVCLATGFYPDHVELSWWVNGKEVHSGVCTDPQPLKEQPALNDSRYCLSSRLRVSATFWQNPRNHFRCQVQFYGLSENDEWTQDRAKPVTQIVSAEAWGRADCGFTSESYQQGVLSATILYEILLGKATLYAVLVSALVLMAMVKRKDSRGRAKRSGSGATNFSLLKQAGDVEENPGPSRGHMTEYKPTVRLATRDDVPRAVRTLAAAFADYPATRHTVDPDRHIERVTELQELFLTRVGLDIGKVWVADDGAAVAVWTTPESVEAGAVFAEIGPRMAELSGSRLAAQQQMEGLLAPHRPKEPAWFLATVGVSPDHQGKGLGSAVVLPGVEAAERAGVPAFLETSAPRNLPFYERLGFTVTADVEVPEGPRTWCMTRKPGA

SEQ ID NO: 20597 - protein, 849 aa, Artificial Sequence
  Synthetic Polypeptide
MALPVTALLLPLALLLHAARPDIQMTQSPSSLSASVGDRVTITCKASQDVGTAVDWYQQKPGKAPKLLIYWASTRHTGVPSRFSGSGSGTDFTLTISSLQPEDFATYYCQQYNSYPLTFGQGTKVEIKRLEDLKNVFPPEVAVFEPSEAEISHTQKATLVCLATGFYPDHVELSWWVNGKEVHSGVSTDPQPLKEQPALNDSRYCLSSRLRVSATFWQNPRNHFRCQVQFYGLSENDEWTQDRAKPVTQIVSAEAWGRADCGFTSESYQQGVLSATILYEILLGKATLYAVLVSALVLMAMVKRKDSRGRAKRSGSGATNFSLLKQAGDVEENPGPTSMDWIWRILFLVGAATGAHSFEEVQLQQSGPELVKPGTSVRISCKTSGYTFTEYTIHWVKQSHGKSLEWIGNINPNNGGTTYNQKFEDKATLTVDKSSSTAYMELRSLTSEDSAVYYCAAGWNFDYWGQGTTLTVSSTRIQNPDPAVYQLRDSKSSDKSVCLFTDFDSQTNVSQSKDSDVYITDKTVLDMRSMDFKSNSAVAWSNKSDFACANAFNNSIIPEDTFFPSPESSCDVKLVEKSFETDTNLNFQNLSVIGFRILLLKVAGFNLLMTLRLWSSRAKRSGSGVKQTLNFDLLKLAGDVESNPGPSRGHMTEYKPTVRLATRDDVPRAVRTLAAAFADYPATRHTVDPDRHIERVTELQELFLTRVGLDIGKVWVADDGAAVAVWTTPESVEAGAVFAEIGPRMAELSGSRLAAQQQMEGLLAPHRPKEPAWFLATVGVSPDHQGKGLGSAVVLPGVEAAERAGVPAFLETSAPRNLPFYERLGFTVTADVEVPEGPRTWCMTRKPGA

SEQ ID NO: 20598 - protein, 931 aa, Artificial Sequence
  Synthetic Polypeptide
MALPVTALLLPLALLLHAARPDIQMTQSPSSLSASVGDRVTITCKASQDVGTAVDWYQQKPGKAPKLLIYWASTRHTGVPSRFSGSGSGTDFTLTISSLQPEDFATYYCQQYNSYPLTFGQGTKVEIKRLEDLKNVFPPEVAVFEPSEAEISHTQKATLVCLATGFYPDHVELSWWVNGKEVHSGVSTDPQPLKEQPALNDSRYCLSSRLRVSATFWQNPRNHFRCQVQFYGLSENDEWTQDRAKPVTQIVSAEAWGRADCGFTSESYQQGVLSATILYEILLGKATLYAVLVSALVLMAMVKRKDSRGRAKRSGSGATNFSLLKQAGDVEENPGPTSMDWIWRILFLVGAATGAHSFEEVQLQQSGPELVKPGTSVRISCKTSGYTFTEYTIHWVKQSHGKSLEWIGNINPNNGGTTYNQKFEDKATLTVDKSSSTAYMELRSLTSEDSAVYYCAAGWNFDYWGQGTTLTVSSTREQKLISEEDGSGTPFPSLAPPIMLLVDGKQQMVVVCLVLDVAPPGLDSPIWFSAGNGSALDAFTYGPSPATDGTWTNLAHLSLPSEELASWEPLVCHTGPGAEGHSRSTQPMHLSGEASTARTCPQEPLRGTPGGALWLGVLRLLLFKLLLFDLLLTCSCLCDPAGPLPSPATTTRLRALGSHRLHPATETGGREATSSPRPQPRDRRWGDTPPGRKPGSPVRAKRSGSGVKQTLNFDLLKLAGDVESNPGPSRGHMTEYKPTVRLATRDDVPRAVRTLAAAFADYPATRHTVDPDRHIERVTELQELFLTRVGLDIGKVWVADDGAAVAVWTTPESVEAGAVFAEIGPRMAELSGSRLAAQQQMEGLLAPHRPKEPAWFLATVGVSPDHQGKGLGSAVVLPGVEAAERAGVPAFLETSAPRNLPFYERLGFTVTADVEVPEGPRTWCMTRKPGA

SEQ ID NO: 20599 - protein, 949 aa, Artificial Sequence
  Synthetic Polypeptide
MALPVTALLLPLALLLHAARPLEDLKNVFPPEVAVFEPSEAEISHTQKATLVCLATGFYPDHVELSWWVNGKEVHSGVSTDPQPLKEQPALNDSRYCLSSRLRVSATFWQNPRNHFRCQVQFYGLSENDEWTQDRAKPVTQIVSAEAWGRADCGFTSESYQQGVLSATILYEILLGKATLYAVLVSALVLMAMVKRKDSRGRAKRSGSGATNFSLLKQAGDVEENPGPTSMALPVTALLLPLALLLHAARPDIQMTQSPSSLSASVGDRVTITCKASQDVGTAVDWYQQKPGKAPKLLIYWASTRHTGVPSRFSGSGSGTDFTLTISSLQPEDFATYYCQQYNSYPLTFGQGTKVEIKRGGGGSGGGGSGGGGSEVQLQQSGPELVKPGTSVRISCKTSGYTFTEYTIHWVKQSHGKSLEWIGNINPNNGGTTYNQKFEDKATLTVDKSSSTAYMELRSLTSEDSAVYYCAAGWNFDYWGQGTTLTVSSTREQKLISEEDLGSGTPFPSLAPPIMLLVDGKQQMVVVCLVLDVAPPGLDSPIWFSAGNGSALDAFTYGPSPATDGTWTNLAHLSLPSEELASWEPLVCHTGPGAEGHSRSTQPMHLSGEASTARTCPQEPLRGTPGGALWLGVLRLLLFKLLLFDLLLTCSCLCDPAGPLPSPATTTRLRALGSHRLHPATETGGREATSSPRPQPRDRRWGDTPPGRKPGSPVRAKRSGSGVKQTLNFDLLKLAGDVESNPGPSRSRGHMTEYKPTVRLATRDDVPRAVRTLAAAFADYPATRHTVDPDRHIERVTELQELFLTRVGLDIGKVWVADDGAAVAVWTTPESVEAGAVFAEIGPRMAELSGSRLAAQQQMEGLLAPHRPKEPAWFLATVGVSPDHQGKGLGSAVVLPGVEAAERAGVPAFLETSAPRNLPFYERLGFTVTADVEVPEGPRTWCMTRKPGA

SEQ ID NO: 20600 - protein, 886 aa, Artificial Sequence
  Synthetic Polypeptide
MALPVTALLLPLALLLHAARPDIQMTQSPSSLSASVGDRVTITCKASQDVGTAVDWYQQKPGKAPKLLIYWASTRHTGVPSRFSGSGSGTDFTLTISSLQPEDFATYYCQQYNSYPLTFGQGTKVEIKRLEGKPIPNPLLGLDSTGSGDKQLDADVSPKPTIFLPSIAETKLQKAGTYLCLLEKFFPDVIKIHWQEKKSNTILGSQEGNTMKTNDTYMKFSWLTVPEKSLDKEHRCIVRHENNKNGVDQEIIFPPIKTDVITMDPKDNCSKDANDTLLLQLTNTSAYYMYLLLLLKSVVYFAIITCCLLRRTAFCCNGEKSRAKRSGSGATNFSLLKQAGDVEENPGPTSMDWIWRILFLVGAATGAHSFEEVQLQQSGPELVKPGTSVRISCKTSGYTFTEYTIHWVKQSHGKSLEWIGNINPNNGGTTYNQKFEDKATLTVDKSSSTAYMELRSLTSEDSAVYYCAAGWNFDYWGQGTTLTVSSTREQKLISEEDGSGSQPHTKPSVFVMKNGTNVACLVKEFYPKDIRINLVSSKKITEFDPAIVISPSGKYNAVKLGKYEDSNSVTCSVQHDNKTVHSTDFEVKTDSTDHVKPKETENTKQPSKSCHKPKAIVHTEKVNMMSLTVLGLRMLFAKTVAVNFLLTAKLFFLRAKRSGSGVKQTLNFDLLKLAGDVESNPGPSRGHMTEYKPTVRLATRDDVPRAVRTLAAAFADYPATRHTVDPDRHIERVTELQELFLTRVGLDIGKVWVADDGAAVAVWTTPESVEAGAVFAEIGPRMAELSGSRLAAQQQMEGLLAPHRPKEPAWFLATVGVSPDHQGKGLGSAVVLPGVEAAERAGVPAFLETSAPRNLPFYERLGFTVTADVEVPEGPRTWCMTRKPGA

SEQ ID NO: 20601 - protein, 624 aa, Artificial Sequence
  Synthetic Polypeptide
MALPVTALLLPLALLLHAARPDIQMTQSPSSLSASVGDRVTITCKASQDVGTAVDWYQQKPGKAPKLLIYWASTRHTGVPSRFSGSGSGTDFTLTISSLQPEDFATYYCQQYNSYPLTFGQGTKVEIKRLESQPHTKPSVFVMKNGTNVACLVKEFYPKDIRINLVSSKKITEFDPAIVISPSGKYNAVKLGKYEDSNSVTCSVQHDNKTVHSTDFEVKTDSTDHVKPKETENTKQPSKSCHKPKAIVHTEKVNMMSLTVLGLRMLFAKTVAVNFLLTAKLFFLRAKRSGSGATNFSLLKQAGDVEENPGPTSMDWIWRILFLVGAATGAHSFEEVQLQQSGPELVKPGTSVRISCKTSGYTFTEYTIHWVKQSHGKSLEWIGNINPNNGGTTYNQKFEDKATLTVDKSSSTAYMELRSLTSEDSAVYYCAAGWNFDYWGQGTTLTVSSTRDKQLDADVSPKPTIFLPSIAETKLQKAGTYLCLLEKFFPDVIKIHWQEKKSNTILGSQEGNTMKTNDTYMKFSWLTVPEKSLDKEHRCIVRHENNKNGVDQEIIFPPIKTDVITMDPKDNCSKDANDTLLLQLTNTSAYYMYLLLLLKSVVYFAIITCCLLRRTAFCCNGEKS

SEQ ID NO: 20602 - protein, 901 aa, Artificial Sequence
  Synthetic Polypeptide
MALPVTALLLPLALLLHAARPLEGKPIPNPLLGLDSTGSGDKQLDADVSPKPTIFLPSIAETKLQKAGTYLCLLEKFFPDVIKIHWQEKKSNTILGSQEGNTMKTNDTYMKFSWLTVPEKSLDKEHRCIVRHENNKNGVDQEIIFPPIKTDVITMDPKDNCSKDANDTLLLQLTNTSAYYMYLLLLLKSVVYFAIITCCLLRRTAFCCNGEKSRAKRSGSGATNFSLLKQAGDVEENPGPTSMALPVTALLLPLALLLHAARPDIQMTQSPSSLSASVGDRVTITCKASQDVGTAVDWYQQKPGKAPKLLIYWASTRHTGVPSRFSGSGSGTDFTLTISSLQPEDFATYYCQQYNSYPLTFGQGTKVEIKRGGGGSGGGGSGGGGSEVQLQQSGPELVKPGTSVRISCKTSGYTFTEYTIHWVKQSHGKSLEWIGNINPNNGGTTYNQKFEDKATLTVDKSSSTAYMELRSLTSEDSAVYYCAAGWNFDYWGQGTTLTVSSTREQKLISEEDGSGSQPHTKPSVFVMKNGTNVACLVKEFYPKDIRINLVSSKKITEFDPAIVISPSGKYNAVKLGKYEDSNSVTCSVQHDNKTVHSTDFEVKTDSTDHVKPKETENTKQPSKSCHKPKAIVHTEKVNMMSLTVLGLRMLFAKTVAVNFLLTAKLFFLRAKRSGSGVKQTLNFDLLKLAGDVESNPGPSRGHMTEYKPTVRLATRDDVPRAVRTLAAAFADYPATRHTVDPDRHIERVTELQELFLTRVGLDIGKVWVADDGAAVAVWTTPESVEAGAVFAEIGPRMAELSGSRLAAQQQMEGLLAPHRPKEPAWFLATVGVSPDHQGKGLGSAVVLPGVEAAERAGVPAFLETSAPRNLPFYERLGFTVTADVEVPEGPRTWCMTRKPGA

SEQ ID NO: 20603 - protein, 1026 aa, Artificial Sequence
  Synthetic Polypeptide
MALPVTALLLPLALLLHAARPDIQMTQSPSSLSASVGDRVTITCKASQDVGTAVDWYQQKPGKAPKLLIYWASTRHTGVPSRFSGSGSGTDFTLTISSLQPEDFATYYCQQYNSYPLTFGQGTKVEIKRGQPKANPTVTLFPPSSEELQANKATLVCLISDFYPGAVTVAWKADGSPVKAGVETTKPSKQSNNKYAASSYLSLTPEQWKSHRSYSCQVTHEGSTVEKTVAPTECSGSQSFGLLDPKLCYLLDGILFIYGVILTALFLRVKFSRSADAPAYQQGQNQLYNELNLGRREEYDVLDKRRGRDPEMGGKPQRRKNPQEGLYNELQKDKMAEAYSEIGMKGERRRGKGHDGLYQGLSTATKDTYDALHMQALPPRRAKRSGSGATNFSLLKQAGDVEENPGPTSMDWIWRILFLVGAATGAHSFEEVQLQQSGPELVKPGTSVRISCKTSGYTFTEYTIHWVKQSHGKSLEWIGNINPNNGGTTYNQKFEDKATLTVDKSSSTAYMELRSLTSEDSAVYYCAAGWNFDYWGQGTTLTVSSASTKGPSVFPLAPSSKSTSGGTAALGCLVKDYFPEPVTVSWNSGALTSGVHTFPAVLQSSGLYSLSSVVTVPSSSLGTQTYICNVNHKPSNTKVDKRVEPKSCGTQSFGLLDPKLCYLLDGILFIYGVILTALFLRVKFSRSADAPAYQQGQNQLYNELNLGRREEYDVLDKRRGRDPEMGGKPQRRKNPQEGLYNELQKDKMAEAYSEIGMKGERRRGKGHDGLYQGLSTATKDTYDALHMQALPPRRAKRSGSGVKQTLNFDLLKLAGDVESNPGPSRGHMTEYKPTVRLATRDDVPRAVRTLAAAFADYPATRHTVDPDRHIERVTELQELFLTRVGLDIGKVWVADDGAAVAVWTTPESVEAGAVFAEIGPRMAELSGSRLAAQQQMEGLLAPHRPKEPAWFLATVGVSPDHQGKGLGSAVVLPGVEAAERAGVPAFLETSAPRNLPFYERLGFTVTADVEVPEGPRTWCMTRKPGA

SEQ ID NO: 20604 - protein, 812 aa, Artificial Sequence
  Synthetic Polypeptide
MALPVTALLLPLALLLHAARPDIQMTQSPSSLSASVGDRVTITCKASQDVGTAVDWYQQKPGKAPKLLIYWASTRHTGVPSRFSGSGSGTDFTLTISSLQPEDFATYYCQQYNSYPLTFGQGTKVEIKRLEDLKNVFPPEVAVFEPSEAEISHTQKATLVCLATGFYPDHVELSWWVNGKEVHSGVSTDPQPLKEQPALNDSRYCLSSRLRVSATFWQNPRNHFRCQVQFYGLSENDEWTQDRAKPVTQIVSAEAWGRADCGSQSFGLLDPKLCYLLDGILFIYGVILTALFLRVKFSRSADAPAYQQGQNQLYNELNLGRREEYDVLDKRRGRDPEMGGKPQRRKNPQEGLYNELQKDKMAEAYSEIGMKGERRRGKGHDGLYQGLSTATKDTYDALHMQALPPRRAKRSGSGATNFSLLKQAGDVEENPGPTSMDWIWRILFLVGAATGAHSFEEVQLQQSGPELVKPGTSVRISCKTSGYTFTEYTIHWVKQSHGKSLEWIGNINPNNGGTTYNQKFEDKATLTVDKSSSTAYMELRSLTSEDSAVYYCAAGWNFDYWGQGTTLTVSSTRIQNPDPAVYQLRDSKSSDKSVCLFTDFDSQTNVSQSKDSDVYITDKTVLDMRSMDFKSNSAVAWSNKSDFACANAFNNSIIPEDTFFPSPESSCGTQSFGLLDPKLCYLLDGILFIYGVILTALFLRVKFSRSADAPAYQQGQNQLYNELNLGRREEYDVLDKRRGRDPEMGGKPQRRKNPQEGLYNELQKDKMAEAYSEIGMKGERRRGKGHDGLYQGLSTATKDTYDALHMQALPPR

SEQ ID NO: 20605 - protein, 812 aa, Artificial Sequence
  Synthetic Polypeptide
MALPVTALLLPLALLLHAARPDIQMTQSPSSLSASVGDRVTITCKASQDVGTAVDWYQQKPGKAPKLLIYWASTRHTGVPSRFSGSGSGTDFTLTISSLQPEDFATYYCQQYNSYPLTFGQGTKVEIKRLEDLKNVFPPEVAVFEPSKAEIAHTQKATLVCLATGFYPDHVELSWWVNGKEVHSGVCTDPQPLKEQPALNDSRYCLSSRLRVSATFWQNPRNHFRCQVQFYGLSENDEWTQDRAKPVTQIVSAEAWGRADCGSQSFGLLDPKLCYLLDGILFIYGVILTALFLRVKFSRSADAPAYQQGQNQLYNELNLGRREEYDVLDKRRGRDPEMGGKPQRRKNPQEGLYNELQKDKMAEAYSEIGMKGERRRGKGHDGLYQGLSTATKDTYDALHMQALPPRRAKRSGSGATNFSLLKQAGDVEENPGPTSMDWIWRILFLVGAATGAHSFEEVQLQQSGPELVKPGTSVRISCKTSGYTFTEYTIHWVKQSHGKSLEWIGNINPNNGGTTYNQKFEDKATLTVDKSSSTAYMELRSLTSEDSAVYYCAAGWNFDYWGQGTTLTVSSTRIQNPDPAVYQLRDSKSSDKSVCLFTDFDSQTNVSQSKDSDVYITDKCVLDMRSMDFKSNSAVAWSNKSDFACANAFNNSIIPEDTFFPSSDVPCGTQSFGLLDPKLCYLLDGILFIYGVILTALFLRVKFSRSADAPAYQQGQNQLYNELNLGRREEYDVLDKRRGRDPEMGGKPQRRKNPQEGLYNELQKDKMAEAYSEIGMKGERRRGKGHDGLYQGLSTATKDTYDALHMQALPPR

SEQ ID NO: 20606 - protein, 883 aa, Artificial Sequence
  Synthetic Polypeptide
MALPVTALLLPLALLLHAARPDIQMTQSPSSLSASVGDRVTITCKASQDVGTAVDWYQQKPGKAPKLLIYWASTRHTGVPSRFSGSGSGTDFTLTISSLQPEDFATYYCQQYNSYPLTFGQGTKVEIKRLEGKPIPNPLLGLDSTGSGEDLKNVFPPEVAVFEPSEAEISHTQKATLVCLATGFYPDHVELSWWVNGKEVHSGVSTDPQPLKEQPALNDSRYCLSSRLRVSATFWQNPRNHFRCQVQFYGLSENDEWTQDRAKPVTQIVSAEAWGRADCGSQSFGLLDPKLCYLLDGILFIYGVILTALFLRVKFSRSADAPAYQQGQNQLYNELNLGRREEYDVLDKRRGRDPEMGGKPQRRKNPQEGLYNELQKDKMAEAYSEIGMKGERRRGKGHDGLYQGLSTATKDTYDALHMQALPPRRAKRSGSGATNFSLLKQAGDVEENPGPTSMDWIWRILFLVGAATGAHSFEEVQLQQSGPELVKPGTSVRISCKTSGYTFTEYTIHWVKQSHGKSLEWIGNINPNNGGTTYNQKFEDKATLTVDKSSSTAYMELRSLTSEDSAVYYCAAGWNFDYWGQGTTLTVSSTREQKLISEEDGSGIQNPDPAVYQLRDSKSSDKSVCLFTDFDSQTNVSQSKDSDVYITDKTVLDMRSMDFKSNSAVAWSNKSDFACANAFNNSIIPEDTFFPSPESSCGTQSFGLLDPKLCYLLDGILFIYGVILTALFLRSKRSRLLHSDYMNMTPRRPGPTRKHYQPYAPPRDFAAYRSRVKFSRSADAPAYQQGQNQLYNELNLGRREEYDVLDKRRGRDPEMGGKPQRRKNPQEGLYNELQKDKMAEAYSEIGMKGERRRGKGHDGLYQGLSTATKDTYDALHMQALPPR

SEQ ID NO: 20607 - protein, 924 aa, Artificial Sequence
  Synthetic Polypeptide
MALPVTALLLPLALLLHAARPDIQMTQSPSSLSASVGDRVTITCKASQDVGTAVDWYQQKPGKAPKLLIYWASTRHTGVPSRFSGSGSGTDFTLTISSLQPEDFATYYCQQYNSYPLTFGQGTKVEIKRLEGKPIPNPLLGLDSTGSGEDLKNVFPPEVAVFEPSEAEISHTQKATLVCLATGFYPDHVELSWWVNGKEVHSGVSTDPQPLKEQPALNDSRYCLSSRLRVSATFWQNPRNHFRCQVQFYGLSENDEWTQDRAKPVTQIVSAEAWGRADCGSQSFGLLDPKLCYLLDGILFIYGVILTALFLRSKRSRLLHSDYMNMTPRRPGPTRKHYQPYAPPRDFAAYRSRVKFSRSADAPAYQQGQNQLYNELNLGRREEYDVLDKRRGRDPEMGGKPQRRKNPQEGLYNELQKDKMAEAYSEIGMKGERRRGKGHDGLYQGLSTATKDTYDALHMQALPPRRAKRSGSGATNFSLLKQAGDVEENPGPTSMDWIWRILFLVGAATGAHSFEEVQLQQSGPELVKPGTSVRISCKTSGYTFTEYTIHWVKQSHGKSLEWIGNINPNNGGTTYNQKFEDKATLTVDKSSSTAYMELRSLTSEDSAVYYCAAGWNFDYWGQGTTLTVSSTREQKLISEEDGSGIQNPDPAVYQLRDSKSSDKSVCLFTDFDSQTNVSQSKDSDVYITDKTVLDMRSMDFKSNSAVAWSNKSDFACANAFNNSIIPEDTFFPSPESSCGTQSFGLLDPKLCYLLDGILFIYGVILTALFLRSKRSRLLHSDYMNMTPRRPGPTRKHYQPYAPPRDFAAYRSRVKFSRSADAPAYQQGQNQLYNELNLGRREEYDVLDKRRGRDPEMGGKPQRRKNPQEGLYNELQKDKMAEAYSEIGMKGERRRGKGHDGLYQGLSTATKDTYDALHMQALPPR

SEQ ID NO: 20608 - protein, 885 aa, Artificial Sequence
  Synthetic Polypeptide
MALPVTALLLPLALLLHAARPDIQMTQSPSSLSASVGDRVTITCKASQDVGTAVDWYQQKPGKAPKLLIYWASTRHTGVPSRFSGSGSGTDFTLTISSLQPEDFATYYCQQYNSYPLTFGQGTKVEIKRLEGKPIPNPLLGLDSTGSGEDLKNVFPPEVAVFEPSEAEISHTQKATLVCLATGFYPDHVELSWWVNGKEVHSGVSTDPQPLKEQPALNDSRYCLSSRLRVSATFWQNPRNHFRCQVQFYGLSENDEWTQDRAKPVTQIVSAEAWGRADCGSQSFGLLDPKLCYLLDGILFIYGVILTALFLRVKFSRSADAPAYQQGQNQLYNELNLGRREEYDVLDKRRGRDPEMGGKPQRRKNPQEGLYNELQKDKMAEAYSEIGMKGERRRGKGHDGLYQGLSTATKDTYDALHMQALPPRRAKRSGSGATNFSLLKQAGDVEENPGPTSMDWIWRILFLVGAATGAHSFEEVQLQQSGPELVKPGTSVRISCKTSGYTFTEYTIHWVKQSHGKSLEWIGNINPNNGGTTYNQKFEDKATLTVDKSSSTAYMELRSLTSEDSAVYYCAAGWNFDYWGQGTTLTVSSTREQKLISEEDLGSGIQNPDPAVYQLRDSKSSDKSVCLFTDFDSQTNVSQSKDSDVYITDKTVLDMRSMDFKSNSAVAWSNKSDFACANAFNNSIIPEDTFFPSPESSCGTQSFGLLDPKLCYLLDGILFIYGVILTALFLKRGRKKLLYIFKQPFMRPVQTTQEEDGCSCRFPEEEEGGCELRVKFSRSADAPAYQQGQNQLYNELNLGRREEYDVLDKRRGRDPEMGGKPQRRKNPQEGLYNELQKDKMAEAYSEIGMKGERRRGKGHDGLYQGLSTATKDTYDALHMQALPPR

SEQ ID NO: 20609 - protein, 927 aa, Artificial Sequence
  Synthetic Polypeptide
MALPVTALLLPLALLLHAARPDIQMTQSPSSLSASVGDRVTITCKASQDVGTAVDWYQQKPGKAPKLLIYWASTRHTGVPSRFSGSGSGTDFTLTISSLQPEDFATYYCQQYNSYPLTFGQGTKVEIKRLEGKPIPNPLLGLDSTGSGEDLKNVFPPEVAVFEPSEAEISHTQKATLVCLATGFYPDHVELSWWVNGKEVHSGVSTDPQPLKEQPALNDSRYCLSSRLRVSATFWQNPRNHFRCQVQFYGLSENDEWTQDRAKPVTQIVSAEAWGRADCGSQSFGLLDPKLCYLLDGILFIYGVILTALFLKRGRKKLLYIFKQPFMRPVQTTQEEDGCSCRFPEEEEGGCELRVKFSRSADAPAYQQGQNQLYNELNLGRREEYDVLDKRRGRDPEMGGKPQRRKNPQEGLYNELQKDKMAEAYSEIGMKGERRRGKGHDGLYQGLSTATKDTYDALHMQALPPRRAKRSGSGATNFSLLKQAGDVEENPGPTSMDWIWRILFLVGAATGAHSFEEVQLQQSGPELVKPGTSVRISCKTSGYTFTEYTIHWVKQSHGKSLEWIGNINPNNGGTTYNQKFEDKATLTVDKSSSTAYMELRSLTSEDSAVYYCAAGWNFDYWGQGTTLTVSSTREQKLISEEDLGSGIQNPDPAVYQLRDSKSSDKSVCLFTDFDSQTNVSQSKDSDVYITDKTVLDMRSMDFKSNSAVAWSNKSDFACANAFNNSIIPEDTFFPSPESSCGTQSFGLLDPKLCYLLDGILFIYGVILTALFLKRGRKKLLYIFKQPFMRPVQTTQEEDGCSCRFPEEEEGGCELRVKFSRSADAPAYQQGQNQLYNELNLGRREEYDVLDKRRGRDPEMGGKPQRRKNPQEGLYNELQKDKMAEAYSEIGMKGERRRGKGHDGLYQGLSTATKDTYDALHMQALPPR

SEQ ID NO: 20610 - protein, 817 aa, Artificial Sequence
  Synthetic Polypeptide
MALPVTALLLPLALLLHAARPDIQMTQSPSSLSASVGDRVTITCKASQDVGTAVDWYQQKPGKAPKLLIYWASTRHTGVPSRFSGSGSGTDFTLTISSLQPEDFATYYCQQYNSYPLTFGQGTKVEIKRLEQSFGLLDPKLCYLLDGILFIYGVILTALFLRVKFSRSADAPAYQQGQNQLYNELNLGRREEYDVLDKRRGRDPEMGGKPQRRKNPQEGLYNELQKDKMAEAYSEIGMKGERRRGKGHDGLYQGLSTATKDTYDALHMQALPPRRAKRSGSGATNFSLLKQAGDVEENPGPTSMDWIWRILFLVGAATGAHSFEEVQLQQSGPELVKPGTSVRISCKTSGYTFTEYTIHWVKQSHGKSLEWIGNINPNNGGTTYNQKFEDKATLTVDKSSSTAYMELRSLTSEDSAVYYCAAGWNFDYWGQGTTLTVSSTRQSFGLLDPKLCYLLDGILFIYGVILTALFLRVKFSRSADAPAYQQGQNQLYNELNLGRREEYDVLDKRRGRDPEMGGKPQRRKNPQEGLYNELQKDKMAEAYSEIGMKGERRRGKGHDGLYQGLSTATKDTYDALHMQALPPRRAKRSGSGVKQTLNFDLLKLAGDVESNPGPSRGHMTEYKPTVRLATRDDVPRAVRTLAAAFADYPATRHTVDPDRHIERVTELQELFLTRVGLDIGKVWVADDGAAVAVWTTPESVEAGAVFAEIGPRMAELSGSRLAAQQQMEGLLAPHRPKEPAWFLATVGVSPDHQGKGLGSAVVLPGVEAAERAGVPAFLETSAPRNLPFYERLGFTVTADVEVPEGPRTWCMTRKPGA

SEQ ID NO: 20611 - protein, 642 aa, Artificial Sequence
  Synthetic Polypeptide
MALPVTALLLPLALLLHAARPDIQMTQSPSSLSASVGDRVTITCKASQDVGTAVDWYQQKPGKAPKLLIYWASTRHTGVPSRFSGSGSGTDFTLTISSLQPEDFATYYCQQYNSYPLTFGQGTKVEIKRLEGQPKANPTVTLFPPSSEELQANKATLVCLISDFYPGAVTVAWKADGSPVKAGVETTKPSKQSNNKYAASSYLSLTPEQWKSHRSYSCQVTHEGSTVEKTVAPTECSPIKTDVITMDPKDNCSKDANDTLLLQLTNTSAYYMYLLLLLKSVVYFAIITCCLLRRTAFCCNGEKSRAKRSGSGATNFSLLKQAGDVEENPGPTSMDWIWRILFLVGAATGAHSFEEVQLQQSGPELVKPGTSVRISCKTSGYTFTEYTIHWVKQSHGKSLEWIGNINPNNGGTTYNQKFEDKATLTVDKSSSTAYMELRSLTSEDSAVYYCAAGWNFDYWGQGTTLTVSSTRASTKGPSVFPLAPSSKSTSGGTAALGCLVKDYFPEPVTVSWNSGALTSGVHTFPAVLQSSGLYSLSSVVTVPSSSLGTQTYICNVNHKPSNTKVDKRVEPKSCEVKTDSTDHVKPKETENTKQPSKSCHKPKAIVHTEKVNMMSLTVLGLRMLFAKTVAVNFLLTAKLFFL

SEQ ID NO: 20612 - protein, 620 aa, Artificial Sequence
  Synthetic Polypeptide
MALPVTALLLPLALLLHAARPDIQMTQSPSSLSASVGDRVTITCKASQDVGTAVDWYQQKPGKAPKLLIYWASTRHTGVPSRFSGSGSGTDFTLTISSLQPEDFATYYCQQYNSYPLTFGQGTKVEIKRLEGQPKANPTVTLFPPSSEELQANKATLVCLISDFYPGAVTVAWKADGSPVKAGVETTKPSKQSNNKYAASSYLSLTPEQWKSHRSYSCQVTHEGSTVEKTVAPTECSGRADCGITSASYHQGVLSATILYEILLGKATLYAVLVSALVLMAMVKRKDSRGRAKRSGSGATNFSLLKQAGDVEENPGPTSMDWIWRILFLVGAATGAHSFEEVQLQQSGPELVKPGTSVRISCKTSGYTFTEYTIHWVKQSHGKSLEWIGNINPNNGGTTYNQKFEDKATLTVDKSSSTAYMELRSLTSEDSAVYYCAAGWNFDYWGQGTTLTVSSTRASTKGPSVFPLAPSSKSTSGGTAALGCLVKDYFPEPVTVSWNSGALTSGVHTFPAVLQSSGLYSLSSVVTVPSSSLGTQTYICNVNHKPSNTKVDKRVEPKSCIPEDTFFPSSDVPCDVKLVEKSFETDTNLNFQNLSVIGFRILLLKVAGFNLLMTLRLWSS

SEQ ID NO: 20613 - protein, 620 aa, Artificial Sequence
  Synthetic Polypeptide
MALPVTALLLPLALLLHAARPDIQMTQSPSSLSASVGDRVTITCKASQDVGTAVDWYQQKPGKAPKLLIYWASTRHTGVPSRFSGSGSGTDFTLTISSLQPEDFATYYCQQYNSYPLTFGQGTKVEIKRLEGQPKANPTVTLFPPSSEELQANKATLVCLISDFYPGAVTVAWKADGSPVKAGVETTKPSKQSNNKYAASSYLSLTPEQWKSHRSYSCQVTHEGSTVEKTVAPTECSGRADCGFTSESYQQGVLSATILYEILLGKATLYAVLVSALVLMAMVKRKDSRGRAKRSGSGATNFSLLKQAGDVEENPGPTSMDWIWRILFLVGAATGAHSFEEVQLQQSGPELVKPGTSVRISCKTSGYTFTEYTIHWVKQSHGKSLEWIGNINPNNGGTTYNQKFEDKATLTVDKSSSTAYMELRSLTSEDSAVYYCAAGWNFDYWGQGTTLTVSSTRASTKGPSVFPLAPSSKSTSGGTAALGCLVKDYFPEPVTVSWNSGALTSGVHTFPAVLQSSGLYSLSSVVTVPSSSLGTQTYICNVNHKPSNTKVDKRVEPKSCIPEDTFFPSPESSCDVKLVEKSFETDTNLNFQNLSVIGFRILLLKVAGFNLLMTLRLWSS

SEQ ID NO: 20614 - protein, 446 aa, Artificial Sequence
  Synthetic Polypeptide
MALPVTALLLPLALLLHAARPDIQMTQSPSSLSASVGDRVTITCKASQDVGTAVDWYQQKPGKAPKLLIYWASTRHTGVPSRFSGSGSGTDFTLTISSLQPEDFATYYCQQYNSYPLTFGQGTKVEIKRGGGGSGGGGSGGGGSEVQLQQSGPELVKPGTSVRISCKTSGYTFTEYTIHWVKQSHGKSLEWIGNINPNNGGTTYNQKFEDKATLTVDKSSSTAYMELRSLTSEDSAVYYCAAGWNFDYWGQGTTLTVSSTRDGNEEMGGITQTPYKVSISGTTVILTCPQYPGSEILWQHNDKNIGGDEDDKNIGSDEDHLSLKEFSELEQSGYYVCYPRGSKPEDANFYLYLRARVCENCMEMDVMSVATIVIVDICITGGLLLLVYYWSKNRKAKAKPVTRGAGAGGRQRGQNKERPPPVPNPDYEPIRKGQRDLYSGLNQRRI

SEQ ID NO: 20615 - protein, 411 aa, Artificial Sequence
  Synthetic Polypeptide
MALPVTALLLPLALLLHAARPDIQMTQSPSSLSASVGDRVTITCKASQDVGTAVDWYQQKPGKAPKLLIYWASTRHTGVPSRFSGSGSGTDFTLTISSLQPEDFATYYCQQYNSYPLTFGQGTKVEIKRGGGGSGGGGSGGGGSEVQLQQSGPELVKPGTSVRISCKTSGYTFTEYTIHWVKQSHGKSLEWIGNINPNNGGTTYNQKFEDKATLTVDKSSSTAYMELRSLTSEDSAVYYCAAGWNFDYWGQGTTLTVSSTRFKIPIEELEDRVFVNCNTSITWVEGTVGTLLSDITRLDLGKRILDPRGIYRCNGTDIYKDKESTVQVHYRMCQSCVELDPATVAGIIVTDVIATLLLALGVFCFAGHETGRLSGAADTQALLRNDQVYQPLRDRDDAQYSHLGGNWARNK

SEQ ID NO: 20616 - protein, 421 aa, Artificial Sequence
  Synthetic Polypeptide
MALPVTALLLPLALLLHAARPDIQMTQSPSSLSASVGDRVTITCKASQDVGTAVDWYQQKPGKAPKLLIYWASTRHTGVPSRFSGSGSGTDFTLTISSLQPEDFATYYCQQYNSYPLTFGQGTKVEIKRGGGGSGGGGSGGGGSEVQLQQSGPELVKPGTSVRISCKTSGYTFTEYTIHWVKQSHGKSLEWIGNINPNNGGTTYNQKFEDKATLTVDKSSSTAYMELRSLTSEDSAVYYCAAGWNFDYWGQGTTLTVSSTRQSIKGNHLVKVYDYQEDGSVLLTCDAEAKNITWFKDGKMIGFLTEDKKKWNLGSNAKDPRGMYQCKGSQNKSKPLQVYYRMCQNCIELNAATISGFLFAEIVSIFVLAVGVYFIAGQDGVRQSRASDKQTLLPNDQLYQPLKDREDDQYSHLQGNQLRRN

SEQ ID NO: 20617 - protein, 404 aa, Artificial Sequence
  Synthetic Polypeptide
MALPVTALLLPLALLLHAARPDIQMTQSPSSLSASVGDRVTITCKASQDVGTAVDWYQQKPGKAPKLLIYWASTRHTGVPSRFSGSGSGTDFTLTISSLQPEDFATYYCQQYNSYPLTFGQGTKVEIKRGGGGSGGGGSGGGGSEVQLQQSGPELVKPGTSVRISCKTSGYTFTEYTIHWVKQSHGKSLEWIGNINPNNGGTTYNQKFEDKATLTVDKSSSTAYMELRSLTSEDSAVYYCAAGWNFDYWGQGTTLTVSSTRQSFGLLDPKLCYLLDGILFIYGVILTALFLRVKFSRSADAPAYQQGQNQLYNELNLGRREEYDVLDKRRGRDPEMGGKPQRRKNPQEGLYNELQKDKMAEAYSEIGMKGERRRGKGHDGLYQGLSTATKDTYDALHMQALPPR

SEQ ID NO: 20618 - protein, 446 aa, Artificial Sequence
  Synthetic Polypeptide
MALPVTALLLPLALLLHAARPEVQLQQSGPELVKPGTSVRISCKTSGYTFTEYTIHWVKQSHGKSLEWIGNINPNNGGTTYNQKFEDKATLTVDKSSSTAYMELRSLTSEDSAVYYCAAGWNFDYWGQGTTLTVSSGGGGSGGGGSGGGGSDIQMTQSPSSLSASVGDRVTITCKASQDVGTAVDWYQQKPGKAPKLLIYWASTRHTGVPSRFSGSGSGTDFTLTISSLQPEDFATYYCQQYNSYPLTFGQGTKVEIKRTRDGNEEMGGITQTPYKVSISGTTVILTCPQYPGSEILWQHNDKNIGGDEDDKNIGSDEDHLSLKEFSELEQSGYYVCYPRGSKPEDANFYLYLRARVCENCMEMDVMSVATIVIVDICITGGLLLLVYYWSKNRKAKAKPVTRGAGAGGRQRGQNKERPPPVPNPDYEPIRKGQRDLYSGLNQRRI

SEQ ID NO: 20619 - protein, 411 aa, Artificial Sequence
  Synthetic Polypeptide
MALPVTALLLPLALLLHAARPEVQLQQSGPELVKPGTSVRISCKTSGYTFTEYTIHWVKQSHGKSLEWIGNINPNNGGTTYNQKFEDKATLTVDKSSSTAYMELRSLTSEDSAVYYCAAGWNFDYWGQGTTLTVSSGGGGSGGGGSGGGGSDIQMTQSPSSLSASVGDRVTITCKASQDVGTAVDWYQQKPGKAPKLLIYWASTRHTGVPSRFSGSGSGTDFTLTISSLQPEDFATYYCQQYNSYPLTFGQGTKVEIKRTRFKIPIEELEDRVFVNCNTSITWVEGTVGTLLSDITRLDLGKRILDPRGIYRCNGTDIYKDKESTVQVHYRMCQSCVELDPATVAGIIVTDVIATLLLALGVFCFAGHETGRLSGAADTQALLRNDQVYQPLRDRDDAQYSHLGGNWARNK

SEQ ID NO: 20620 - protein, 421 aa, Artificial Sequence
  Synthetic Polypeptide
MALPVTALLLPLALLLHAARPEVQLQQSGPELVKPGTSVRISCKTSGYTFTEYTIHWVKQSHGKSLEWIGNINPNNGGTTYNQKFEDKATLTVDKSSSTAYMELRSLTSEDSAVYYCAAGWNFDYWGQGTTLTVSSGGGGSGGGGSGGGGSDIQMTQSPSSLSASVGDRVTITCKASQDVGTAVDWYQQKPGKAPKLLIYWASTRHTGVPSRFSGSGSGTDFTLTISSLQPEDFATYYCQQYNSYPLTFGQGTKVEIKRTRQSIKGNHLVKVYDYQEDGSVLLTCDAEAKNITWFKDGKMIGFLTEDKKKWNLGSNAKDPRGMYQCKGSQNKSKPLQVYYRMCQNCIELNAATISGFLFAEIVSIFVLAVGVYFIAGQDGVRQSRASDKQTLLPNDQLYQPLKDREDDQYSHLQGNQLRRN

SEQ ID NO: 20621 - protein, 404 aa, Artificial Sequence
  Synthetic Polypeptide
MALPVTALLLPLALLLHAARPEVQLQQSGPELVKPGTSVRISCKTSGYTFTEYTIHWVKQSHGKSLEWIGNINPNNGGTTYNQKFEDKATLTVDKSSSTAYMELRSLTSEDSAVYYCAAGWNFDYWGQGTTLTVSSGGGGSGGGGSGGGGSDIQMTQSPSSLSASVGDRVTITCKASQDVGTAVDWYQQKPGKAPKLLIYWASTRHTGVPSRFSGSGSGTDFTLTISSLQPEDFATYYCQQYNSYPLTFGQGTKVEIKRTRQSFGLLDPKLCYLLDGILFIYGVILTALFLRVKFSRSADAPAYQQGQNQLYNELNLGRREEYDVLDKRRGRDPEMGGKPQRRKNPQEGLYNELQKDKMAEAYSEIGMKGERRRGKGHDGLYQGLSTATKDTYDALHMQALPPR

SEQ ID NO: 20622 - protein, 637 aa, Artificial Sequence
  Synthetic Polypeptide
MALPVTALLLPLALLLHAARPDIQMTQSPSSLSASVGDRVTITCKASQDVGTAVDWYQQKPGKAPKLLIYWASTRHTGVPSRFSGSGSGTDFTLTISSLQPEDFATYYCQQYNSYPLTFGQGTKVEIKRGGGGSGGGGSGGGGSEVQLQQSGPELVKPGTSVRISCKTSGYTFTEYTIHWVKQSHGKSLEWIGNINPNNGGTTYNQKFEDKATLTVDKSSSTAYMELRSLTSEDSAVYYCAAGWNFDYWGQGTTLTVSSTRGSGIQNPDPAVYQLRDSKSSDKSVCLFTDFDSQTNVSQSKDSDVYITDKTVLDMRSMDFKSNSAVAWSNKSDFACANAFNNSIIPEDTFFPSPESSCDVKLVEKSFETDTNLNFQNLSVIGFRILLLKVAGFNLLMTLRLWSSRAKRSGSGVKQTLNFDLLKLAGDVESNPGPSRGHMTEYKPTVRLATRDDVPRAVRTLAAAFADYPATRHTVDPDRHIERVTELQELFLTRVGLDIGKVWVADDGAAVAVWTTPESVEAGAVFAEIGPRMAELSGSRLAAQQQMEGLLAPHRPKEPAWFLATVGVSPDHQGKGLGSAVVLPGVEAAERAGVPAFLETSAPRNLPFYERLGFTVTADVEVPEGPRTWCMTRKPGA

SEQ ID NO: 20623 - protein, 669 aa, Artificial Sequence
  Synthetic Polypeptide
MALPVTALLLPLALLLHAARPDIQMTQSPSSLSASVGDRVTITCKASQDVGTAVDWYQQKPGKAPKLLIYWASTRHTGVPSRFSGSGSGTDFTLTISSLQPEDFATYYCQQYNSYPLTFGQGTKVEIKRGGGGSGGGGSGGGGSEVQLQQSGPELVKPGTSVRISCKTSGYTFTEYTIHWVKQSHGKSLEWIGNINPNNGGTTYNQKFEDKATLTVDKSSSTAYMELRSLTSEDSAVYYCAAGWNFDYWGQGTTLTVSSLEDLKNVFPPEVAVFEPSEAEISHTQKATLVCLATGFYPDHVELSWWVNGKEVHSGVSTDPQPLKEQPALNDSRYCLSSRLRVSATFWQNPRNHFRCQVQFYGLSENDEWTQDRAKPVTQIVSAEAWGRADCGFTSESYQQGVLSATILYEILLGKATLYAVLVSALVLMAMVKRKDSRGRAKRSGSGATNFSLLKQAGDVEENPGPTRGHMTEYKPTVRLATRDDVPRAVRTLAAAFADYPATRHTVDPDRHIERVTELQELFLTRVGLDIGKVWVADDGAAVAVWTTPESVEAGAVFAEIGPRMAELSGSRLAAQQQMEGLLAPHRPKEPAWFLATVGVSPDHQGKGLGSAVVLPGVEAAERAGVPAFLETSAPRNLPFYERLGFTVTADVEVPEGPRTWCMTRKPGA

SEQ ID NO: 20624 - protein, 719 aa, Artificial Sequence
  Synthetic Polypeptide
MALPVTALLLPLALLLHAARPDIQMTQSPSSLSASVGDRVTITCKASQDVGTAVDWYQQKPGKAPKLLIYWASTRHTGVPSRFSGSGSGTDFTLTISSLQPEDFATYYCQQYNSYPLTFGQGTKVEIKRGGGGSGGGGSGGGGSEVQLQQSGPELVKPGTSVRISCKTSGYTFTEYTIHWVKQSHGKSLEWIGNINPNNGGTTYNQKFEDKATLTVDKSSSTAYMELRSLTSEDSAVYYCAAGWNFDYWGQGTTLTVSSTREQKLISEEDLGSGTPFPSLAPPIMLLVDGKQQMVVVCLVLDVAPPGLDSPIWFSAGNGSALDAFTYGPSPATDGTWTNLAHLSLPSEELASWEPLVCHTGPGAEGHSRSTQPMHLSGEASTARTCPQEPLRGTPGGALWLGVLRLLLFKLLLFDLLLTCSCLCDPAGPLPSPATTTRLRALGSHRLHPATETGGREATSSPRPQPRDRRWGDTPPGRKPGSPVRAKRSGSGVKQTLNFDLLKLAGDVESNPGPSRSRGHMTEYKPTVRLATRDDVPRAVRTLAAAFADYPATRHTVDPDRHIERVTELQELFLTRVGLDIGKVWVADDGAAVAVWTTPESVEAGAVFAEIGPRMAELSGSRLAAQQQMEGLLAPHRPKEPAWFLATVGVSPDHQGKGLGSAVVLPGVEAAERAGVPAFLETSAPRNLPFYERLGFTVTADVEVPEGPRTWCMTRKPGA

SEQ ID NO: 20625 - protein, 539 aa, Artificial Sequence; identical to SEQ ID NO: 20487
  Synthetic Polypeptide

SEQ ID NO: 20626 - protein, 309 aa, Artificial Sequence; identical to SEQ ID NO: 20488
  Synthetic Polypeptide

SEQ ID NO: 20627 - protein, 444 aa, Artificial Sequence; identical to SEQ ID NO: 20420
  Synthetic Polypeptide

SEQ ID NO: 20628 - protein, 278 aa, Artificial Sequence; identical to SEQ ID NO: 20421
  Synthetic Polypeptide

SEQ ID NO: 20629 - protein, 557 aa, Artificial Sequence; identical to SEQ ID NO: 20491
  Synthetic Polypeptide

SEQ ID NO: 20630 - protein, 327 aa, Artificial Sequence; identical to SEQ ID NO: 20492
  Synthetic Polypeptide

SEQ ID NO: 20631 - protein, 456 aa, Artificial Sequence; identical to SEQ ID NO: 20424
  Synthetic Polypeptide

SEQ ID NO: 20632 - protein, 290 aa, Artificial Sequence; identical to SEQ ID NO: 20425
  Synthetic Polypeptide

SEQ ID NO: 20633 - protein, 637 aa, Artificial Sequence
  Synthetic Polypeptide
MALPVTALLLPLALLLHAARPDIQMTQSPSSLSASVGDRVTITCKASQDVGTAVDWYQQKPGKAPKLLIYWASTRHTGVPSRFSGSGSGTDFTLTISSLQPEDFATYYCQQYNSYPLTFGQGTKVEIKRGGGGSGGGGSGGGGSEVQLQQSGPELVKPGTSVRISCKTSGYTFTEYTIHWVKQSHGKSLEWIGNINPNNGGTTYNQKFEDKATLTVDKSSSTAYMELRSLTSEDSAVYYCAAGWNFDYWGQGTTLTVSSTRGSGIQNPDPAVYQLRDSKSSDKSVCLFTDFDSQTNVSQSKDSDVYITDKTVLDMRSMDFKSNSAVAWSNKSDFACANAFNNSIIPEDTFFPSSDVPCDVKLVEKSFETDTNLNFQNLSVIGFRILLLKVAGFNLLMTLRLWSSRAKRSGSGVKQTLNFDLLKLAGDVESNPGPSRGHMTEYKPTVRLATRDDVPRAVRTLAAAFADYPATRHTVDPDRHIERVTELQELFLTRVGLDIGKVWVADDGAAVAVWTTPESVEAGAVFAEIGPRMAELSGSRLAAQQQMEGLLAPHRPKEPAWFLATVGVSPDHQGKGLGSAVVLPGVEAAERAGVPAFLETSAPRNLPFYERLGFTVTADVEVPEGPRTWCMTRKPGA

SEQ ID NO: 20634 - protein, 669 aa, Artificial Sequence
  Synthetic Polypeptide
MALPVTALLLPLALLLHAARPDIQMTQSPSSLSASVGDRVTITCKASQDVGTAVDWYQQKPGKAPKLLIYWASTRHTGVPSRFSGSGSGTDFTLTISSLQPEDFATYYCQQYNSYPLTFGQGTKVEIKRGGGGSGGGGSGGGGSEVQLQQSGPELVKPGTSVRISCKTSGYTFTEYTIHWVKQSHGKSLEWIGNINPNNGGTTYNQKFEDKATLTVDKSSSTAYMELRSLTSEDSAVYYCAAGWNFDYWGQGTTLTVSSLEDLKNVFPPEVAVFEPSKAEIAHTQKATLVCLATGFYPDHVELSWWVNGKEVHSGVSTDPQPLKEQPALNDSRYCLSSRLRVSATFWQNPRNHFRCQVQFYGLSENDEWTQDRAKPVTQIVSAEAWGRADCGITSASYHQGVLSATILYEILLGKATLYAVLVSALVLMAMVKRKDSRGRAKRSGSGATNFSLLKQAGDVEENPGPTRGHMTEYKPTVRLATRDDVPRAVRTLAAAFADYPATRHTVDPDRHIERVTELQELFLTRVGLDIGKVWVADDGAAVAVWTTPESVEAGAVFAEIGPRMAELSGSRLAAQQQMEGLLAPHRPKEPAWFLATVGVSPDHQGKGLGSAVVLPGVEAAERAGVPAFLETSAPRNLPFYERLGFTVTADVEVPEGPRTWCMTRKPGA

SEQ ID NO: 20635 - protein, 692 aa, Artificial Sequence
  Synthetic Polypeptide
MALPVTALLLPLALLLHAARPDIQMTQSPSSLSASVGDRVTITCKASQDVGTAVDWYQQKPGKAPKLLIYWASTRHTGVPSRFSGSGSGTDFTLTISSLQPEDFATYYCQQYNSYPLTFGQGTKVEIKRGGGGSGGGGSGGGGSEVQLQQSGPELVKPGTSVRISCKTSGYTFTEYTIHWVKQSHGKSLEWIGNINPNNGGTTYNQKFEDKATLTVDKSSSTAYMELRSLTSEDSAVYYCAAGWNFDYWGQGTTLTVSSTRGSGGGGSGGGGSGDGNEEMGGITQTPYKVSISGTTVILTCPQYPGSEILWQHNDKNIGGDEDDKNIGSDEDHLSLKEFSELEQSGYYVCYPRGSKPEDANFYLYLRARVCENCMEMDVMSVATIVIVDICITGGLLLLVYYWSKNRKAKAKPVTRGAGAGGRQRGQNKERPPPVPNPDYEPIRKGQRDLYSGLNQRRIRAKRSGSGVKQTLNFDLLKLAGDVESNPGPSRGHMTEYKPTVRLATRDDVPRAVRTLAAAFADYPATRHTVDPDRHIERVTELQELFLTRVGLDIGKVWVADDGAAVAVWTTPESVEAGAVFAEIGPRMAELSGSRLAAQQQMEGLLAPHRPKEPAWFLATVGVSPDHQGKGLGSAVVLPGVEAAERAGVPAFLETSAPRNLPFYERLGFTVTADVEVPEGPRTWCMTRKPGA

SEQ ID NO: 20636 - protein, 657 aa, Artificial Sequence
  Synthetic Polypeptide
MALPVTALLLPLALLLHAARPDIQMTQSPSSLSASVGDRVTITCKASQDVGTAVDWYQQKPGKAPKLLIYWASTRHTGVPSRFSGSGSGTDFTLTISSLQPEDFATYYCQQYNSYPLTFGQGTKVEIKRGGGGSGGGGSGGGGSEVQLQQSGPELVKPGTSVRISCKTSGYTFTEYTIHWVKQSHGKSLEWIGNINPNNGGTTYNQKFEDKATLTVDKSSSTAYMELRSLTSEDSAVYYCAAGWNFDYWGQGTTLTVSSTRGSGGGGSGGGGSGFKIPIEELEDRVFVNCNTSITWVEGTVGTLLSDITRLDLGKRILDPRGIYRCNGTDIYKDKESTVQVHYRMCQSCVELDPATVAGIIVTDVIATLLLALGVFCFAGHETGRLSGAADTQALLRNDQVYQPLRDRDDAQYSHLGGNWARNKRAKRSGSGVKQTLNFDLLKLAGDVESNPGPSRGHMTEYKPTVRLATRDDVPRAVRTLAAAFADYPATRHTVDPDRHIERVTELQELFLTRVGLDIGKVWVADDGAAVAVWTTPESVEAGAVFAEIGPRMAELSGSRLAAQQQMEGLLAPHRPKEPAWFLATVGVSPDHQGKGLGSAVVLPGVEAAERAGVPAFLETSAPRNLPFYERLGFTVTADVEVPEGPRTWCMTRKPGA

SEQ ID NO: 20637 - protein, 667 aa, Artificial Sequence
  Synthetic Polypeptide
MALPVTALLLPLALLLHAARPDIQMTQSPSSLSASVGDRVTITCKASQDVGTAVDWYQQKPGKAPKLLIYWASTRHTGVPSRFSGSGSGTDFTLTISSLQPEDFATYYCQQYNSYPLTFGQGTKVEIKRGGGGSGGGGSGGGGSEVQLQQSGPELVKPGTSVRISCKTSGYTFTEYTIHWVKQSHGKSLEWIGNINPNNGGTTYNQKFEDKATLTVDKSSSTAYMELRSLTSEDSAVYYCAAGWNFDYWGQGTTLTVSSTRGSGGGGSGGGGSGQSIKGNHLVKVYDYQEDGSVLLTCDAEAKNITWFKDGKMIGFLTEDKKKWNLGSNAKDPRGMYQCKGSQNKSKPLQVYYRMCQNCIELNAATISGFLFAEIVSIFVLAVGVYFIAGQDGVRQSRASDKQTLLPNDQLYQPLKDREDDQYSHLQGNQLRRNRAKRSGSGVKQTLNFDLLKLAGDVESNPGPSRGHMTEYKPTVRLATRDDVPRAVRTLAAAFADYPATRHTVDPDRHIERVTELQELFLTRVGLDIGKVWVADDGAAVAVWTTPESVEAGAVFAEIGPRMAELSGSRLAAQQQMEGLLAPHRPKEPAWFLATVGVSPDHQGKGLGSAVVLPGVEAAERAGVPAFLETSAPRNLPFYERLGFTVTADVEVPEGPRTWCMTRKPGA

SEQ ID NO: 20638 - protein, 650 aa, Artificial Sequence
  Synthetic Polypeptide
MALPVTALLLPLALLLHAARPDIQMTQSPSSLSASVGDRVTITCKASQDVGTAVDWYQQKPGKAPKLLIYWASTRHTGVPSRFSGSGSGTDFTLTISSLQPEDFATYYCQQYNSYPLTFGQGTKVEIKRGGGGSGGGGSGGGGSEVQLQQSGPELVKPGTSVRISCKTSGYTFTEYTIHWVKQSHGKSLEWIGNINPNNGGTTYNQKFEDKATLTVDKSSSTAYMELRSLTSEDSAVYYCAAGWNFDYWGQGTTLTVSSTRGSGGGGSGGGGSGQSFGLLDPKLCYLLDGILFIYGVILTALFLRVKFSRSADAPAYQQGQNQLYNELNLGRREEYDVLDKRRGRDPEMGGKPQRRKNPQEGLYNELQKDKMAEAYSEIGMKGERRRGKGHDGLYQGLSTATKDTYDALHMQALPPRRAKRSGSGVKQTLNFDLLKLAGDVESNPGPSRGHMTEYKPTVRLATRDDVPRAVRTLAAAFADYPATRHTVDPDRHIERVTELQELFLTRVGLDIGKVWVADDGAAVAVWTTPESVEAGAVFAEIGPRMAELSGSRLAAQQQMEGLLAPHRPKEPAWFLATVGVSPDHQGKGLGSAVVLPGVEAAERAGVPAFLETSAPRNLPFYERLGFTVTADVEVPEGPRTWCMTRKPGA

SEQ ID NO: 20639 - protein, 751 aa, Artificial Sequence
  Synthetic Polypeptide
MALPVTALLLPLALLLHAARPEVQLVESGGGLVQPGGSLRLSCAASGFSFSDFWMSWVRQAPGKGLEWVATISQAGSEKDYVDSVKGRFTISRDNAKKSLYLQMNSLRAEDTAVYYCASGVYSFDYRGQGTLVTVSSGTGGGGSGGGGSGGGGSEFDIQMTQSPSSLSASVGDRVTITCKASQDVGTAVDWYQQKPGKAPKLLIYWASTRHTGVPSRFSGSGSGTDFTLTISSLQPEDFATYYCQQYNSYPLTFGQGTKVEIKRLEDLKNVFPPEVAVFEPSEAEISHTQKATLVCLATGFYPDHVELSWWVNGKEVHSGVCTDPQPLKEQPALNDSRYCLSSRLRVSATFWQNPRNHFRCQVQFYGLSENDEWTQDRAKPVTQIVSAEAWGRADCGFTSESYQQGVLSATILYEILLGKATLYAVLVSALVLMAMVKRKDSRGRAKRSGSGATNFSLLKQAGDVEENPGPTSMDWIWRILFLVGAATGAHSFEEVQLQQSGPELVKPGTSVRISCKTSGYTFTEYTIHWVKQSHGKSLEWIGNINPNNGGTTYNQKFEDKATLTVDKSSSTAYMELRSLTSEDSAVYYCAAGWNFDYWGQGTTLTVSSTRIQNPDPAVYQLRDSKSSDKSVCLFTDFDSQTNVSQSKDSDVYITDKCVLDMRSMDFKSNSAVAWSNKSDFACANAFNNSIIPEDTFFPSPESSCDVKLVEKSFETDTNLNFQNLSVIGFRILLLKVAGFNLLMTLRLWSS

SEQ ID NO: 20640 - protein, 755 aa, Artificial Sequence
  Synthetic Polypeptide
MALPVTALLLPLALLLHAARPEVQLVESGGGLVQPGGSLRLSCAASGFSFSDFWMSWVRQAPGKGLEWVATISQAGSEKDYVDSVKGRFTISRDNAKKSLYLQMNSLRAEDTAVYYCASGVYSFDYRGQGTLVTVSSGTGGGGSGGGGSGGGGSEFDIQMTQSPSSLSASVGDRVTITCKASQDVGTAVDWYQQKPGKAPKLLIYWASTRHTGVPSRFSGSGSGTDFTLTISSLQPEDFATYYCQQYNSYPLTFGQGTKVEIKRLEIQNPDPAVYQLRDSKSSDKSVCLFTDFDSQTNVSQSKDSDVYITDKCVLDMRSMDFKSNSAVAWSNKSDFACANAFNNSIIPEDTFFPSPESSCDVKLVEKSFETDTNLNFQNLSVIGFRILLLKVAGFNLLMTLRLWSSRAKRSGSGVKQTLNFDLLKLAGDVESNPGPTSMDWIWRILFLVGAATGAHSFEEVQLQQSGPELVKPGTSVRISCKTSGYTFTEYTIHWVKQSHGKSLEWIGNINPNNGGTTYNQKFEDKATLTVDKSSSTAYMELRSLTSEDSAVYYCAAGWNFDYWGQGTTLTVSSTREDLKNVFPPEVAVFEPSEAEISHTQKATLVCLATGFYPDHVELSWWVNGKEVHSGVCTDPQPLKEQPALNDSRYCLSSRLRVSATFWQNPRNHFRCQVQFYGLSENDEWTQDRAKPVTQIVSAEAWGRADCGFTSESYQQGVLSATILYEILLGKATLYAVLVSALVLMAMVKRKDSRG

SEQ ID NO: 20641 - protein, 947 aa, Artificial Sequence
  Synthetic Polypeptide
MALPVTALLLPLALLLHAARPEVQLVESGGGLVQPGGSLRLSCAASGFSFSDFWMSWVRQAPGKGLEWVATISQAGSEKDYVDSVKGRFTISRDNAKKSLYLQMNSLRAEDTAVYYCASGVYSFDYRGQGTLVTVSSGTGGGGSGGGGSGGGGSEFDIQMTQSPSSLSASVGDRVTITCKASQDVGTAVDWYQQKPGKAPKLLIYWASTRHTGVPSRFSGSGSGTDFTLTISSLQPEDFATYYCQQYNSYPLTFGQGTKVEIKRLEDLKNVFPPEVAVFEPSEAEISHTQKATLVCLATGFYPDHVELSWWVNGKEVHSGVSTDPQPLKEQPALNDSRYCLSSRLRVSATFWQNPRNHFRCQVQFYGLSENDEWTQDRAKPVTQIVSAEAWGRADCGSQSFGLLDPKLCYLLDGILFIYGVILTALFLRVKFSRSADAPAYQQGQNQLYNELNLGRREEYDVLDKRRGRDPEMGGKPQRRKNPQEGLYNELQKDKMAEAYSEIGMKGERRRGKGHDGLYQGLSTATKDTYDALHMQALPPRRAKRSGSGATNFSLLKQAGDVEENPGPTSMDWIWRILFLVGAATGAHSFEEVQLQQSGPELVKPGTSVRISCKTSGYTFTEYTIHWVKQSHGKSLEWIGNINPNNGGTTYNQKFEDKATLTVDKSSSTAYMELRSLTSEDSAVYYCAAGWNFDYWGQGTTLTVSSTRIQNPDPAVYQLRDSKSSDKSVCLFTDFDSQTNVSQSKDSDVYITDKTVLDMRSMDFKSNSAVAWSNKSDFACANAFNNSIIPEDTFFPSPESSCGTQSFGLLDPKLCYLLDGILFIYGVILTALFLRVKFSRSADAPAYQQGQNQLYNELNLGRREEYDVLDKRRGRDPEMGGKPQRRKNPQEGLYNELQKDKMAEAYSEIGMKGERRRGKGHDGLYQGLSTATKDTYDALHMQALPPR

SEQ ID NO: 20642 - protein, 777 aa, Artificial Sequence
  Synthetic Polypeptide
MALPVTALLLPLALLLHAARPEVQLVESGGGLVQPGGSLRLSCAASGFSFSDFWMSWVRQAPGKGLEWVATISQAGSEKDYVDSVKGRFTISRDNAKKSLYLQMNSLRAEDTAVYYCASGVYSFDYRGQGTLVTVSSGTGGGGSGGGGSGGGGSEFDIQMTQSPSSLSASVGDRVTITCKASQDVGTAVDWYQQKPGKAPKLLIYWASTRHTGVPSRFSGSGSGTDFTLTISSLQPEDFATYYCQQYNSYPLTFGQGTKVEIKRLEGQPKANPTVTLFPPSSEELQANKATLVCLISDFYPGAVTVAWKADGSPVKAGVETTKPSKQSNNKYAASSYLSLTPEQWKSHRSYSCQVTHEGSTVEKTVAPTECSPIKTDVITMDPKDNCSKDANDTLLLQLTNTSAYYMYLLLLLKSVVYFAIITCCLLRRTAFCCNGEKSRAKRSGSGATNFSLLKQAGDVEENPGPTSMDWIWRILFLVGAATGAHSFEEVQLQQSGPELVKPGTSVRISCKTSGYTFTEYTIHWVKQSHGKSLEWIGNINPNNGGTTYNQKFEDKATLTVDKSSSTAYMELRSLTSEDSAVYYCAAGWNFDYWGQGTTLTVSSTRASTKGPSVFPLAPSSKSTSGGTAALGCLVKDYFPEPVTVSWNSGALTSGVHTFPAVLQSSGLYSLSSVVTVPSSSLGTQTYICNVNHKPSNTKVDKRVEPKSCEVKTDSTDHVKPKETENTKQPSKSCHKPKAIVHTEKVNMMSLTVLGLRMLFAKTVAVNFLLTAKLFFL

SEQ ID NO: 20643 - protein, 758 aa, Artificial Sequence
  Synthetic Polypeptide
MALPVTALLLPLALLLHAARPEVQLVESGGGLVQPGGSLRLSCAASGFSFSDFWMSWVRQAPGKGLEWVATISQAGSEKDYVDSVKGRFTISRDNAKKSLYLQMNSLRAEDTAVYYCASGVYSFDYRGQGTLVTVSSGTGGGGSGGGGSGGGGSEFDIQMTQSPSSLSASVGDRVTITCKASQDVGTAVDWYQQKPGKAPKLLIYWASTRHTGVPSRFSGSGSGTDFTLTISSLQPEDFATYYCQQYNSYPLTFGQGTKVEIKRLEGQPKANPTVTLFPPSSEELQANKATLVCLISDFYPGAVTVAWKADGSPVKAGVETTKPSKQSNNKYAASSYLSLTPEQWKSHRSYSCQVTHEGSTVEKTVAPTECSGRADCGFTSESYQQGVLSATILYEILLGKATLYAVLVSALVLMAMVKRKDSRGRAKRSGSGVKQTLNFDLLKLAGDVESNPGPTSMDWIWRILFLVGAATGAHSFEEVQLQQSGPELVKPGTSVRISCKTSGYTFTEYTIHWVKQSHGKSLEWIGNINPNNGGTTYNQKFEDKATLTVDKSSSTAYMELRSLTSEDSAVYYCAAGWNFDYWGQGTTLTVSSTRASTKGPSVFPLAPSSKSTSGGTAALGCLVKDYFPEPVTVSWNSGALTSGVHTFPAVLQSSGLYSLSSVVTVPSSSLGTQTYICNVNHKPSNTKVDKRVEPKSCIPEDTFFPSPESSCDVKLVEKSFETDTNLNFQNLSVIGFRILLLKVAGFNLLMTLRLWSS

SEQ ID NO: 20644 - protein, 892 aa, Artificial Sequence
  Synthetic Polypeptide
MALPVTALLLPLALLLHAARPEVQLVESGGGLVQPGGSLRLSCAASGFSFSDFWMSWVRQAPGKGLEWVATISQAGSEKDYVDSVKGRFTISRDNAKKSLYLQMNSLRAEDTAVYYCASGVYSFDYRGQGTLVTVSSGTGGGGSGGGGSGGGGSEFDIQMTQSPSSLSASVGDRVTITCKASQDVGTAVDWYQQKPGKAPKLLIYWASTRHTGVPSRFSGSGSGTDFTLTISSLQPEDFATYYCQQYNSYPLTFGQGTKVEIKRLEIQNPDPAVYQLRDSKSSDKSVCLFTDFDSQTNVSQSKDSDVYITDKCVLDMRSMDFKSNSAVAWSNKSDFACANAFNNSIIPEDTFFPSPESSCDVKLVEKSFETDTNLNFQNLSVIGFRILLLKVAGFNLLMTLRLWSSRAKRSGSGVKQTLNFDLLKLAGDVESNPGPTSMDWIWRILFLVGAATGAHSGPQLQLQESGPGLVKPSETLSLTCTVSGDSISSGDYYWGWIRQPPGKGLEWIGHIYYSGVTYYNPSLKSRVTISVDTSRNQFSLKLSSVTAADTAVYYCTREDSSNWRSRGQGTLVTVSSGSGGGGSGGGGSGGGGSFEEVQLQQSGPELVKPGTSVRISCKTSGYTFTEYTIHWVKQSHGKSLEWIGNINPNNGGTTYNQKFEDKATLTVDKSSSTAYMELRSLTSEDSAVYYCAAGWNFDYWGQGTTLTVSSTREDLKNVFPPEVAVFEPSEAEISHTQKATLVCLATGFYPDHVELSWWVNGKEVHSGVCTDPQPLKEQPALNDSRYCLSSRLRVSATFWQNPRNHFRCQVQFYGLSENDEWTQDRAKPVTQIVSAEAWGRADCGFTSESYQQGVLSATILYEILLGKATLYAVLVSALVLMAMVKRKDSRG

SEQ ID NO: 20645 - protein, 1084 aa, Artificial Sequence
  Synthetic Polypeptide
MALPVTALLLPLALLLHAARPEVQLVESGGGLVQPGGSLRLSCAASGFSFSDFWMSWVRQAPGKGLEWVATISQAGSEKDYVDSVKGRFTISRDNAKKSLYLQMNSLRAEDTAVYYCASGVYSFDYRGQGTLVTVSSGTGGGGSGGGGSGGGGSEFDIQMTQSPSSLSASVGDRVTITCKASQDVGTAVDWYQQKPGKAPKLLIYWASTRHTGVPSRFSGSGSGTDFTLTISSLQPEDFATYYCQQYNSYPLTFGQGTKVEIKRLEDLKNVFPPEVAVFEPSEAEISHTQKATLVCLATGFYPDHVELSWWVNGKEVHSGVSTDPQPLKEQPALNDSRYCLSSRLRVSATFWQNPRNHFRCQVQFYGLSENDEWTQDRAKPVTQIVSAEAWGRADCGSQSFGLLDPKLCYLLDGILFIYGVILTALFLRVKFSRSADAPAYQQGQNQLYNELNLGRREEYDVLDKRRGRDPEMGGKPQRRKNPQEGLYNELQKDKMAEAYSEIGMKGERRRGKGHDGLYQGLSTATKDTYDALHMQALPPRRAKRSGSGATNFSLLKQAGDVEENPGPTSMDWIWRILFLVGAATGAHSGPQLQLQESGPGLVKPSETLSLTCTVSGDSISSGDYYWGWIRQPPGKGLEWIGHIYYSGVTYYNPSLKSRVTISVDTSRNQFSLKLSSVTAADTAVYYCTREDSSNWRSRGQGTLVTVSSGSGGGGSGGGGSGGGGSFEEVQLQQSGPELVKPGTSVRISCKTSGYTFTEYTIHWVKQSHGKSLEWIGNINPNNGGTTYNQKFEDKATLTVDKSSSTAYMELRSLTSEDSAVYYCAAGWNFDYWGQGTTLTVSSTRIQNPDPAVYQLRDSKSSDKSVCLFTDFDSQTNVSQSKDSDVYITDKTVLDMRSMDFKSNSAVAWSNKSDFACANAFNNSIIPEDTFFPSPESSCGTQSFGLLDPKLCYLLDGILFIYGVILTALFLRVKFSRSADAPAYQQGQNQLYNELNLGRREEYDVLDKRRGRDPEMGGKPQRRKNPQEGLYNELQKDKMAEAYSEIGMKGERRRGKGHDGLYQGLSTATKDTYDALHMQALPPR

SEQ ID NO: 20646 - protein, 914 aa, Artificial Sequence
  Synthetic Polypeptide
MALPVTALLLPLALLLHAARPEVQLVESGGGLVQPGGSLRLSCAASGFSFSDFWMSWVRQAPGKGLEWVATISQAGSEKDYVDSVKGRFTISRDNAKKSLYLQMNSLRAEDTAVYYCASGVYSFDYRGQGTLVTVSSGTGGGGSGGGGSGGGGSEFDIQMTQSPSSLSASVGDRVTITCKASQDVGTAVDWYQQKPGKAPKLLIYWASTRHTGVPSRFSGSGSGTDFTLTISSLQPEDFATYYCQQYNSYPLTFGQGTKVEIKRLEGQPKANPTVTLFPPSSEELQANKATLVCLISDFYPGAVTVAWKADGSPVKAGVETTKPSKQSNNKYAASSYLSLTPEQWKSHRSYSCQVTHEGSTVEKTVAPTECSPIKTDVITMDPKDNCSKDANDTLLLQLTNTSAYYMYLLLLLKSVVYFAIITCCLLRRTAFCCNGEKSRAKRSGSGATNFSLLKQAGDVEENPGPTSMDWIWRILFLVGAATGAHSGPQLQLQESGPGLVKPSETLSLTCTVSGDSISSGDYYWGWIRQPPGKGLEWIGHIYYSGVTYYNPSLKSRVTISVDTSRNQFSLKLSSVTAADTAVYYCTREDSSNWRSRGQGTLVTVSSGSGGGGSGGGGSGGGGSFEEVQLQQSGPELVKPGTSVRISCKTSGYTFTEYTIHWVKQSHGKSLEWIGNINPNNGGTTYNQKFEDKATLTVDKSSSTAYMELRSLTSEDSAVYYCAAGWNFDYWGQGTTLTVSSTRASTKGPSVFPLAPSSKSTSGGTAALGCLVKDYFPEPVTVSWNSGALTSGVHTFPAVLQSSGLYSLSSVVTVPSSSLGTQTYICNVNHKPSNTKVDKRVEPKSCEVKTDSTDHVKPKETENTKQPSKSCHKPKAIVHTEKVNMMSLTVLGLRMLFAKTVAVNFLLTAKLFFL

SEQ ID NO: 20647 - protein, 895 aa, Artificial Sequence
  Synthetic Polypeptide
MALPVTALLLPLALLLHAARPEVQLVESGGGLVQPGGSLRLSCAASGFSFSDFWMSWVRQAPGKGLEWVATISQAGSEKDYVDSVKGRFTISRDNAKKSLYLQMNSLRAEDTAVYYCASGVYSFDYRGQGTLVTVSSGTGGGGSGGGGSGGGGSEFDIQMTQSPSSLSASVGDRVTITCKASQDVGTAVDWYQQKPGKAPKLLIYWASTRHTGVPSRFSGSGSGTDFTLTISSLQPEDFATYYCQQYNSYPLTFGQGTKVEIKRLEGQPKANPTVTLFPPSSEELQANKATLVCLISDFYPGAVTVAWKADGSPVKAGVETTKPSKQSNNKYAASSYLSLTPEQWKSHRSYSCQVTHEGSTVEKTVAPTECSGRADCGFTSESYQQGVLSATILYEILLGKATLYAVLVSALVLMAMVKRKDSRGRAKRSGSGVKQTLNFDLLKLAGDVESNPGPTSMDWIWRILFLVGAATGAHSGPQLQLQESGPGLVKPSETLSLTCTVSGDSISSGDYYWGWIRQPPGKGLEWIGHIYYSGVTYYNPSLKSRVTISVDTSRNQFSLKLSSVTAADTAVYYCTREDSSNWRSRGQGTLVTVSSGSGGGGSGGGGSGGGGSFEEVQLQQSGPELVKPGTSVRISCKTSGYTFTEYTIHWVKQSHGKSLEWIGNINPNNGGTTYNQKFEDKATLTVDKSSSTAYMELRSLTSEDSAVYYCAAGWNFDYWGQGTTLTVSSTRASTKGPSVFPLAPSSKSTSGGTAALGCLVKDYFPEPVTVSWNSGALTSGVHTFPAVLQSSGLYSLSSVVTVPSSSLGTQTYICNVNHKPSNTKVDKRVEPKSCIPEDTFFPSPESSCDVKLVEKSFETDTNLNFQNLSVIGFRILLLKVAGFNLLMTLRLWSS

SEQ ID NO: 20648 - protein, 752 aa, Artificial Sequence
  Synthetic Polypeptide
MALPVTALLLPLALLLHAARPEVQVLESGGGLVQPGGSLRLSCAASGFTFSNFAMSWVRQAPGKGLEWVSTISGSAGTTDYADSVKGRFTISRDNSKKTLYLQMNSLRVEDTAVYYCADGRGPFFDYRGQGTLVTVSSGTGGGGSGGGGSGGGGSEFDIQMTQSPSSLSASVGDRVTITCKASQDVGTAVDWYQQKPGKAPKLLIYWASTRHTGVPSRFSGSGSGTDFTLTISSLQPEDFATYYCQQYNSYPLTFGQGTKVEIKRLEDLKNVFPPEVAVFEPSEAEISHTQKATLVCLATGFYPDHVELSWWVNGKEVHSGVCTDPQPLKEQPALNDSRYCLSSRLRVSATFWQNPRNHFRCQVQFYGLSENDEWTQDRAKPVTQIVSAEAWGRADCGFTSESYQQGVLSATILYEILLGKATLYAVLVSALVLMAMVKRKDSRGRAKRSGSGATNFSLLKQAGDVEENPGPTSMDWIWRILFLVGAATGAHSFEEVQLQQSGPELVKPGTSVRISCKTSGYTFTEYTIHWVKQSHGKSLEWIGNINPNNGGTTYNQKFEDKATLTVDKSSSTAYMELRSLTSEDSAVYYCAAGWNFDYWGQGTTLTVSSTRIQNPDPAVYQLRDSKSSDKSVCLFTDFDSQTNVSQSKDSDVYITDKCVLDMRSMDFKSNSAVAWSNKSDFACANAFNNSIIPEDTFFPSPESSCDVKLVEKSFETDTNLNFQNLSVIGFRILLLKVAGFNLLMTLRLWSS

SEQ ID NO: 20649 - protein, 753 aa, Artificial Sequence
  Synthetic Polypeptide
MALPVTALLLPLALLLHAARPDIQMTQSPSSLSASVGDRVTITCKASQDVGTAVDWYQQKPGKAPKLLIYWASTRHTGVPSRFSGSGSGTDFTLTISSLQPEDFATYYCQQYNSYPLTFGQGTKVEIKRLEDLKNVFPPEVAVFEPSEAEISHTQKATLVCLATGFYPDHVELSWWVNGKEVHSGVCTDPQPLKEQPALNDSRYCLSSRLRVSATFWQNPRNHFRCQVQFYGLSENDEWTQDRAKPVTQIVSAEAWGRADCGFTSESYQQGVLSATILYEILLGKATLYAVLVSALVLMAMVKRKDSRGRAKRSGSGATNFSLLKQAGDVEENPGPTSMDWIWRILFLVGAATGAHSGPEVQLVESGGGLVQAGGSLRLSCAASGRTFSMGWFRQAPGKEREFVAAITYSGGSPYYADSVKGRFTISRDNAKNTVYLQMNSLKPEDTAVYYCAANPTYGSDWNAENWGQGTQVTVSSGSGGGGSGGGGSGGGGSFEEVQLQQSGPELVKPGTSVRISCKTSGYTFTEYTIHWVKQSHGKSLEWIGNINPNNGGTTYNQKFEDKATLTVDKSSSTAYMELRSLTSEDSAVYYCAAGWNFDYWGQGTTLTVSSTRIQNPDPAVYQLRDSKSSDKSVCLFTDFDSQTNVSQSKDSDVYITDKCVLDMRSMDFKSNSAVAWSNKSDFACANAFNNSIIPEDTFFPSPESSCDVKLVEKSFETDTNLNFQNLSVIGFRILLLKVAGFNLLMTLRLWSS

SEQ ID NO: 20650 - protein, 880 aa, Artificial Sequence
  Synthetic Polypeptide
MALPVTALLLPLALLLHAARPDIQMTQSPSSLSASVGDRVTITCKASQDVGTAVDWYQQKPGKAPKLLIYWASTRHTGVPSRFSGSGSGTDFTLTISSLQPEDFATYYCQQYNSYPLTFGQGTKVEIKRLEDLKNVFPPEVAVFEPSEAEISHTQKATLVCLATGFYPDHVELSWWVNGKEVHSGVCTDPQPLKEQPALNDSRYCLSSRLRVSATFWQNPRNHFRCQVQFYGLSENDEWTQDRAKPVTQIVSAEAWGRADCGFTSESYQQGVLSATILYEILLGKATLYAVLVSALVLMAMVKRKDSRGRAKRSGSGATNFSLLKQAGDVEENPGPTSMDWIWRILFLVGAATGAHSQLQLQESGPGLVKPSETLSLTCTVSGGSISSGDYYWGWIRQPPGKGLEWIGSISYSGSTYYNPSLKSRVTISVDTSRNQFSLKLSSVTAADTAVYYCTREDSSNWRSRGQGTLVTVSSSGGGGSGGGGSEVQLVESGGGLVQAGGSLRLSCAASGRTFSMGWFRQAPGKEREFVAAITYSGGSPYYADSVKGRFTISRDNAKNTVYLQMNSLKPEDTAVYYCAANPTYGSDWNAENWGQGTQVTVSSGSGGGGSGGGGSGGGGSFEEVQLQQSGPELVKPGTSVRISCKTSGYTFTEYTIHWVKQSHGKSLEWIGNINPNNGGTTYNQKFEDKATLTVDKSSSTAYMELRSLTSEDSAVYYCAAGWNFDYWGQGTTLTVSSTRIQNPDPAVYQLRDSKSSDKSVCLFTDFDSQTNVSQSKDSDVYITDKCVLDMRSMDFKSNSAVAWSNKSDFACANAFNNSIIPEDTFFPSPESSCDVKLVEKSFETDTNLNFQNLSVIGFRILLLKVAGFNLLMTLRLWSS

SEQ ID NO: 20651 - protein, 889 aa, Artificial Sequence
  Synthetic Polypeptide
MALPVTALLLPLALLLHAARPEVQVLESGGGLVQPGGSLRLSCAASGFTFSNFAMSWVRQAPGKGLEWVSTISGSAGTTDYADSVKGRFTISRDNSKKTLYLQMNSLRVEDTAVYYCADGRGPFFDYRGQGTLVTVSSGTGGGGSGGGGSGGGGSEFDIQMTQSPSSLSASVGDRVTITCKASQDVGTAVDWYQQKPGKAPKLLIYWASTRHTGVPSRFSGSGSGTDFTLTISSLQPEDFATYYCQQYNSYPLTFGQGTKVEIKRLEDLKNVFPPEVAVFEPSEAEISHTQKATLVCLATGFYPDHVELSWWVNGKEVHSGVCTDPQPLKEQPALNDSRYCLSSRLRVSATFWQNPRNHFRCQVQFYGLSENDEWTQDRAKPVTQIVSAEAWGRADCGFTSESYQQGVLSATILYEILLGKATLYAVLVSALVLMAMVKRKDSRGRAKRSGSGATNFSLLKQAGDVEENPGPTSMDWIWRILFLVGAATGAHSGPEVQLVESGGGLVQAGGSLRLSCAASGRTFSMGWFRQAPGKEREFVAAITYSGGSPYYASSVRGRFTISRDNAKNTVYLQMNSLKPEDTAVYYCAANPTYGSDWNAENWGQGTQVTVSSGSGGGGSGGGGSGGGGSFEEVQLQQSGPELVKPGTSVRISCKTSGYTFTEYTIHWVKQSHGKSLEWIGNINPNNGGTTYNQKFEDKATLTVDKSSSTAYMELRSLTSEDSAVYYCAAGWNFDYWGQGTTLTVSSTRIQNPDPAVYQLRDSKSSDKSVCLFTDFDSQTNVSQSKDSDVYITDKCVLDMRSMDFKSNSAVAWSNKSDFACANAFNNSIIPEDTFFPSPESSCDVKLVEKSFETDTNLNFQNLSVIGFRILLLKVAGFNLLMTLRLWSS

SEQ ID NO: 20652 - protein, 720 aa, Artificial Sequence
  Synthetic Polypeptide
MALPVTALLLPLALLLHAARPDIVMTQSHKFMSTSVGDRVSIICKASQDVGTAVDWYQQKPGQSPKLLIYWASTRHTGVPDRFTGSGSGTDFTLAITNVQSEDLADYFCQQYNSYPLTFGAGTKLEIKRGGGGSGGGGSGGGGSEVQLVESGGGLVQPGGSLRLSCAASGYTFTEYTIHWVRQAPGKGLEWVANINPNNGGTTYNQKFEDRFTISRDNSKNTLYLQMNSLRAEDTAVYYCARGWNFDYWGQGTLVTVSSTREQKLISEEDLAKPTTTPAPRPPTPAPTIASQPLSLRPEACRPAAGGAVHTRGLDFACDIYIWAPLAGTCGVLLLSLVITLYCKRGRKKLLYIFKQPFMRPVQTTQEEDGCSCRFPEEEEGGCELRVKFSRSADAPAYQQGQNQLYNELNLGRREEYDVLDKRRGRDPEMGGKPRRKNPQEGLYNELQKDKMAEAYSEIGMKGERRRGKGHDGLYQGLSTATKDTYDALHMQALPPRSSGSGEGRGSLLTCGDVEENPGPHMTEYKPTVRLATRDDVPRAVRTLAAAFADYPATRHTVDPDRHIERVTELQELFLTRVGLDIGKVWVADDGAAVAVWTTPESVEAGAVFAEIGPRMAELSGSRLAAQQQMEGLLAPHRPKEPAWFLATVGVSPDHQGKGLGSAVVLPGVEAAERAGVPAFLETSAPRNLPFYERLGFTVTADVEVPEGPRTWCMTRKPGA

SEQ ID NO: 20653 - protein, 714 aa, Artificial Sequence
  Synthetic Polypeptide
MALPVTALLLPLALLLHAARPDIVMTQSHKFMSTSVGDRVSIICKASQDVGTAVDWYQQKPGQSPKLLIYWASTRHTGVPDRFTGSGSGTDFTLAITNVQSEDLADYFCQQYNSYPLTFGAGTKLEIKRGGGGSGGGGSGGGGSEVQLVESGGGLVQPGGSLRLSCAASGYTFTEYTIHWVRQAPGKGLEWVANINPNNGGTTYNQKFEDRFTISRDNSKNTLYLQMNSLRAEDTAVYYCARGWNFDYWGQGTLVTVSSTREQKLISEEDLKIEVMYPPPYLDNEKSNGTIIHVKGKHLCPSPLFPGPSKPFWVLVVVGGVLACYSLLVTVAFIIFWVRSKRSRLLHSDYMNMTPRRPGPTRKHYQPYAPPRDFAAYRSRVKFSRSADAPAYQQGQNQLYNELNLGRREEYDVLDKRRGRDPEMGGKPRRKNPQEGLYNELQKDKMAEAYSEIGMKGERRRGKGHDGLYQGLSTATKDTYDALHMQALPPRSSGSGEGRGSLLTCGDVEENPGPHMTEYKPTVRLATRDDVPRAVRTLAAAFADYPATRHTVDPDRHIERVTELQELFLTRVGLDIGKVWVADDGAAVAVWTTPESVEAGAVFAEIGPRMAELSGSRLAAQQQMEGLLAPHRPKEPAWFLATVGVSPDHQGKGLGSAVVLPGVEAAERAGVPAFLETSAPRNLPFYERLGFTVTADVEVPEGPRTWCMTRKPGA

SEQ ID NO: 20654 - protein, 491 aa, Artificial Sequence
  Synthetic Polypeptide
MALPVTALLLPLALLLHAARPDIVMTQSHKFMSTSVGDRVSIICKASQDVGTAVDWYQQKPGQSPKLLIYWASTRHTGVPDRFTGSGSGTDFTLAITNVQSEDLADYFCQQYNSYPLTFGAGTKLEIKRGGGGSGGGGSGGGGSEVQLVESGGGLVQPGGSLRLSCAASGYTFTEYTIHWVRQAPGKGLEWVANINPNNGGTTYNQKFEDRFTISRDNSKNTLYLQMNSLRAEDTAVYYCARGWNFDYWGQGTLVTVSSTREQKLISEEDLKIEVMYPPPYLDNEKSNGTIIHVKGKHLCPSPLFPGPSKPFWVLVVVGGVLACYSLLVTVAFIIFWVRSKRSRLLHSDYMNMTPRRPGPTRKHYQPYAPPRDFAAYRSRVKFSRSADAPAYQQGQNQLYNELNLGRREEYDVLDKRRGRDPEMGGKPRRKNPQEGLYNELQKDKMAEAYSEIGMKGERRRGKGHDGLYQGLSTATKDTYDALHMQALPPR

SEQ ID NO: 20655 - protein, 497 aa, Artificial Sequence
  Synthetic Polypeptide
MALPVTALLLPLALLLHAARPDIVMTQSHKFMSTSVGDRVSIICKASQDVGTAVDWYQQKPGQSPKLLIYWASTRHTGVPDRFTGSGSGTDFTLAITNVQSEDLADYFCQQYNSYPLTFGAGTKLEIKRGGGGSGGGGSGGGGSEVQLVESGGGLVQPGGSLRLSCAASGYTFTEYTIHWVRQAPGKGLEWVANINPNNGGTTYNQKFEDRFTISRDNSKNTLYLQMNSLRAEDTAVYYCARGWNFDYWGQGTLVTVSSTREQKLISEEDLAKPTTTPAPRPPTPAPTIASQPLSLRPEACRPAAGGAVHTRGLDFACDIYIWAPLAGTCGVLLLSLVITLYCKRGRKKLLYIFKQPFMRPVQTTQEEDGCSCRFPEEEEGGCELRVKFSRSADAPAYQQGQNQLYNELNLGRREEYDVLDKRRGRDPEMGGKPRRKNPQEGLYNELQKDKMAEAYSEIGMKGERRRGKGHDGLYQGLSTATKDTYDALHMQALPPR

SEQ ID NO: 20656 - protein, 497 aa, Artificial Sequence
  Synthetic Polypeptide
MALPVTALLLPLALLLHAARPEVQLVESGGGLVQPGGSLRLSCAASGYTFTEYTIHWVRQAPGKGLEWVANINPNNGGTTYNQKFEDRFTISRDNSKNTLYLQMNSLRAEDTAVYYCARGWNFDYWGQGTLVTVSSGGGGSGGGGSGGGGSDIVMTQSHKFMSTSVGDRVSIICKASQDVGTAVDWYQQKPGQSPKLLIYWASTRHTGVPDRFTGSGSGTDFTLAITNVQSEDLADYFCQQYNSYPLTFGAGTKLEIKRTREQKLISEEDLAKPTTTPAPRPPTPAPTIASQPLSLRPEACRPAAGGAVHTRGLDFACDIYIWAPLAGTCGVLLLSLVITLYCKRGRKKLLYIFKQPFMRPVQTTQEEDGCSCRFPEEEEGGCELRVKFSRSADAPAYQQGQNQLYNELNLGRREEYDVLDKRRGRDPEMGGKPRRKNPQEGLYNELQKDKMAEAYSEIGMKGERRRGKGHDGLYQGLSTATKDTYDALHMQALPPR

SEQ ID NO: 20657 - protein, 910 aa, Artificial Sequence
  Synthetic Polypeptide
MALPVTALLLPLALLLHAARPDIVMTQSHKFMSTSVGDRVSIICKASQDVGTAVDWYQQKPGQSPKLLIYWASTRHTGVPDRFTGSGSGTDFTLAITNVQSEDLADYFCQQYNSYPLTFGAGTKLEIKRGGGGSGGGGSGGGGSEVQLVESGGGLVQPGGSLRLSCAASGYTFTEYTIHWVRQAPGKGLEWVANINPNNGGTTYNQKFEDRFTISRDNSKNTLYLQMNSLRAEDTAVYYCARGWNFDYWGQGTLVTVSSTREQKLISEEDLAKPTTTPAPRPPTPAPTIASQPLSLRPEACRPAAGGAVHTRGLDFACDIYIWAPLAGTCGVLLLSLVITLYCGRARVKFSRSADAPAYQQGQNQLYNELNLGRREEYDVLDKRRGRDPEMGGKPRRKNPQEGLYNELQKDKMAEAYSEIGMKGERRRGKGHDGLYQGLSTATKDTYDALHMQALPPRSRGSGATNFSLLKQAGDVEENPGPGIHMATYEVLCEVARKLGTDDREVVLFLLNVFIPQPTLAQLIGALRALKEEGRLTFPLLAECLFRAGRRDLLRDLLHLDPRFLERHLAGTMSYFSPYQLTVLHVDGELCARDIRSLIFLSKDTIGSRSTPQTFLHWVYCMENLDLLGPTDVDALMSMLRSLSRVDLQRQVQTLMGLHLSGPSHSQHYRHTPLETDFYDYKDDDDKTSGSGEGRGSLLTCGDVEENPGPHMTEYKPTVRLATRDDVPRAVRTLAAAFADYPATRHTVDPDRHIERVTELQELFLTRVGLDIGKVWVADDGAAVAVWTTPESVEAGAVFAEIGPRMAELSGSRLAAQQQMEGLLAPHRPKEPAWFLATVGVSPDHQGKGLGSAVVLPGVEAAERAGVPAFLETSAPRNLPFYERLGFTVTADVEVPEGPRTWCMTRKPGA

SEQ ID NO: 20658 - protein, 850 aa, Artificial Sequence
  Synthetic Polypeptide
MALPVTALLLPLALLLHAARPDIVMTQSHKFMSTSVGDRVSIICKASQDVGTAVDWYQQKPGQSPKLLIYWASTRHTGVPDRFTGSGSGTDFTLAITNVQSEDLADYFCQQYNSYPLTFGAGTKLEIKRLEIQNPDPAVYQLRDSKSSDKSVCLFTDFDSQTNVSQSKDSDVYITDKCVLDMRSMDFKSNSAVAWSNKSDFACANAFNNSIIPEDTFFPSSDVPCDVKLVEKSFETDTNLNFQNLSVIGFRILLLKVAGFNLLMTLRLWSSRAKRSGSGVKQTLNFDLLKLAGDVESNPGPTSMDWIWRILFLVGAATGAHSFEEVQLVESGGGLVQPGGSLRLSCAASGYTFTEYTIHWVRQAPGKGLEWVANINPNNGGTTYNQKFEDRFTISRDNSKNTLYLQMNSLRAEDTAVYYCARGWNFDYWGQGTLVTVSSTREDLKNVFPPEVAVFEPSKAEIAHTQKATLVCLATGFYPDHVELSWWVNGKEVHSGVCTDPQPLKEQPALNDSRYCLSSRLRVSATFWQNPRNHFRCQVQFYGLSENDEWTQDRAKPVTQIVSAEAWGRADCGITSASYHQGVLSATILYEILLGKATLYAVLVSALVLMAMVKRKDSRGRAKRSGSGATNFSLLKQAGDVEENPGPSRGHMTEYKPTVRLATRDDVPRAVRTLAAAFADYPATRHTVDPDRHIERVTELQELFLTRVGLDIGKVWVADDGAAVAVWTTPESVEAGAVFAEIGPRMAELSGSRLAAQQQMEGLLAPHRPKEPAWFLATVGVSPDHQGKGLGSAVVLPGVEAAERAGVPAFLETSAPRNLPFYERLGFTVTADVEVPEGPRTWCMTRKPGA

SEQ ID NO: 20659 - protein, 849 aa, Artificial Sequence
  Synthetic Polypeptide
MALPVTALLLPLALLLHAARPDIVMTQSHKFMSTSVGDRVSIICKASQDVGTAVDWYQQKPGQSPKLLIYWASTRHTGVPDRFTGSGSGTDFTLAITNVQSEDLADYFCQQYNSYPLTFGAGTKLEIKRLEDLKNVFPPEVAVFEPSKAEIAHTQKATLVCLATGFYPDHVELSWWVNGKEVHSGVCTDPQPLKEQPALNDSRYCLSSRLRVSATFWQNPRNHFRCQVQFYGLSENDEWTQDRAKPVTQIVSAEAWGRADCGITSASYHQGVLSATILYEILLGKATLYAVLVSALVLMAMVKRKDSRGRAKRSGSGATNFSLLKQAGDVEENPGPTSMDWIWRILFLVGAATGAHSFEEVQLVESGGGLVQPGGSLRLSCAASGYTFTEYTIHWVRQAPGKGLEWVANINPNNGGTTYNQKFEDRFTISRDNSKNTLYLQMNSLRAEDTAVYYCARGWNFDYWGQGTLVTVSSTRIQNPDPAVYQLRDSKSSDKSVCLFTDFDSQTNVSQSKDSDVYITDKCVLDMRSMDFKSNSAVAWSNKSDFACANAFNNSIIPEDTFFPSSDVPCDVKLVEKSFETDTNLNFQNLSVIGFRILLLKVAGFNLLMTLRLWSSRAKRSGSGVKQTLNFDLLKLAGDVESNPGPSRGHMTEYKPTVRLATRDDVPRAVRTLAAAFADYPATRHTVDPDRHIERVTELQELFLTRVGLDIGKVWVADDGAAVAVWTTPESVEAGAVFAEIGPRMAELSGSRLAAQQQMEGLLAPHRPKEPAWFLATVGVSPDHQGKGLGSAVVLPGVEAAERAGVPAFLETSAPRNLPFYERLGFTVTADVEVPEGPRTWCMTRKPGA

SEQ ID NO: 20660 - protein, 616 aa, Artificial Sequence
  Synthetic Polypeptide
MALPVTALLLPLALLLHAARPDIVMTQSHKFMSTSVGDRVSIICKASQDVGTAVDWYQQKPGQSPKLLIYWASTRHTGVPDRFTGSGSGTDFTLAITNVQSEDLADYFCQQYNSYPLTFGAGTKLEIKRLEDLKNVFPPEVAVFEPSEAEISHTQKATLVCLATGFYPDHVELSWWVNGKEVHSGVCTDPQPLKEQPALNDSRYCLSSRLRVSATFWQNPRNHFRCQVQFYGLSENDEWTQDRAKPVTQIVSAEAWGRADCGFTSESYQQGVLSATILYEILLGKATLYAVLVSALVLMAMVKRKDSRGRAKRSGSGATNFSLLKQAGDVEENPGPTSMDWIWRILFLVGAATGAHSFEEVQLVESGGGLVQPGGSLRLSCAASGYTFTEYTIHWVRQAPGKGLEWVANINPNNGGTTYNQKFEDRFTISRDNSKNTLYLQMNSLRAEDTAVYYCARGWNFDYWGQGTLVTVSSTRIQNPDPAVYQLRDSKSSDKSVCLFTDFDSQTNVSQSKDSDVYITDKCVLDMRSMDFKSNSAVAWSNKSDFACANAFNNSIIPEDTFFPSPESSCDVKLVEKSFETDTNLNFQNLSVIGFRILLLKVAGFNLLMTLRLWSS

SEQ ID NO: 20661 - protein, 841 aa, Artificial Sequence
  Synthetic Polypeptide
MALPVTALLLPLALLLHAARPDIVMTQSHKFMSTSVGDRVSIICKASQDVGTAVDWYQQKPGQSPKLLIYWASTRHTGVPDRFTGSGSGTDFTLAITNVQSEDLADYFCQQYNSYPLTFGAGTKLEIKRLEDLKNVFPPEVAVFEPSEAEISHTQKATLVCLATGFYPDHVELSWWVNGKEVHSGVCTDPQPLKEQPALNDSRYCLSSRLRVSATFWQNPRNHFRCQVQFYGLSENDEWTQDRAKPVTQIVSAEAWGRADCGFTSESYQQGVLSATILYEILLGKATLYAVLVSALVLMAMVKRKDSRGRAKRSGSGATNFSLLKQAGDVEENPGPTSMDWIWRILFLVGAATGAHSFEEVQLVESGGGLVQPGGSLRLSCAASGYTFTEYTIHWVRQAPGKGLEWVANINPNNGGTTYNQKFEDRFTISRDNSKNTLYLQMNSLRAEDTAVYYCARGWNFDYWGQGTLVTVSSTRIQNPDPAVYQLRDSKSSDKSVCLFTDFDSQTNVSQSKDSDVYITDKCVLDMRSMDFKSNSAVAWSNKSDFACANAFNNSIIPEDTFFPSPESSCDVKLVEKSFETDTNLNFQNLSVIGFRILLLKVAGFNLLMTLRLWSSRAKRSGSGVKQTLNFDLLKLAGDVESNPGPSRGGIHTMATYEVLCEVARKLGTDDREVVLFLLNVFIPQPTLAQLIGALRALKEEGRLTFPLLAECLFRAGRRDLLRDLLHLDPRFLERHLAGTMSYFSPYQLTVLHVDGELCARDIRSLIFLSKDTIGSRSTPQTFLHWVYCMENLDLLGPTDVDALMSMLRSLSRVDLQRQVQTLMGLHLSGPSHSQHYRHTP

SEQ ID NO: 20662 - protein, 620 aa, Artificial Sequence
  Synthetic Polypeptide
MALPVTALLLPLALLLHAARPDIVMTQSHKFMSTSVGDRVSIICKASQDVGTAVDWYQQKPGQSPKLLIYWASTRHTGVPDRFTGSGSGTDFTLAITNVQSEDLADYFCQQYNSYPLTFGAGTKLEIKRLEIQNPDPAVYQLRDSKSSDKSVCLFTDFDSQTNVSQSKDSDVYITDKCVLDMRSMDFKSNSAVAWSNKSDFACANAFNNSIIPEDTFFPSPESSCDVKLVEKSFETDTNLNFQNLSVIGFRILLLKVAGFNLLMTLRLWSSRAKRSGSGVKQTLNFDLLKLAGDVESNPGPTSMDWIWRILFLVGAATGAHSFEEVQLVESGGGLVQPGGSLRLSCAASGYTFTEYTIHWVRQAPGKGLEWVANINPNNGGTTYNQKFEDRFTISRDNSKNTLYLQMNSLRAEDTAVYYCARGWNFDYWGQGTLVTVSSTREDLKNVFPPEVAVFEPSEAEISHTQKATLVCLATGFYPDHVELSWWVNGKEVHSGVCTDPQPLKEQPALNDSRYCLSSRLRVSATFWQNPRNHFRCQVQFYGLSENDEWTQDRAKPVTQIVSAEAWGRADCGFTSESYQQGVLSATILYEILLGKATLYAVLVSALVLMAMVKRKDSRG

SEQ ID NO: 20663 - protein, 842 aa, Artificial Sequence
  Synthetic Polypeptide
MALPVTALLLPLALLLHAARPDIVMTQSHKFMSTSVGDRVSIICKASQDVGTAVDWYQQKPGQSPKLLIYWASTRHTGVPDRFTGSGSGTDFTLAITNVQSEDLADYFCQQYNSYPLTFGAGTKLEIKRLEIQNPDPAVYQLRDSKSSDKSVCLFTDFDSQTNVSQSKDSDVYITDKCVLDMRSMDFKSNSAVAWSNKSDFACANAFNNSIIPEDTFFPSPESSCDVKLVEKSFETDTNLNFQNLSVIGFRILLLKVAGFNLLMTLRLWSSRAKRSGSGVKQTLNFDLLKLAGDVESNPGPTSMDWIWRILFLVGAATGAHSFEEVQLVESGGGLVQPGGSLRLSCAASGYTFTEYTIHWVRQAPGKGLEWVANINPNNGGTTYNQKFEDRFTISRDNSKNTLYLQMNSLRAEDTAVYYCARGWNFDYWGQGTLVTVSSTREDLKNVFPPEVAVFEPSEAEISHTQKATLVCLATGFYPDHVELSWWVNGKEVHSGVCTDPQPLKEQPALNDSRYCLSSRLRVSATFWQNPRNHFRCQVQFYGLSENDEWTQDRAKPVTQIVSAEAWGRADCGFTSESYQQGVLSATILYEILLGKATLYAVLVSALVLMAMVKRKDSRGRAKRSGSGATNFSLLKQAGDVEENPGPSRGGIHTMATYEVLCEVARKLGTDDREVVLFLLNVFIPQPTLAQLIGALRALKEEGRLTFPLLAECLFRAGRRDLLRDLLHLDPRFLERHLAGTMSYFSPYQLTVLHVDGELCARDIRSLIFLSKDTIGSRSTPQTFLHWVYCMENLDLLGPTDVDALMSMLRSLSRVDLQRQVQTLMGLHLSGPSHSQHYRHTP

SEQ ID NO: 20664 - protein, 894 aa, Artificial Sequence
  Synthetic Polypeptide
MALPVTALLLPLALLLHAARPLEGKPIPNPLLGLDSTGSGEDLKNVFPPEVAVFEPSKAEIAHTQKATLVCLATGFYPDHVELSWWVNGKEVHSGVCTDPQPLKEQPALNDSRYCLSSRLRVSATFWQNPRNHFRCQVQFYGLSENDEWTQDRAKPVTQIVSAEAWGRADCGITSASYHQGVLSATILYEILLGKATLYAVLVSALVLMAMVKRKDSRGRAKRSGSGATNFSLLKQAGDVEENPGPTSMALPVTALLLPLALLLHAARPDIVMTQSHKFMSTSVGDRVSIICKASQDVGTAVDWYQQKPGQSPKLLIYWASTRHTGVPDRFTGSGSGTDFTLAITNVQSEDLADYFCQQYNSYPLTFGAGTKLEIKRGGGGSGGGGSGGGGSEVQLVESGGGLVQPGGSLRLSCAASGYTFTEYTIHWVRQAPGKGLEWVANINPNNGGTTYNQKFEDRFTISRDNSKNTLYLQMNSLRAEDTAVYYCARGWNFDYWGQGTLVTVSSTREQKLISEEDGSGIQNPDPAVYQLRDSKSSDKSVCLFTDFDSQTNVSQSKDSDVYITDKCVLDMRSMDFKSNSAVAWSNKSDFACANAFNNSIIPEDTFFPSSDVPCDVKLVEKSFETDTNLNFQNLSVIGFRILLLKVAGFNLLMTLRLWSSRAKRSGSGVKQTLNFDLLKLAGDVESNPGPSRGHMTEYKPTVRLATRDDVPRAVRTLAAAFADYPATRHTVDPDRHIERVTELQELFLTRVGLDIGKVWVADDGAAVAVWTTPESVEAGAVFAEIGPRMAELSGSRLAAQQQMEGLLAPHRPKEPAWFLATVGVSPDHQGKGLGSAVVLPGVEAAERAGVPAFLETSAPRNLPFYERLGFTVTADVEVPEGPRTWCMTRKPGA

SEQ ID NO: 20665 - protein, 895 aa, Artificial Sequence
  Synthetic Polypeptide
MALPVTALLLPLALLLHAARPLEQKLISEEDLGSGDRPDPAVYQLRDSKSSDKSVCLFTDFDSQTNVSQSKDSDVYITDKCVLDMRSMDFKSNSAVAWSNKSDFACANAFNNSIIPEDTFFPSPESSCDVKLVEKSFETDTNLNFQNLSVIGFRILLLKVAGFNLLMTLRLWSSSSRAKRSGSGVKQTLNFDLLKLAGDVESNPGPTSMALPVTALLLPLALLLHAARPDIVMTQSHKFMSTSVGDRVSIICKASQDVGTAVDWYQQKPGQSPKLLIYWASTRHTGVPDRFTGSGSGTDFTLAITNVQSEDLADYFCQQYNSYPLTFGAGTKLEIKRGGGGSGGGGSGGGGSEVQLVESGGGLVQPGGSLRLSCAASGYTFTEYTIHWVRQAPGKGLEWVANINPNNGGTTYNQKFEDRFTISRDNSKNTLYLQMNSLRAEDTAVYYCARGWNFDYWGQGTLVTVSSTRGKPIPNPLLGLDSTGSGEDLKNVFPPEVAVFEPSEAEISHTQKATLVCLATGFYPDHVELSWWVNGKEVHSGVCTDPQPLKEQPALNDSRYCLSSRLRVSATFWQNPRNHFRCQVQFYGLSENDEWTQDRAKPVTQIVSAEAWGRADCGFTSESYQQGVLSATILYEILLGKATLYAVLVSALVLMAMVKRKDSRGRAKRSGSGATNFSLLKQAGDVEENPGPSRGHMTEYKPTVRLATRDDVPRAVRTLAAAFADYPATRHTVDPDRHIERVTELQELFLTRVGLDIGKVWVADDGAAVAVWTTPESVEAGAVFAEIGPRMAELSGSRLAAQQQMEGLLAPHRPKEPAWFLATVGVSPDHQGKGLGSAVVLPGVEAAERAGVPAFLETSAPRNLPFYERLGFTVTADVEVPEGPRTWCMTRKPGA

SEQ ID NO: 20666 - protein, 849 aa, Artificial Sequence
  Synthetic Polypeptide
MALPVTALLLPLALLLHAARPDIVMTQSHKFMSTSVGDRVSIICKASQDVGTAVDWYQQKPGQSPKLLIYWASTRHTGVPDRFTGSGSGTDFTLAITNVQSEDLADYFCQQYNSYPLTFGAGTKLEIKRLEDLKNVFPPEVAVFEPSEAEISHTQKATLVCLATGFYPDHVELSWWVNGKEVHSGVSTDPQPLKEQPALNDSRYCLSSRLRVSATFWQNPRNHFRCQVQFYGLSENDEWTQDRAKPVTQIVSAEAWGRADCGFTSESYQQGVLSATILYEILLGKATLYAVLVSALVLMAMVKRKDSRGRAKRSGSGATNFSLLKQAGDVEENPGPTSMDWIWRILFLVGAATGAHSFEEVQLVESGGGLVQPGGSLRLSCAASGYTFTEYTIHWVRQAPGKGLEWVANINPNNGGTTYNQKFEDRFTISRDNSKNTLYLQMNSLRAEDTAVYYCARGWNFDYWGQGTLVTVSSTRIQNPDPAVYQLRDSKSSDKSVCLFTDFDSQTNVSQSKDSDVYITDKTVLDMRSMDFKSNSAVAWSNKSDFACANAFNNSIIPEDTFFPSPESSCDVKLVEKSFETDTNLNFQNLSVIGFRILLLKVAGFNLLMTLRLWSSRAKRSGSGVKQTLNFDLLKLAGDVESNPGPSRGHMTEYKPTVRLATRDDVPRAVRTLAAAFADYPATRHTVDPDRHIERVTELQELFLTRVGLDIGKVWVADDGAAVAVWTTPESVEAGAVFAEIGPRMAELSGSRLAAQQQMEGLLAPHRPKEPAWFLATVGVSPDHQGKGLGSAVVLPGVEAAERAGVPAFLETSAPRNLPFYERLGFTVTADVEVPEGPRTWCMTRKPGA

SEQ ID NO: 20667 - protein, 931 aa, Artificial Sequence
  Synthetic Polypeptide
MALPVTALLLPLALLLHAARPDIVMTQSHKFMSTSVGDRVSIICKASQDVGTAVDWYQQKPGQSPKLLIYWASTRHTGVPDRFTGSGSGTDFTLAITNVQSEDLADYFCQQYNSYPLTFGAGTKLEIKRLEDLKNVFPPEVAVFEPSEAEISHTQKATLVCLATGFYPDHVELSWWVNGKEVHSGVSTDPQPLKEQPALNDSRYCLSSRLRVSATFWQNPRNHFRCQVQFYGLSENDEWTQDRAKPVTQIVSAEAWGRADCGFTSESYQQGVLSATILYEILLGKATLYAVLVSALVLMAMVKRKDSRGRAKRSGSGATNFSLLKQAGDVEENPGPTSMDWIWRILFLVGAATGAHSFEEVQLVESGGGLVQPGGSLRLSCAASGYTFTEYTIHWVRQAPGKGLEWVANINPNNGGTTYNQKFEDRFTISRDNSKNTLYLQMNSLRAEDTAVYYCARGWNFDYWGQGTLVTVSSTREQKLISEEDGSGTPFPSLAPPIMLLVDGKQQMVVVCLVLDVAPPGLDSPIWFSAGNGSALDAFTYGPSPATDGTWTNLAHLSLPSEELASWEPLVCHTGPGAEGHSRSTQPMHLSGEASTARTCPQEPLRGTPGGALWLGVLRLLLFKLLLFDLLLTCSCLCDPAGPLPSPATTTRLRALGSHRLHPATETGGREATSSPRPQPRDRRWGDTPPGRKPGSPVRAKRSGSGVKQTLNFDLLKLAGDVESNPGPSRGHMTEYKPTVRLATRDDVPRAVRTLAAAFADYPATRHTVDPDRHIERVTELQELFLTRVGLDIGKVWVADDGAAVAVWTTPESVEAGAVFAEIGPRMAELSGSRLAAQQQMEGLLAPHRPKEPAWFLATVGVSPDHQGKGLGSAVVLPGVEAAERAGVPAFLETSAPRNLPFYERLGFTVTADVEVPEGPRTWCMTRKPGA

SEQ ID NO: 20668 - protein, 949 aa, Artificial Sequence
  Synthetic Polypeptide
MALPVTALLLPLALLLHAARPLEDLKNVFPPEVAVFEPSEAEISHTQKATLVCLATGFYPDHVELSWWVNGKEVHSGVSTDPQPLKEQPALNDSRYCLSSRLRVSATFWQNPRNHFRCQVQFYGLSENDEWTQDRAKPVTQIVSAEAWGRADCGFTSESYQQGVLSATILYEILLGKATLYAVLVSALVLMAMVKRKDSRGRAKRSGSGATNFSLLKQAGDVEENPGPTSMALPVTALLLPLALLLHAARPDIVMTQSHKFMSTSVGDRVSIICKASQDVGTAVDWYQQKPGQSPKLLIYWASTRHTGVPDRFTGSGSGTDFTLAITNVQSEDLADYFCQQYNSYPLTFGAGTKLEIKRGGGGSGGGGSGGGGSEVQLVESGGGLVQPGGSLRLSCAASGYTFTEYTIHWVRQAPGKGLEWVANINPNNGGTTYNQKFEDRFTISRDNSKNTLYLQMNSLRAEDTAVYYCARGWNFDYWGQGTLVTVSSTREQKLISEEDLGSGTPFPSLAPPIMLLVDGKQQMVVVCLVLDVAPPGLDSPIWFSAGNGSALDAFTYGPSPATDGTWTNLAHLSLPSEELASWEPLVCHTGPGAEGHSRSTQPMHLSGEASTARTCPQEPLRGTPGGALWLGVLRLLLFKLLLFDLLLTCSCLCDPAGPLPSPATTTRLRALGSHRLHPATETGGREATSSPRPQPRDRRWGDTPPGRKPGSPVRAKRSGSGVKQTLNFDLLKLAGDVESNPGPSRSRGHMTEYKPTVRLATRDDVPRAVRTLAAAFADYPATRHTVDPDRHIERVTELQELFLTRVGLDIGKVWVADDGAAVAVWTTPESVEAGAVFAEIGPRMAELSGSRLAAQQQMEGLLAPHRPKEPAWFLATVGVSPDHQGKGLGSAVVLPGVEAAERAGVPAFLETSAPRNLPFYERLGFTVTADVEVPEGPRTWCMTRKPGA

SEQ ID NO: 20669 - protein, 886 aa, Artificial Sequence
  Synthetic Polypeptide
MALPVTALLLPLALLLHAARPDIVMTQSHKFMSTSVGDRVSIICKASQDVGTAVDWYQQKPGQSPKLLIYWASTRHTGVPDRFTGSGSGTDFTLAITNVQSEDLADYFCQQYNSYPLTFGAGTKLEIKRLEGKPIPNPLLGLDSTGSGDKQLDADVSPKPTIFLPSIAETKLQKAGTYLCLLEKFFPDVIKIHWQEKKSNTILGSQEGNTMKTNDTYMKFSWLTVPEKSLDKEHRCIVRHENNKNGVDQEIIFPPIKTDVITMDPKDNCSKDANDTLLLQLTNTSAYYMYLLLLLKSVVYFAIITCCLLRRTAFCCNGEKSRAKRSGSGATNFSLLKQAGDVEENPGPTSMDWIWRILFLVGAATGAHSFEEVQLVESGGGLVQPGGSLRLSCAASGYTFTEYTIHWVRQAPGKGLEWVANINPNNGGTTYNQKFEDRFTISRDNSKNTLYLQMNSLRAEDTAVYYCARGWNFDYWGQGTLVTVSSTREQKLISEEDGSGSQPHTKPSVFVMKNGTNVACLVKEFYPKDIRINLVSSKKITEFDPAIVISPSGKYNAVKLGKYEDSNSVTCSVQHDNKTVHSTDFEVKTDSTDHVKPKETENTKQPSKSCHKPKAIVHTEKVNMMSLTVLGLRMLFAKTVAVNFLLTAKLFFLRAKRSGSGVKQTLNFDLLKLAGDVESNPGPSRGHMTEYKPTVRLATRDDVPRAVRTLAAAFADYPATRHTVDPDRHIERVTELQELFLTRVGLDIGKVWVADDGAAVAVWTTPESVEAGAVFAEIGPRMAELSGSRLAAQQQMEGLLAPHRPKEPAWFLATVGVSPDHQGKGLGSAVVLPGVEAAERAGVPAFLETSAPRNLPFYERLGFTVTADVEVPEGPRTWCMTRKPGA

SEQ ID NO: 20670 - protein, 624 aa, Artificial Sequence
  Synthetic Polypeptide
MALPVTALLLPLALLLHAARPDIVMTQSHKFMSTSVGDRVSIICKASQDVGTAVDWYQQKPGQSPKLLIYWASTRHTGVPDRFTGSGSGTDFTLAITNVQSEDLADYFCQQYNSYPLTFGAGTKLEIKRLESQPHTKPSVFVMKNGTNVACLVKEFYPKDIRINLVSSKKITEFDPAIVISPSGKYNAVKLGKYEDSNSVTCSVQHDNKTVHSTDFEVKTDSTDHVKPKETENTKQPSKSCHKPKAIVHTEKVNMMSLTVLGLRMLFAKTVAVNFLLTAKLFFLRAKRSGSGATNFSLLKQAGDVEENPGPTSMDWIWRILFLVGAATGAHSFEEVQLVESGGGLVQPGGSLRLSCAASGYTFTEYTIHWVRQAPGKGLEWVANINPNNGGTTYNQKFEDRFTISRDNSKNTLYLQMNSLRAEDTAVYYCARGWNFDYWGQGTLVTVSSTRDKQLDADVSPKPTIFLPSIAETKLQKAGTYLCLLEKFFPDVIKIHWQEKKSNTILGSQEGNTMKTNDTYMKFSWLTVPEKSLDKEHRCIVRHENNKNGVDQEIIFPPIKTDVITMDPKDNCSKDANDTLLLQLTNTSAYYMYLLLLLKSVVYFAIITCCLLRRTAFCCNGEKS

SEQ ID NO: 20671 - protein, 901 aa, Artificial Sequence
  Synthetic Polypeptide
MALPVTALLLPLALLLHAARPLEGKPIPNPLLGLDSTGSGDKQLDADVSPKPTIFLPSIAETKLQKAGTYLCLLEKFFPDVIKIHWQEKKSNTILGSQEGNTMKTNDTYMKFSWLTVPEKSLDKEHRCIVRHENNKNGVDQEIIFPPIKTDVITMDPKDNCSKDANDTLLLQLTNTSAYYMYLLLLLKSVVYFAIITCCLLRRTAFCCNGEKSRAKRSGSGATNFSLLKQAGDVEENPGPTSMALPVTALLLPLALLLHAARPDIVMTQSHKFMSTSVGDRVSIICKASQDVGTAVDWYQQKPGQSPKLLIYWASTRHTGVPDRFTGSGSGTDFTLAITNVQSEDLADYFCQQYNSYPLTFGAGTKLEIKRGGGGSGGGGSGGGGSEVQLVESGGGLVQPGGSLRLSCAASGYTFTEYTIHWVRQAPGKGLEWVANINPNNGGTTYNQKFEDRFTISRDNSKNTLYLQMNSLRAEDTAVYYCARGWNFDYWGQGTLVTVSSTREQKLISEEDGSGSQPHTKPSVFVMKNGTNVACLVKEFYPKDIRINLVSSKKITEFDPAIVISPSGKYNAVKLGKYEDSNSVTCSVQHDNKTVHSTDFEVKTDSTDHVKPKETENTKQPSKSCHKPKAIVHTEKVNMMSLTVLGLRMLFAKTVAVNFLLTAKLFFLRAKRSGSGVKQTLNFDLLKLAGDVESNPGPSRGHMTEYKPTVRLATRDDVPRAVRTLAAAFADYPATRHTVDPDRHIERVTELQELFLTRVGLDIGKVWVADDGAAVAVWTTPESVEAGAVFAEIGPRMAELSGSRLAAQQQMEGLLAPHRPKEPAWFLATVGVSPDHQGKGLGSAVVLPGVEAAERAGVPAFLETSAPRNLPFYERLGFTVTADVEVPEGPRTWCMTRKPGA

SEQ ID NO: 20672 - protein, 1026 aa, Artificial Sequence
  Synthetic Polypeptide
MALPVTALLLPLALLLHAARPDIVMTQSHKFMSTSVGDRVSIICKASQDVGTAVDWYQQKPGQSPKLLIYWASTRHTGVPDRFTGSGSGTDFTLAITNVQSEDLADYFCQQYNSYPLTFGAGTKLEIKRGQPKANPTVTLFPPSSEELQANKATLVCLISDFYPGAVTVAWKADGSPVKAGVETTKPSKQSNNKYAASSYLSLTPEQWKSHRSYSCQVTHEGSTVEKTVAPTECSGSQSFGLLDPKLCYLLDGILFIYGVILTALFLRVKFSRSADAPAYQQGQNQLYNELNLGRREEYDVLDKRRGRDPEMGGKPQRRKNPQEGLYNELQKDKMAEAYSEIGMKGERRRGKGHDGLYQGLSTATKDTYDALHMQALPPRRAKRSGSGATNFSLLKQAGDVEENPGPTSMDWIWRILFLVGAATGAHSFEEVQLVESGGGLVQPGGSLRLSCAASGYTFTEYTIHWVRQAPGKGLEWVANINPNNGGTTYNQKFEDRFTISRDNSKNTLYLQMNSLRAEDTAVYYCARGWNFDYWGQGTLVTVSSASTKGPSVFPLAPSSKSTSGGTAALGCLVKDYFPEPVTVSWNSGALTSGVHTFPAVLQSSGLYSLSSVVTVPSSSLGTQTYICNVNHKPSNTKVDKRVEPKSCGTQSFGLLDPKLCYLLDGILFIYGVILTALFLRVKFSRSADAPAYQQGQNQLYNELNLGRREEYDVLDKRRGRDPEMGGKPQRRKNPQEGLYNELQKDKMAEAYSEIGMKGERRRGKGHDGLYQGLSTATKDTYDALHMQALPPRRAKRSGSGVKQTLNFDLLKLAGDVESNPGPSRGHMTEYKPTVRLATRDDVPRAVRTLAAAFADYPATRHTVDPDRHIERVTELQELFLTRVGLDIGKVWVADDGAAVAVWTTPESVEAGAVFAEIGPRMAELSGSRLAAQQQMEGLLAPHRPKEPAWFLATVGVSPDHQGKGLGSAVVLPGVEAAERAGVPAFLETSAPRNLPFYERLGFTVTADVEVPEGPRTWCMTRKPGA

SEQ ID NO: 20673 - protein, 812 aa, Artificial Sequence
  Synthetic Polypeptide
MALPVTALLLPLALLLHAARPDIVMTQSHKFMSTSVGDRVSIICKASQDVGTAVDWYQQKPGQSPKLLIYWASTRHTGVPDRFTGSGSGTDFTLAITNVQSEDLADYFCQQYNSYPLTFGAGTKLEIKRLEDLKNVFPPEVAVFEPSEAEISHTQKATLVCLATGFYPDHVELSWWVNGKEVHSGVSTDPQPLKEQPALNDSRYCLSSRLRVSATFWQNPRNHFRCQVQFYGLSENDEWTQDRAKPVTQIVSAEAWGRADCGSQSFGLLDPKLCYLLDGILFIYGVILTALFLRVKFSRSADAPAYQQGQNQLYNELNLGRREEYDVLDKRRGRDPEMGGKPQRRKNPQEGLYNELQKDKMAEAYSEIGMKGERRRGKGHDGLYQGLSTATKDTYDALHMQALPPRRAKRSGSGATNFSLLKQAGDVEENPGPTSMDWIWRILFLVGAATGAHSFEEVQLVESGGGLVQPGGSLRLSCAASGYTFTEYTIHWVRQAPGKGLEWVANINPNNGGTTYNQKFEDRFTISRDNSKNTLYLQMNSLRAEDTAVYYCARGWNFDYWGQGTLVTVSSTRIQNPDPAVYQLRDSKSSDKSVCLFTDFDSQTNVSQSKDSDVYITDKTVLDMRSMDFKSNSAVAWSNKSDFACANAFNNSIIPEDTFFPSPESSCGTQSFGLLDPKLCYLLDGILFIYGVILTALFLRVKFSRSADAPAYQQGQNQLYNELNLGRREEYDVLDKRRGRDPEMGGKPQRRKNPQEGLYNELQKDKMAEAYSEIGMKGERRRGKGHDGLYQGLSTATKDTYDALHMQALPPR

SEQ ID NO: 20674 - protein, 812 aa, Artificial Sequence
  Synthetic Polypeptide
MALPVTALLLPLALLLHAARPDIVMTQSHKFMSTSVGDRVSIICKASQDVGTAVDWYQQKPGQSPKLLIYWASTRHTGVPDRFTGSGSGTDFTLAITNVQSEDLADYFCQQYNSYPLTFGAGTKLEIKRLEDLKNVFPPEVAVFEPSKAEIAHTQKATLVCLATGFYPDHVELSWWVNGKEVHSGVCTDPQPLKEQPALNDSRYCLSSRLRVSATFWQNPRNHFRCQVQFYGLSENDEWTQDRAKPVTQIVSAEAWGRADCGSQSFGLLDPKLCYLLDGILFIYGVILTALFLRVKFSRSADAPAYQQGQNQLYNELNLGRREEYDVLDKRRGRDPEMGGKPQRRKNPQEGLYNELQKDKMAEAYSEIGMKGERRRGKGHDGLYQGLSTATKDTYDALHMQALPPRRAKRSGSGATNFSLLKQAGDVEENPGPTSMDWIWRILFLVGAATGAHSFEEVQLVESGGGLVQPGGSLRLSCAASGYTFTEYTIHWVRQAPGKGLEWVANINPNNGGTTYNQKFEDRFTISRDNSKNTLYLQMNSLRAEDTAVYYCARGWNFDYWGQGTLVTVSSTRIQNPDPAVYQLRDSKSSDKSVCLFTDFDSQTNVSQSKDSDVYITDKCVLDMRSMDFKSNSAVAWSNKSDFACANAFNNSIIPEDTFFPSSDVPCGTQSFGLLDPKLCYLLDGILFIYGVILTALFLRVKFSRSADAPAYQQGQNQLYNELNLGRREEYDVLDKRRGRDPEMGGKPQRRKNPQEGLYNELQKDKMAEAYSEIGMKGERRRGKGHDGLYQGLSTATKDTYDALHMQALPPR

SEQ ID NO: 20675 - protein, 883 aa, Artificial Sequence
  Synthetic Polypeptide
MALPVTALLLPLALLLHAARPDIVMTQSHKFMSTSVGDRVSIICKASQDVGTAVDWYQQKPGQSPKLLIYWASTRHTGVPDRFTGSGSGTDFTLAITNVQSEDLADYFCQQYNSYPLTFGAGTKLEIKRLEGKPIPNPLLGLDSTGSGEDLKNVFPPEVAVFEPSEAEISHTQKATLVCLATGFYPDHVELSWWVNGKEVHSGVSTDPQPLKEQPALNDSRYCLSSRLRVSATFWQNPRNHFRCQVQFYGLSENDEWTQDRAKPVTQIVSAEAWGRADCGSQSFGLLDPKLCYLLDGILFIYGVILTALFLRVKFSRSADAPAYQQGQNQLYNELNLGRREEYDVLDKRRGRDPEMGGKPQRRKNPQEGLYNELQKDKMAEAYSEIGMKGERRRGKGHDGLYQGLSTATKDTYDALHMQALPPRRAKRSGSGATNFSLLKQAGDVEENPGPTSMDWIWRILFLVGAATGAHSFEEVQLVESGGGLVQPGGSLRLSCAASGYTFTEYTIHWVRQAPGKGLEWVANINPNNGGTTYNQKFEDRFTISRDNSKNTLYLQMNSLRAEDTAVYYCARGWNFDYWGQGTLVTVSSTREQKLISEEDGSGIQNPDPAVYQLRDSKSSDKSVCLFTDFDSQTNVSQSKDSDVYITDKTVLDMRSMDFKSNSAVAWSNKSDFACANAFNNSIIPEDTFFPSPESSCGTQSFGLLDPKLCYLLDGILFIYGVILTALFLRSKRSRLLHSDYMNMTPRRPGPTRKHYQPYAPPRDFAAYRSRVKFSRSADAPAYQQGQNQLYNELNLGRREEYDVLDKRRGRDPEMGGKPQRRKNPQEGLYNELQKDKMAEAYSEIGMKGERRRGKGHDGLYQGLSTATKDTYDALHMQALPPR

SEQ ID NO: 20676 - protein, 924 aa, Artificial Sequence
  Synthetic Polypeptide
MALPVTALLLPLALLLHAARPDIVMTQSHKFMSTSVGDRVSIICKASQDVGTAVDWYQQKPGQSPKLLIYWASTRHTGVPDRFTGSGSGTDFTLAITNVQSEDLADYFCQQYNSYPLTFGAGTKLEIKRLEGKPIPNPLLGLDSTGSGEDLKNVFPPEVAVFEPSEAEISHTQKATLVCLATGFYPDHVELSWWVNGKEVHSGVSTDPQPLKEQPALNDSRYCLSSRLRVSATFWQNPRNHFRCQVQFYGLSENDEWTQDRAKPVTQIVSAEAWGRADCGSQSFGLLDPKLCYLLDGILFIYGVILTALFLRSKRSRLLHSDYMNMTPRRPGPTRKHYQPYAPPRDFAAYRSRVKFSRSADAPAYQQGQNQLYNELNLGRREEYDVLDKRRGRDPEMGGKPQRRKNPQEGLYNELQKDKMAEAYSEIGMKGERRRGKGHDGLYQGLSTATKDTYDALHMQALPPRRAKRSGSGATNFSLLKQAGDVEENPGPTSMDWIWRILFLVGAATGAHSFEEVQLVESGGGLVQPGGSLRLSCAASGYTFTEYTIHWVRQAPGKGLEWVANINPNNGGTTYNQKFEDRFTISRDNSKNTLYLQMNSLRAEDTAVYYCARGWNFDYWGQGTLVTVSSTREQKLISEEDGSGIQNPDPAVYQLRDSKSSDKSVCLFTDFDSQTNVSQSKDSDVYITDKTVLDMRSMDFKSNSAVAWSNKSDFACANAFNNSIIPEDTFFPSPESSCGTQSFGLLDPKLCYLLDGILFIYGVILTALFLRSKRSRLLHSDYMNMTPRRPGPTRKHYQPYAPPRDFAAYRSRVKFSRSADAPAYQQGQNQLYNELNLGRREEYDVLDKRRGRDPEMGGKPQRRKNPQEGLYNELQKDKMAEAYSEIGMKGERRRGKGHDGLYQGLSTATKDTYDALHMQALPPR

SEQ ID NO: 20677 - protein, 885 aa, Artificial Sequence
  Synthetic Polypeptide
MALPVTALLLPLALLLHAARPDIVMTQSHKFMSTSVGDRVSIICKASQDVGTAVDWYQQKPGQSPKLLIYWASTRHTGVPDRFTGSGSGTDFTLAITNVQSEDLADYFCQQYNSYPLTFGAGTKLEIKRLEGKPIPNPLLGLDSTGSGEDLKNVFPPEVAVFEPSEAEISHTQKATLVCLATGFYPDHVELSWWVNGKEVHSGVSTDPQPLKEQPALNDSRYCLSSRLRVSATFWQNPRNHFRCQVQFYGLSENDEWTQDRAKPVTQIVSAEAWGRADCGSQSFGLLDPKLCYLLDGILFIYGVILTALFLRVKFSRSADAPAYQQGQNQLYNELNLGRREEYDVLDKRRGRDPEMGGKPQRRKNPQEGLYNELQKDKMAEAYSEIGMKGERRRGKGHDGLYQGLSTATKDTYDALHMQALPPRRAKRSGSGATNFSLLKQAGDVEENPGPTSMDWIWRILFLVGAATGAHSFEEVQLVESGGGLVQPGGSLRLSCAASGYTFTEYTIHWVRQAPGKGLEWVANINPNNGGTTYNQKFEDRFTISRDNSKNTLYLQMNSLRAEDTAVYYCARGWNFDYWGQGTLVTVSSTREQKLISEEDLGSGIQNPDPAVYQLRDSKSSDKSVCLFTDFDSQTNVSQSKDSDVYITDKTVLDMRSMDFKSNSAVAWSNKSDFACANAFNNSIIPEDTFFPSPESSCGTQSFGLLDPKLCYLLDGILFIYGVILTALFLKRGRKKLLYIFKQPFMRPVQTTQEEDGCSCRFPEEEEGGCELRVKFSRSADAPAYQQGQNQLYNELNLGRREEYDVLDKRRGRDPEMGGKPQRRKNPQEGLYNELQKDKMAEAYSEIGMKGERRRGKGHDGLYQGLSTATKDTYDALHMQALPPR

SEQ ID NO: 20678 - protein, 927 aa, Artificial Sequence
  Synthetic Polypeptide
MALPVTALLLPLALLLHAARPDIVMTQSHKFMSTSVGDRVSIICKASQDVGTAVDWYQQKPGQSPKLLIYWASTRHTGVPDRFTGSGSGTDFTLAITNVQSEDLADYFCQQYNSYPLTFGAGTKLEIKRLEGKPIPNPLLGLDSTGSGEDLKNVFPPEVAVFEPSEAEISHTQKATLVCLATGFYPDHVELSWWVNGKEVHSGVSTDPQPLKEQPALNDSRYCLSSRLRVSATFWQNPRNHFRCQVQFYGLSENDEWTQDRAKPVTQIVSAEAWGRADCGSQSFGLLDPKLCYLLDGILFIYGVILTALFLKRGRKKLLYIFKQPFMRPVQTTQEEDGCSCRFPEEEEGGCELRVKFSRSADAPAYQQGQNQLYNELNLGRREEYDVLDKRRGRDPEMGGKPQRRKNPQEGLYNELQKDKMAEAYSEIGMKGERRRGKGHDGLYQGLSTATKDTYDALHMQALPPRRAKRSGSGATNFSLLKQAGDVEENPGPTSMDWIWRILFLVGAATGAHSFEEVQLVESGGGLVQPGGSLRLSCAASGYTFTEYTIHWVRQAPGKGLEWVANINPNNGGTTYNQKFEDRFTISRDNSKNTLYLQMNSLRAEDTAVYYCARGWNFDYWGQGTLVTVSSTREQKLISEEDLGSGIQNPDPAVYQLRDSKSSDKSVCLFTDFDSQTNVSQSKDSDVYITDKTVLDMRSMDFKSNSAVAWSNKSDFACANAFNNSIIPEDTFFPSPESSCGTQSFGLLDPKLCYLLDGILFIYGVILTALFLKRGRKKLLYIFKQPFMRPVQTTQEEDGCSCRFPEEEEGGCELRVKFSRSADAPAYQQGQNQLYNELNLGRREEYDVLDKRRGRDPEMGGKPQRRKNPQEGLYNELQKDKMAEAYSEIGMKGERRRGKGHDGLYQGLSTATKDTYDALHMQALPPR

SEQ ID NO: 20679 - protein, 817 aa, Artificial Sequence
  Synthetic Polypeptide
MALPVTALLLPLALLLHAARPDIVMTQSHKFMSTSVGDRVSIICKASQDVGTAVDWYQQKPGQSPKLLIYWASTRHTGVPDRFTGSGSGTDFTLAITNVQSEDLADYFCQQYNSYPLTFGAGTKLEIKRLEQSFGLLDPKLCYLLDGILFIYGVILTALFLRVKFSRSADAPAYQQGQNQLYNELNLGRREEYDVLDKRRGRDPEMGGKPQRRKNPQEGLYNELQKDKMAEAYSEIGMKGERRRGKGHDGLYQGLSTATKDTYDALHMQALPPRRAKRSGSGATNFSLLKQAGDVEENPGPTSMDWIWRILFLVGAATGAHSFEEVQLVESGGGLVQPGGSLRLSCAASGYTFTEYTIHWVRQAPGKGLEWVANINPNNGGTTYNQKFEDRFTISRDNSKNTLYLQMNSLRAEDTAVYYCARGWNFDYWGQGTLVTVSSTRQSFGLLDPKLCYLLDGILFIYGVILTALFLRVKFSRSADAPAYQQGQNQLYNELNLGRREEYDVLDKRRGRDPEMGGKPQRRKNPQEGLYNELQKDKMAEAYSEIGMKGERRRGKGHDGLYQGLSTATKDTYDALHMQALPPRRAKRSGSGVKQTLNFDLLKLAGDVESNPGPSRGHMTEYKPTVRLATRDDVPRAVRTLAAAFADYPATRHTVDPDRHIERVTELQELFLTRVGLDIGKVWVADDGAAVAVWTTPESVEAGAVFAEIGPRMAELSGSRLAAQQQMEGLLAPHRPKEPAWFLATVGVSPDHQGKGLGSAVVLPGVEAAERAGVPAFLETSAPRNLPFYERLGFTVTADVEVPEGPRTWCMTRKPGA

SEQ ID NO: 20680 - protein, 642 aa, Artificial Sequence
  Synthetic Polypeptide
MALPVTALLLPLALLLHAARPDIVMTQSHKFMSTSVGDRVSIICKASQDVGTAVDWYQQKPGQSPKLLIYWASTRHTGVPDRFTGSGSGTDFTLAITNVQSEDLADYFCQQYNSYPLTFGAGTKLEIKRLEGQPKANPTVTLFPPSSEELQANKATLVCLISDFYPGAVTVAWKADGSPVKAGVETTKPSKQSNNKYAASSYLSLTPEQWKSHRSYSCQVTHEGSTVEKTVAPTECSPIKTDVITMDPKDNCSKDANDTLLLQLTNTSAYYMYLLLLLKSVVYFAIITCCLLRRTAFCCNGEKSRAKRSGSGATNFSLLKQAGDVEENPGPTSMDWIWRILFLVGAATGAHSFEEVQLVESGGGLVQPGGSLRLSCAASGYTFTEYTIHWVRQAPGKGLEWVANINPNNGGTTYNQKFEDRFTISRDNSKNTLYLQMNSLRAEDTAVYYCARGWNFDYWGQGTLVTVSSTRASTKGPSVFPLAPSSKSTSGGTAALGCLVKDYFPEPVTVSWNSGALTSGVHTFPAVLQSSGLYSLSSVVTVPSSSLGTQTYICNVNHKPSNTKVDKRVEPKSCEVKTDSTDHVKPKETENTKQPSKSCHKPKAIVHTEKVNMMSLTVLGLRMLFAKTVAVNFLLTAKLFFL

SEQ ID NO: 20681 - protein, 620 aa, Artificial Sequence
  Synthetic Polypeptide
MALPVTALLLPLALLLHAARPDIVMTQSHKFMSTSVGDRVSIICKASQDVGTAVDWYQQKPGQSPKLLIYWASTRHTGVPDRFTGSGSGTDFTLAITNVQSEDLADYFCQQYNSYPLTFGAGTKLEIKRLEGQPKANPTVTLFPPSSEELQANKATLVCLISDFYPGAVTVAWKADGSPVKAGVETTKPSKQSNNKYAASSYLSLTPEQWKSHRSYSCQVTHEGSTVEKTVAPTECSGRADCGITSASYHQGVLSATILYEILLGKATLYAVLVSALVLMAMVKRKDSRGRAKRSGSGATNFSLLKQAGDVEENPGPTSMDWIWRILFLVGAATGAHSFEEVQLVESGGGLVQPGGSLRLSCAASGYTFTEYTIHWVRQAPGKGLEWVANINPNNGGTTYNQKFEDRFTISRDNSKNTLYLQMNSLRAEDTAVYYCARGWNFDYWGQGTLVTVSSTRASTKGPSVFPLAPSSKSTSGGTAALGCLVKDYFPEPVTVSWNSGALTSGVHTFPAVLQSSGLYSLSSVVTVPSSSLGTQTYICNVNHKPSNTKVDKRVEPKSCIPEDTFFPSSDVPCDVKLVEKSFETDTNLNFQNLSVIGFRILLLKVAGFNLLMTLRLWSS

SEQ ID NO: 20682 - protein, 620 aa, Artificial Sequence
  Synthetic Polypeptide
MALPVTALLLPLALLLHAARPDIVMTQSHKFMSTSVGDRVSIICKASQDVGTAVDWYQQKPGQSPKLLIYWASTRHTGVPDRFTGSGSGTDFTLAITNVQSEDLADYFCQQYNSYPLTFGAGTKLEIKRLEGQPKANPTVTLFPPSSEELQANKATLVCLISDFYPGAVTVAWKADGSPVKAGVETTKPSKQSNNKYAASSYLSLTPEQWKSHRSYSCQVTHEGSTVEKTVAPTECSGRADCGFTSESYQQGVLSATILYEILLGKATLYAVLVSALVLMAMVKRKDSRGRAKRSGSGATNFSLLKQAGDVEENPGPTSMDWIWRILFLVGAATGAHSFEEVQLVESGGGLVQPGGSLRLSCAASGYTFTEYTIHWVRQAPGKGLEWVANINPNNGGTTYNQKFEDRFTISRDNSKNTLYLQMNSLRAEDTAVYYCARGWNFDYWGQGTLVTVSSTRASTKGPSVFPLAPSSKSTSGGTAALGCLVKDYFPEPVTVSWNSGALTSGVHTFPAVLQSSGLYSLSSVVTVPSSSLGTQTYICNVNHKPSNTKVDKRVEPKSCIPEDTFFPSPESSCDVKLVEKSFETDTNLNFQNLSVIGFRILLLKVAGFNLLMTLRLWSS

SEQ ID NO: 20683 - protein, 446 aa, Artificial Sequence
  Synthetic Polypeptide
MALPVTALLLPLALLLHAARPDIVMTQSHKFMSTSVGDRVSIICKASQDVGTAVDWYQQKPGQSPKLLIYWASTRHTGVPDRFTGSGSGTDFTLAITNVQSEDLADYFCQQYNSYPLTFGAGTKLEIKRGGGGSGGGGSGGGGSEVQLVESGGGLVQPGGSLRLSCAASGYTFTEYTIHWVRQAPGKGLEWVANINPNNGGTTYNQKFEDRFTISRDNSKNTLYLQMNSLRAEDTAVYYCARGWNFDYWGQGTLVTVSSTRDGNEEMGGITQTPYKVSISGTTVILTCPQYPGSEILWQHNDKNIGGDEDDKNIGSDEDHLSLKEFSELEQSGYYVCYPRGSKPEDANFYLYLRARVCENCMEMDVMSVATIVIVDICITGGLLLLVYYWSKNRKAKAKPVTRGAGAGGRQRGQNKERPPPVPNPDYEPIRKGQRDLYSGLNQRRI

SEQ ID NO: 20684 - protein, 411 aa, Artificial Sequence
  Synthetic Polypeptide
MALPVTALLLPLALLLHAARPDIVMTQSHKFMSTSVGDRVSIICKASQDVGTAVDWYQQKPGQSPKLLIYWASTRHTGVPDRFTGSGSGTDFTLAITNVQSEDLADYFCQQYNSYPLTFGAGTKLEIKRGGGGSGGGGSGGGGSEVQLVESGGGLVQPGGSLRLSCAASGYTFTEYTIHWVRQAPGKGLEWVANINPNNGGTTYNQKFEDRFTISRDNSKNTLYLQMNSLRAEDTAVYYCARGWNFDYWGQGTLVTVSSTRFKIPIEELEDRVFVNCNTSITWVEGTVGTLLSDITRLDLGKRILDPRGIYRCNGTDIYKDKESTVQVHYRMCQSCVELDPATVAGIIVTDVIATLLLALGVFCFAGHETGRLSGAADTQALLRNDQVYQPLRDRDDAQYSHLGGNWARNK

SEQ ID NO: 20685 - protein, 421 aa, Artificial Sequence
  Synthetic Polypeptide
MALPVTALLLPLALLLHAARPDIVMTQSHKFMSTSVGDRVSIICKASQDVGTAVDWYQQKPGQSPKLLIYWASTRHTGVPDRFTGSGSGTDFTLAITNVQSEDLADYFCQQYNSYPLTFGAGTKLEIKRGGGGSGGGGSGGGGSEVQLVESGGGLVQPGGSLRLSCAASGYTFTEYTIHWVRQAPGKGLEWVANINPNNGGTTYNQKFEDRFTISRDNSKNTLYLQMNSLRAEDTAVYYCARGWNFDYWGQGTLVTVSSTRQSIKGNHLVKVYDYQEDGSVLLTCDAEAKNITWFKDGKMIGFLTEDKKKWNLGSNAKDPRGMYQCKGSQNKSKPLQVYYRMCQNCIELNAATISGFLFAEIVSIFVLAVGVYFIAGQDGVRQSRASDKQTLLPNDQLYQPLKDREDDQYSHLQGNQLRRN

SEQ ID NO: 20686 - protein, 404 aa, Artificial Sequence
  Synthetic Polypeptide
MALPVTALLLPLALLLHAARPDIVMTQSHKFMSTSVGDRVSIICKASQDVGTAVDWYQQKPGQSPKLLIYWASTRHTGVPDRFTGSGSGTDFTLAITNVQSEDLADYFCQQYNSYPLTFGAGTKLEIKRGGGGSGGGGSGGGGSEVQLVESGGGLVQPGGSLRLSCAASGYTFTEYTIHWVRQAPGKGLEWVANINPNNGGTTYNQKFEDRFTISRDNSKNTLYLQMNSLRAEDTAVYYCARGWNFDYWGQGTLVTVSSTRQSFGLLDPKLCYLLDGILFIYGVILTALFLRVKFSRSADAPAYQQGQNQLYNELNLGRREEYDVLDKRRGRDPEMGGKPQRRKNPQEGLYNELQKDKMAEAYSEIGMKGERRRGKGHDGLYQGLSTATKDTYDALHMQALPPR

SEQ ID NO: 20687 - protein, 446 aa, Artificial Sequence
  Synthetic Polypeptide
MALPVTALLLPLALLLHAARPEVQLVESGGGLVQPGGSLRLSCAASGYTFTEYTIHWVRQAPGKGLEWVANINPNNGGTTYNQKFEDRFTISRDNSKNTLYLQMNSLRAEDTAVYYCARGWNFDYWGQGTLVTVSSGGGGSGGGGSGGGGSDIVMTQSHKFMSTSVGDRVSIICKASQDVGTAVDWYQQKPGQSPKLLIYWASTRHTGVPDRFTGSGSGTDFTLAITNVQSEDLADYFCQQYNSYPLTFGAGTKLEIKRTRDGNEEMGGITQTPYKVSISGTTVILTCPQYPGSEILWQHNDKNIGGDEDDKNIGSDEDHLSLKEFSELEQSGYYVCYPRGSKPEDANFYLYLRARVCENCMEMDVMSVATIVIVDICITGGLLLLVYYWSKNRKAKAKPVTRGAGAGGRQRGQNKERPPPVPNPDYEPIRKGQRDLYSGLNQRRI

SEQ ID NO: 20688 - protein, 411 aa, Artificial Sequence
  Synthetic Polypeptide
MALPVTALLLPLALLLHAARPEVQLVESGGGLVQPGGSLRLSCAASGYTFTEYTIHWVRQAPGKGLEWVANINPNNGGTTYNQKFEDRFTISRDNSKNTLYLQMNSLRAEDTAVYYCARGWNFDYWGQGTLVTVSSGGGGSGGGGSGGGGSDIVMTQSHKFMSTSVGDRVSIICKASQDVGTAVDWYQQKPGQSPKLLIYWASTRHTGVPDRFTGSGSGTDFTLAITNVQSEDLADYFCQQYNSYPLTFGAGTKLEIKRTRFKIPIEELEDRVFVNCNTSITWVEGTVGTLLSDITRLDLGKRILDPRGIYRCNGTDIYKDKESTVQVHYRMCQSCVELDPATVAGIIVTDVIATLLLALGVFCFAGHETGRLSGAADTQALLRNDQVYQPLRDRDDAQYSHLGGNWARNK

SEQ ID NO: 20689 - protein, 421 aa, Artificial Sequence
  Synthetic Polypeptide
MALPVTALLLPLALLLHAARPEVQLVESGGGLVQPGGSLRLSCAASGYTFTEYTIHWVRQAPGKGLEWVANINPNNGGTTYNQKFEDRFTISRDNSKNTLYLQMNSLRAEDTAVYYCARGWNFDYWGQGTLVTVSSGGGGSGGGGSGGGGSDIVMTQSHKFMSTSVGDRVSIICKASQDVGTAVDWYQQKPGQSPKLLIYWASTRHTGVPDRFTGSGSGTDFTLAITNVQSEDLADYFCQQYNSYPLTFGAGTKLEIKRTRQSIKGNHLVKVYDYQEDGSVLLTCDAEAKNITWFKDGKMIGFLTEDKKKWNLGSNAKDPRGMYQCKGSQNKSKPLQVYYRMCQNCIELNAATISGFLFAEIVSIFVLAVGVYFIAGQDGVRQSRASDKQTLLPNDQLYQPLKDREDDQYSHLQGNQLRRN

SEQ ID NO: 20690 - protein, 404 aa, Artificial Sequence
  Synthetic Polypeptide
MALPVTALLLPLALLLHAARPEVQLVESGGGLVQPGGSLRLSCAASGYTFTEYTIHWVRQAPGKGLEWVANINPNNGGTTYNQKFEDRFTISRDNSKNTLYLQMNSLRAEDTAVYYCARGWNFDYWGQGTLVTVSSGGGGSGGGGSGGGGSDIVMTQSHKFMSTSVGDRVSIICKASQDVGTAVDWYQQKPGQSPKLLIYWASTRHTGVPDRFTGSGSGTDFTLAITNVQSEDLADYFCQQYNSYPLTFGAGTKLEIKRTRQSFGLLDPKLCYLLDGILFIYGVILTALFLRVKFSRSADAPAYQQGQNQLYNELNLGRREEYDVLDKRRGRDPEMGGKPQRRKNPQEGLYNELQKDKMAEAYSEIGMKGERRRGKGHDGLYQGLSTATKDTYDALHMQALPPR

SEQ ID NO: 20691 - protein, 637 aa, Artificial Sequence
  Synthetic Polypeptide
MALPVTALLLPLALLLHAARPDIVMTQSHKFMSTSVGDRVSIICKASQDVGTAVDWYQQKPGQSPKLLIYWASTRHTGVPDRFTGSGSGTDFTLAITNVQSEDLADYFCQQYNSYPLTFGAGTKLEIKRGGGGSGGGGSGGGGSEVQLVESGGGLVQPGGSLRLSCAASGYTFTEYTIHWVRQAPGKGLEWVANINPNNGGTTYNQKFEDRFTISRDNSKNTLYLQMNSLRAEDTAVYYCARGWNFDYWGQGTLVTVSSTRGSGIQNPDPAVYQLRDSKSSDKSVCLFTDFDSQTNVSQSKDSDVYITDKTVLDMRSMDFKSNSAVAWSNKSDFACANAFNNSIIPEDTFFPSPESSCDVKLVEKSFETDTNLNFQNLSVIGFRILLLKVAGFNLLMTLRLWSSRAKRSGSGVKQTLNFDLLKLAGDVESNPGPSRGHMTEYKPTVRLATRDDVPRAVRTLAAAFADYPATRHTVDPDRHIERVTELQELFLTRVGLDIGKVWVADDGAAVAVWTTPESVEAGAVFAEIGPRMAELSGSRLAAQQQMEGLLAPHRPKEPAWFLATVGVSPDHQGKGLGSAVVLPGVEAAERAGVPAFLETSAPRNLPFYERLGFTVTADVEVPEGPRTWCMTRKPGA

SEQ ID NO: 20692 - protein, 669 aa, Artificial Sequence
  Synthetic Polypeptide
MALPVTALLLPLALLLHAARPDIVMTQSHKFMSTSVGDRVSIICKASQDVGTAVDWYQQKPGQSPKLLIYWASTRHTGVPDRFTGSGSGTDFTLAITNVQSEDLADYFCQQYNSYPLTFGAGTKLEIKRGGGGSGGGGSGGGGSEVQLVESGGGLVQPGGSLRLSCAASGYTFTEYTIHWVRQAPGKGLEWVANINPNNGGTTYNQKFEDRFTISRDNSKNTLYLQMNSLRAEDTAVYYCARGWNFDYWGQGTLVTVSSLEDLKNVFPPEVAVFEPSEAEISHTQKATLVCLATGFYPDHVELSWWVNGKEVHSGVSTDPQPLKEQPALNDSRYCLSSRLRVSATFWQNPRNHFRCQVQFYGLSENDEWTQDRAKPVTQIVSAEAWGRADCGFTSESYQQGVLSATILYEILLGKATLYAVLVSALVLMAMVKRKDSRGRAKRSGSGATNFSLLKQAGDVEENPGPTRGHMTEYKPTVRLATRDDVPRAVRTLAAAFADYPATRHTVDPDRHIERVTELQELFLTRVGLDIGKVWVADDGAAVAVWTTPESVEAGAVFAEIGPRMAELSGSRLAAQQQMEGLLAPHRPKEPAWFLATVGVSPDHQGKGLGSAVVLPGVEAAERAGVPAFLETSAPRNLPFYERLGFTVTADVEVPEGPRTWCMTRKPGA

SEQ ID NO: 20693 - protein, 719 aa, Artificial Sequence
  Synthetic Polypeptide
MALPVTALLLPLALLLHAARPDIVMTQSHKFMSTSVGDRVSIICKASQDVGTAVDWYQQKPGQSPKLLIYWASTRHTGVPDRFTGSGSGTDFTLAITNVQSEDLADYFCQQYNSYPLTFGAGTKLEIKRGGGGSGGGGSGGGGSEVQLVESGGGLVQPGGSLRLSCAASGYTFTEYTIHWVRQAPGKGLEWVANINPNNGGTTYNQKFEDRFTISRDNSKNTLYLQMNSLRAEDTAVYYCARGWNFDYWGQGTLVTVSSTREQKLISEEDLGSGTPFPSLAPPIMLLVDGKQQMVVVCLVLDVAPPGLDSPIWFSAGNGSALDAFTYGPSPATDGTWTNLAHLSLPSEELASWEPLVCHTGPGAEGHSRSTQPMHLSGEASTARTCPQEPLRGTPGGALWLGVLRLLLFKLLLFDLLLTCSCLCDPAGPLPSPATTTRLRALGSHRLHPATETGGREATSSPRPQPRDRRWGDTPPGRKPGSPVRAKRSGSGVKQTLNFDLLKLAGDVESNPGPSRSRGHMTEYKPTVRLATRDDVPRAVRTLAAAFADYPATRHTVDPDRHIERVTELQELFLTRVGLDIGKVWVADDGAAVAVWTTPESVEAGAVFAEIGPRMAELSGSRLAAQQQMEGLLAPHRPKEPAWFLATVGVSPDHQGKGLGSAVVLPGVEAAERAGVPAFLETSAPRNLPFYERLGFTVTADVEVPEGPRTWCMTRKPGA

SEQ ID NO: 20694 - protein, 539 aa, Artificial Sequence; identical to SEQ ID NO: 20418
  Synthetic Polypeptide

SEQ ID NO: 20695 - protein, 309 aa, Artificial Sequence; identical to SEQ ID NO: 20419
  Synthetic Polypeptide

SEQ ID NO: 20696 - protein, 444 aa, Artificial Sequence; identical to SEQ ID NO: 20489
  Synthetic Polypeptide

SEQ ID NO: 20697 - protein, 278 aa, Artificial Sequence; identical to SEQ ID NO: 20490
  Synthetic Polypeptide

SEQ ID NO: 20698 - protein, 557 aa, Artificial Sequence; identical to SEQ ID NO: 20422
  Synthetic Polypeptide

SEQ ID NO: 20699 - protein, 327 aa, Artificial Sequence; identical to SEQ ID NO: 20423
  Synthetic Polypeptide

SEQ ID NO: 20700 - protein, 456 aa, Artificial Sequence; identical to SEQ ID NO: 20493
  Synthetic Polypeptide

SEQ ID NO: 20701 - protein, 290 aa, Artificial Sequence; identical to SEQ ID NO: 20494
  Synthetic Polypeptide

SEQ ID NO: 20702 - protein, 637 aa, Artificial Sequence
  Synthetic Polypeptide
MALPVTALLLPLALLLHAARPDIVMTQSHKFMSTSVGDRVSIICKASQDVGTAVDWYQQKPGQSPKLLIYWASTRHTGVPDRFTGSGSGTDFTLAITNVQSEDLADYFCQQYNSYPLTFGAGTKLEIKRGGGGSGGGGSGGGGSEVQLVESGGGLVQPGGSLRLSCAASGYTFTEYTIHWVRQAPGKGLEWVANINPNNGGTTYNQKFEDRFTISRDNSKNTLYLQMNSLRAEDTAVYYCARGWNFDYWGQGTLVTVSSTRGSGIQNPDPAVYQLRDSKSSDKSVCLFTDFDSQTNVSQSKDSDVYITDKTVLDMRSMDFKSNSAVAWSNKSDFACANAFNNSIIPEDTFFPSSDVPCDVKLVEKSFETDTNLNFQNLSVIGFRILLLKVAGFNLLMTLRLWSSRAKRSGSGVKQTLNFDLLKLAGDVESNPGPSRGHMTEYKPTVRLATRDDVPRAVRTLAAAFADYPATRHTVDPDRHIERVTELQELFLTRVGLDIGKVWVADDGAAVAVWTTPESVEAGAVFAEIGPRMAELSGSRLAAQQQMEGLLAPHRPKEPAWFLATVGVSPDHQGKGLGSAVVLPGVEAAERAGVPAFLETSAPRNLPFYERLGFTVTADVEVPEGPRTWCMTRKPGA

SEQ ID NO: 20703 - protein, 669 aa, Artificial Sequence
  Synthetic Polypeptide
MALPVTALLLPLALLLHAARPDIVMTQSHKFMSTSVGDRVSIICKASQDVGTAVDWYQQKPGQSPKLLIYWASTRHTGVPDRFTGSGSGTDFTLAITNVQSEDLADYFCQQYNSYPLTFGAGTKLEIKRGGGGSGGGGSGGGGSEVQLVESGGGLVQPGGSLRLSCAASGYTFTEYTIHWVRQAPGKGLEWVANINPNNGGTTYNQKFEDRFTISRDNSKNTLYLQMNSLRAEDTAVYYCARGWNFDYWGQGTLVTVSSLEDLKNVFPPEVAVFEPSKAEIAHTQKATLVCLATGFYPDHVELSWWVNGKEVHSGVSTDPQPLKEQPALNDSRYCLSSRLRVSATFWQNPRNHFRCQVQFYGLSENDEWTQDRAKPVTQIVSAEAWGRADCGITSASYHQGVLSATILYEILLGKATLYAVLVSALVLMAMVKRKDSRGRAKRSGSGATNFSLLKQAGDVEENPGPTRGHMTEYKPTVRLATRDDVPRAVRTLAAAFADYPATRHTVDPDRHIERVTELQELFLTRVGLDIGKVWVADDGAAVAVWTTPESVEAGAVFAEIGPRMAELSGSRLAAQQQMEGLLAPHRPKEPAWFLATVGVSPDHQGKGLGSAVVLPGVEAAERAGVPAFLETSAPRNLPFYERLGFTVTADVEVPEGPRTWCMTRKPGA

SEQ ID NO: 20704 - protein, 692 aa, Artificial Sequence
  Synthetic Polypeptide
MALPVTALLLPLALLLHAARPDIVMTQSHKFMSTSVGDRVSIICKASQDVGTAVDWYQQKPGQSPKLLIYWASTRHTGVPDRFTGSGSGTDFTLAITNVQSEDLADYFCQQYNSYPLTFGAGTKLEIKRGGGGSGGGGSGGGGSEVQLVESGGGLVQPGGSLRLSCAASGYTFTEYTIHWVRQAPGKGLEWVANINPNNGGTTYNQKFEDRFTISRDNSKNTLYLQMNSLRAEDTAVYYCARGWNFDYWGQGTLVTVSSTRGSGGGGSGGGGSGDGNEEMGGITQTPYKVSISGTTVILTCPQYPGSEILWQHNDKNIGGDEDDKNIGSDEDHLSLKEFSELEQSGYYVCYPRGSKPEDANFYLYLRARVCENCMEMDVMSVATIVIVDICITGGLLLLVYYWSKNRKAKAKPVTRGAGAGGRQRGQNKERPPPVPNPDYEPIRKGQRDLYSGLNQRRIRAKRSGSGVKQTLNFDLLKLAGDVESNPGPSRGHMTEYKPTVRLATRDDVPRAVRTLAAAFADYPATRHTVDPDRHIERVTELQELFLTRVGLDIGKVWVADDGAAVAVWTTPESVEAGAVFAEIGPRMAELSGSRLAAQQQMEGLLAPHRPKEPAWFLATVGVSPDHQGKGLGSAVVLPGVEAAERAGVPAFLETSAPRNLPFYERLGFTVTADVEVPEGPRTWCMTRKPGA

SEQ ID NO: 20705 - protein, 657 aa, Artificial Sequence
  Synthetic Polypeptide
MALPVTALLLPLALLLHAARPDIVMTQSHKFMSTSVGDRVSIICKASQDVGTAVDWYQQKPGQSPKLLIYWASTRHTGVPDRFTGSGSGTDFTLAITNVQSEDLADYFCQQYNSYPLTFGAGTKLEIKRGGGGSGGGGSGGGGSEVQLVESGGGLVQPGGSLRLSCAASGYTFTEYTIHWVRQAPGKGLEWVANINPNNGGTTYNQKFEDRFTISRDNSKNTLYLQMNSLRAEDTAVYYCARGWNFDYWGQGTLVTVSSTRGSGGGGSGGGGSGFKIPIEELEDRVFVNCNTSITWVEGTVGTLLSDITRLDLGKRILDPRGIYRCNGTDIYKDKESTVQVHYRMCQSCVELDPATVAGIIVTDVIATLLLALGVFCFAGHETGRLSGAADTQALLRNDQVYQPLRDRDDAQYSHLGGNWARNKRAKRSGSGVKQTLNFDLLKLAGDVESNPGPSRGHMTEYKPTVRLATRDDVPRAVRTLAAAFADYPATRHTVDPDRHIERVTELQELFLTRVGLDIGKVWVADDGAAVAVWTTPESVEAGAVFAEIGPRMAELSGSRLAAQQQMEGLLAPHRPKEPAWFLATVGVSPDHQGKGLGSAVVLPGVEAAERAGVPAFLETSAPRNLPFYERLGFTVTADVEVPEGPRTWCMTRKPGA

SEQ ID NO: 20706 - protein, 667 aa, Artificial Sequence
  Synthetic Polypeptide
MALPVTALLLPLALLLHAARPDIVMTQSHKFMSTSVGDRVSIICKASQDVGTAVDWYQQKPGQSPKLLIYWASTRHTGVPDRFTGSGSGTDFTLAITNVQSEDLADYFCQQYNSYPLTFGAGTKLEIKRGGGGSGGGGSGGGGSEVQLVESGGGLVQPGGSLRLSCAASGYTFTEYTIHWVRQAPGKGLEWVANINPNNGGTTYNQKFEDRFTISRDNSKNTLYLQMNSLRAEDTAVYYCARGWNFDYWGQGTLVTVSSTRGSGGGGSGGGGSGQSIKGNHLVKVYDYQEDGSVLLTCDAEAKNITWFKDGKMIGFLTEDKKKWNLGSNAKDPRGMYQCKGSQNKSKPLQVYYRMCQNCIELNAATISGFLFAEIVSIFVLAVGVYFIAGQDGVRQSRASDKQTLLPNDQLYQPLKDREDDQYSHLQGNQLRRNRAKRSGSGVKQTLNFDLLKLAGDVESNPGPSRGHMTEYKPTVRLATRDDVPRAVRTLAAAFADYPATRHTVDPDRHIERVTELQELFLTRVGLDIGKVWVADDGAAVAVWTTPESVEAGAVFAEIGPRMAELSGSRLAAQQQMEGLLAPHRPKEPAWFLATVGVSPDHQGKGLGSAVVLPGVEAAERAGVPAFLETSAPRNLPFYERLGFTVTADVEVPEGPRTWCMTRKPGA

SEQ ID NO: 20707 - protein, 650 aa, Artificial Sequence
  Synthetic Polypeptide
MALPVTALLLPLALLLHAARPDIVMTQSHKFMSTSVGDRVSIICKASQDVGTAVDWYQQKPGQSPKLLIYWASTRHTGVPDRFTGSGSGTDFTLAITNVQSEDLADYFCQQYNSYPLTFGAGTKLEIKRGGGGSGGGGSGGGGSEVQLVESGGGLVQPGGSLRLSCAASGYTFTEYTIHWVRQAPGKGLEWVANINPNNGGTTYNQKFEDRFTISRDNSKNTLYLQMNSLRAEDTAVYYCARGWNFDYWGQGTLVTVSSTRGSGGGGSGGGGSGQSFGLLDPKLCYLLDGILFIYGVILTALFLRVKFSRSADAPAYQQGQNQLYNELNLGRREEYDVLDKRRGRDPEMGGKPQRRKNPQEGLYNELQKDKMAEAYSEIGMKGERRRGKGHDGLYQGLSTATKDTYDALHMQALPPRRAKRSGSGVKQTLNFDLLKLAGDVESNPGPSRGHMTEYKPTVRLATRDDVPRAVRTLAAAFADYPATRHTVDPDRHIERVTELQELFLTRVGLDIGKVWVADDGAAVAVWTTPESVEAGAVFAEIGPRMAELSGSRLAAQQQMEGLLAPHRPKEPAWFLATVGVSPDHQGKGLGSAVVLPGVEAAERAGVPAFLETSAPRNLPFYERLGFTVTADVEVPEGPRTWCMTRKPGA

SEQ ID NO: 20708 - protein, 751 aa, Artificial Sequence
  Synthetic Polypeptide
MALPVTALLLPLALLLHAARPEVQLVESGGGLVQPGGSLRLSCAASGFSFSDFWMSWVRQAPGKGLEWVATISQAGSEKDYVDSVKGRFTISRDNAKKSLYLQMNSLRAEDTAVYYCASGVYSFDYRGQGTLVTVSSGTGGGGSGGGGSGGGGSEFDIVMTQSHKFMSTSVGDRVSIICKASQDVGTAVDWYQQKPGQSPKLLIYWASTRHTGVPDRFTGSGSGTDFTLAITNVQSEDLADYFCQQYNSYPLTFGAGTKLEIKRLEDLKNVFPPEVAVFEPSEAEISHTQKATLVCLATGFYPDHVELSWWVNGKEVHSGVCTDPQPLKEQPALNDSRYCLSSRLRVSATFWQNPRNHFRCQVQFYGLSENDEWTQDRAKPVTQIVSAEAWGRADCGFTSESYQQGVLSATILYEILLGKATLYAVLVSALVLMAMVKRKDSRGRAKRSGSGATNFSLLKQAGDVEENPGPTSMDWIWRILFLVGAATGAHSFEEVQLVESGGGLVQPGGSLRLSCAASGYTFTEYTIHWVRQAPGKGLEWVANINPNNGGTTYNQKFEDRFTISRDNSKNTLYLQMNSLRAEDTAVYYCARGWNFDYWGQGTLVTVSSTRIQNPDPAVYQLRDSKSSDKSVCLFTDFDSQTNVSQSKDSDVYITDKCVLDMRSMDFKSNSAVAWSNKSDFACANAFNNSIIPEDTFFPSPESSCDVKLVEKSFETDTNLNFQNLSVIGFRILLLKVAGFNLLMTLRLWSS

SEQ ID NO: 20709 - protein, 755 aa, Artificial Sequence
  Synthetic Polypeptide
MALPVTALLLPLALLLHAARPEVQLVESGGGLVQPGGSLRLSCAASGFSFSDFWMSWVRQAPGKGLEWVATISQAGSEKDYVDSVKGRFTISRDNAKKSLYLQMNSLRAEDTAVYYCASGVYSFDYRGQGTLVTVSSGTGGGGSGGGGSGGGGSEFDIVMTQSHKFMSTSVGDRVSIICKASQDVGTAVDWYQQKPGQSPKLLIYWASTRHTGVPDRFTGSGSGTDFTLAITNVQSEDLADYFCQQYNSYPLTFGAGTKLEIKRLEIQNPDPAVYQLRDSKSSDKSVCLFTDFDSQTNVSQSKDSDVYITDKCVLDMRSMDFKSNSAVAWSNKSDFACANAFNNSIIPEDTFFPSPESSCDVKLVEKSFETDTNLNFQNLSVIGFRILLLKVAGFNLLMTLRLWSSRAKRSGSGVKQTLNFDLLKLAGDVESNPGPTSMDWIWRILFLVGAATGAHSFEEVQLVESGGGLVQPGGSLRLSCAASGYTFTEYTIHWVRQAPGKGLEWVANINPNNGGTTYNQKFEDRFTISRDNSKNTLYLQMNSLRAEDTAVYYCARGWNFDYWGQGTLVTVSSTREDLKNVFPPEVAVFEPSEAEISHTQKATLVCLATGFYPDHVELSWWVNGKEVHSGVCTDPQPLKEQPALNDSRYCLSSRLRVSATFWQNPRNHFRCQVQFYGLSENDEWTQDRAKPVTQIVSAEAWGRADCGFTSESYQQGVLSATILYEILLGKATLYAVLVSALVLMAMVKRKDSRG

SEQ ID NO: 20710 - protein, 947 aa, Artificial Sequence
  Synthetic Polypeptide
MALPVTALLLPLALLLHAARPEVQLVESGGGLVQPGGSLRLSCAASGFSFSDFWMSWVRQAPGKGLEWVATISQAGSEKDYVDSVKGRFTISRDNAKKSLYLQMNSLRAEDTAVYYCASGVYSFDYRGQGTLVTVSSGTGGGGSGGGGSGGGGSEFDIVMTQSHKFMSTSVGDRVSIICKASQDVGTAVDWYQQKPGQSPKLLIYWASTRHTGVPDRFTGSGSGTDFTLAITNVQSEDLADYFCQQYNSYPLTFGAGTKLEIKRLEDLKNVFPPEVAVFEPSEAEISHTQKATLVCLATGFYPDHVELSWWVNGKEVHSGVSTDPQPLKEQPALNDSRYCLSSRLRVSATFWQNPRNHFRCQVQFYGLSENDEWTQDRAKPVTQIVSAEAWGRADCGSQSFGLLDPKLCYLLDGILFIYGVILTALFLRVKFSRSADAPAYQQGQNQLYNELNLGRREEYDVLDKRRGRDPEMGGKPQRRKNPQEGLYNELQKDKMAEAYSEIGMKGERRRGKGHDGLYQGLSTATKDTYDALHMQALPPRRAKRSGSGATNFSLLKQAGDVEENPGPTSMDWIWRILFLVGAATGAHSFEEVQLVESGGGLVQPGGSLRLSCAASGYTFTEYTIHWVRQAPGKGLEWVANINPNNGGTTYNQKFEDRFTISRDNSKNTLYLQMNSLRAEDTAVYYCARGWNFDYWGQGTLVTVSSTRIQNPDPAVYQLRDSKSSDKSVCLFTDFDSQTNVSQSKDSDVYITDKTVLDMRSMDFKSNSAVAWSNKSDFACANAFNNSIIPEDTFFPSPESSCGTQSFGLLDPKLCYLLDGILFIYGVILTALFLRVKFSRSADAPAYQQGQNQLYNELNLGRREEYDVLDKRRGRDPEMGGKPQRRKNPQEGLYNELQKDKMAEAYSEIGMKGERRRGKGHDGLYQGLSTATKDTYDALHMQALPPR

SEQ ID NO: 20711 - protein, 777 aa, Artificial Sequence
  Synthetic Polypeptide
MALPVTALLLPLALLLHAARPEVQLVESGGGLVQPGGSLRLSCAASGFSFSDFWMSWVRQAPGKGLEWVATISQAGSEKDYVDSVKGRFTISRDNAKKSLYLQMNSLRAEDTAVYYCASGVYSFDYRGQGTLVTVSSGTGGGGSGGGGSGGGGSEFDIVMTQSHKFMSTSVGDRVSIICKASQDVGTAVDWYQQKPGQSPKLLIYWASTRHTGVPDRFTGSGSGTDFTLAITNVQSEDLADYFCQQYNSYPLTFGAGTKLEIKRLEGQPKANPTVTLFPPSSEELQANKATLVCLISDFYPGAVTVAWKADGSPVKAGVETTKPSKQSNNKYAASSYLSLTPEQWKSHRSYSCQVTHEGSTVEKTVAPTECSPIKTDVITMDPKDNCSKDANDTLLLQLTNTSAYYMYLLLLLKSVVYFAIITCCLLRRTAFCCNGEKSRAKRSGSGATNFSLLKQAGDVEENPGPTSMDWIWRILFLVGAATGAHSFEEVQLVESGGGLVQPGGSLRLSCAASGYTFTEYTIHWVRQAPGKGLEWVANINPNNGGTTYNQKFEDRFTISRDNSKNTLYLQMNSLRAEDTAVYYCARGWNFDYWGQGTLVTVSSTRASTKGPSVFPLAPSSKSTSGGTAALGCLVKDYFPEPVTVSWNSGALTSGVHTFPAVLQSSGLYSLSSVVTVPSSSLGTQTYICNVNHKPSNTKVDKRVEPKSCEVKTDSTDHVKPKETENTKQPSKSCHKPKAIVHTEKVNMMSLTVLGLRMLFAKTVAVNFLLTAKLFFL

SEQ ID NO: 20712 - protein, 758 aa, Artificial Sequence
  Synthetic Polypeptide
MALPVTALLLPLALLLHAARPEVQLVESGGGLVQPGGSLRLSCAASGFSFSDFWMSWVRQAPGKGLEWVATISQAGSEKDYVDSVKGRFTISRDNAKKSLYLQMNSLRAEDTAVYYCASGVYSFDYRGQGTLVTVSSGTGGGGSGGGGSGGGGSEFDIVMTQSHKFMSTSVGDRVSIICKASQDVGTAVDWYQQKPGQSPKLLIYWASTRHTGVPDRFTGSGSGTDFTLAITNVQSEDLADYFCQQYNSYPLTFGAGTKLEIKRLEGQPKANPTVTLFPPSSEELQANKATLVCLISDFYPGAVTVAWKADGSPVKAGVETTKPSKQSNNKYAASSYLSLTPEQWKSHRSYSCQVTHEGSTVEKTVAPTECSGRADCGFTSESYQQGVLSATILYEILLGKATLYAVLVSALVLMAMVKRKDSRGRAKRSGSGVKQTLNFDLLKLAGDVESNPGPTSMDWIWRILFLVGAATGAHSFEEVQLVESGGGLVQPGGSLRLSCAASGYTFTEYTIHWVRQAPGKGLEWVANINPNNGGTTYNQKFEDRFTISRDNSKNTLYLQMNSLRAEDTAVYYCARGWNFDYWGQGTLVTVSSTRASTKGPSVFPLAPSSKSTSGGTAALGCLVKDYFPEPVTVSWNSGALTSGVHTFPAVLQSSGLYSLSSVVTVPSSSLGTQTYICNVNHKPSNTKVDKRVEPKSCIPEDTFFPSPESSCDVKLVEKSFETDTNLNFQNLSVIGFRILLLKVAGFNLLMTLRLWSS

SEQ ID NO: 20713 - protein, 892 aa, Artificial Sequence
  Synthetic Polypeptide
MALPVTALLLPLALLLHAARPEVQLVESGGGLVQPGGSLRLSCAASGFSFSDFWMSWVRQAPGKGLEWVATISQAGSEKDYVDSVKGRFTISRDNAKKSLYLQMNSLRAEDTAVYYCASGVYSFDYRGQGTLVTVSSGTGGGGSGGGGSGGGGSEFDIVMTQSHKFMSTSVGDRVSIICKASQDVGTAVDWYQQKPGQSPKLLIYWASTRHTGVPDRFTGSGSGTDFTLAITNVQSEDLADYFCQQYNSYPLTFGAGTKLEIKRLEIQNPDPAVYQLRDSKSSDKSVCLFTDFDSQTNVSQSKDSDVYITDKCVLDMRSMDFKSNSAVAWSNKSDFACANAFNNSIIPEDTFFPSPESSCDVKLVEKSFETDTNLNFQNLSVIGFRILLLKVAGFNLLMTLRLWSSRAKRSGSGVKQTLNFDLLKLAGDVESNPGPTSMDWIWRILFLVGAATGAHSGPQLQLQESGPGLVKPSETLSLTCTVSGDSISSGDYYWGWIRQPPGKGLEWIGHIYYSGVTYYNPSLKSRVTISVDTSRNQFSLKLSSVTAADTAVYYCTREDSSNWRSRGQGTLVTVSSGSGGGGSGGGGSGGGGSFEEVQLVESGGGLVQPGGSLRLSCAASGYTFTEYTIHWVRQAPGKGLEWVANINPNNGGTTYNQKFEDRFTISRDNSKNTLYLQMNSLRAEDTAVYYCARGWNFDYWGQGTLVTVSSTREDLKNVFPPEVAVFEPSEAEISHTQKATLVCLATGFYPDHVELSWWVNGKEVHSGVCTDPQPLKEQPALNDSRYCLSSRLRVSATFWQNPRNHFRCQVQFYGLSENDEWTQDRAKPVTQIVSAEAWGRADCGFTSESYQQGVLSATILYEILLGKATLYAVLVSALVLMAMVKRKDSRG

SEQ ID NO: 20714 - protein, 1084 aa, Artificial Sequence
  Synthetic Polypeptide
MALPVTALLLPLALLLHAARPEVQLVESGGGLVQPGGSLRLSCAASGFSFSDFWMSWVRQAPGKGLEWVATISQAGSEKDYVDSVKGRFTISRDNAKKSLYLQMNSLRAEDTAVYYCASGVYSFDYRGQGTLVTVSSGTGGGGSGGGGSGGGGSEFDIVMTQSHKFMSTSVGDRVSIICKASQDVGTAVDWYQQKPGQSPKLLIYWASTRHTGVPDRFTGSGSGTDFTLAITNVQSEDLADYFCQQYNSYPLTFGAGTKLEIKRLEDLKNVFPPEVAVFEPSEAEISHTQKATLVCLATGFYPDHVELSWWVNGKEVHSGVSTDPQPLKEQPALNDSRYCLSSRLRVSATFWQNPRNHFRCQVQFYGLSENDEWTQDRAKPVTQIVSAEAWGRADCGSQSFGLLDPKLCYLLDGILFIYGVILTALFLRVKFSRSADAPAYQQGQNQLYNELNLGRREEYDVLDKRRGRDPEMGGKPQRRKNPQEGLYNELQKDKMAEAYSEIGMKGERRRGKGHDGLYQGLSTATKDTYDALHMQALPPRRAKRSGSGATNFSLLKQAGDVEENPGPTSMDWIWRILFLVGAATGAHSGPQLQLQESGPGLVKPSETLSLTCTVSGDSISSGDYYWGWIRQPPGKGLEWIGHIYYSGVTYYNPSLKSRVTISVDTSRNQFSLKLSSVTAADTAVYYCTREDSSNWRSRGQGTLVTVSSGSGGGGSGGGGSGGGGSFEEVQLVESGGGLVQPGGSLRLSCAASGYTFTEYTIHWVRQAPGKGLEWVANINPNNGGTTYNQKFEDRFTISRDNSKNTLYLQMNSLRAEDTAVYYCARGWNFDYWGQGTLVTVSSTRIQNPDPAVYQLRDSKSSDKSVCLFTDFDSQTNVSQSKDSDVYITDKTVLDMRSMDFKSNSAVAWSNKSDFACANAFNNSIIPEDTFFPSPESSCGTQSFGLLDPKLCYLLDGILFIYGVILTALFLRVKFSRSADAPAYQQGQNQLYNELNLGRREEYDVLDKRRGRDPEMGGKPQRRKNPQEGLYNELQKDKMAEAYSEIGMKGERRRGKGHDGLYQGLSTATKDTYDALHMQALPPR

SEQ ID NO: 20715 - protein, 914 aa, Artificial Sequence
  Synthetic Polypeptide
MALPVTALLLPLALLLHAARPEVQLVESGGGLVQPGGSLRLSCAASGFSFSDFWMSWVRQAPGKGLEWVATISQAGSEKDYVDSVKGRFTISRDNAKKSLYLQMNSLRAEDTAVYYCASGVYSFDYRGQGTLVTVSSGTGGGGSGGGGSGGGGSEFDIVMTQSHKFMSTSVGDRVSIICKASQDVGTAVDWYQQKPGQSPKLLIYWASTRHTGVPDRFTGSGSGTDFTLAITNVQSEDLADYFCQQYNSYPLTFGAGTKLEIKRLEGQPKANPTVTLFPPSSEELQANKATLVCLISDFYPGAVTVAWKADGSPVKAGVETTKPSKQSNNKYAASSYLSLTPEQWKSHRSYSCQVTHEGSTVEKTVAPTECSPIKTDVITMDPKDNCSKDANDTLLLQLTNTSAYYMYLLLLLKSVVYFAIITCCLLRRTAFCCNGEKSRAKRSGSGATNFSLLKQAGDVEENPGPTSMDWIWRILFLVGAATGAHSGPQLQLQESGPGLVKPSETLSLTCTVSGDSISSGDYYWGWIRQPPGKGLEWIGHIYYSGVTYYNPSLKSRVTISVDTSRNQFSLKLSSVTAADTAVYYCTREDSSNWRSRGQGTLVTVSSGSGGGGSGGGGSGGGGSFEEVQLVESGGGLVQPGGSLRLSCAASGYTFTEYTIHWVRQAPGKGLEWVANINPNNGGTTYNQKFEDRFTISRDNSKNTLYLQMNSLRAEDTAVYYCARGWNFDYWGQGTLVTVSSTRASTKGPSVFPLAPSSKSTSGGTAALGCLVKDYFPEPVTVSWNSGALTSGVHTFPAVLQSSGLYSLSSVVTVPSSSLGTQTYICNVNHKPSNTKVDKRVEPKSCEVKTDSTDHVKPKETENTKQPSKSCHKPKAIVHTEKVNMMSLTVLGLRMLFAKTVAVNFLLTAKLFFL

SEQ ID NO: 20716 - protein, 895 aa, Artificial Sequence
  Synthetic Polypeptide
MALPVTALLLPLALLLHAARPEVQLVESGGGLVQPGGSLRLSCAASGFSFSDFWMSWVRQAPGKGLEWVATISQAGSEKDYVDSVKGRFTISRDNAKKSLYLQMNSLRAEDTAVYYCASGVYSFDYRGQGTLVTVSSGTGGGGSGGGGSGGGGSEFDIVMTQSHKFMSTSVGDRVSIICKASQDVGTAVDWYQQKPGQSPKLLIYWASTRHTGVPDRFTGSGSGTDFTLAITNVQSEDLADYFCQQYNSYPLTFGAGTKLEIKRLEGQPKANPTVTLFPPSSEELQANKATLVCLISDFYPGAVTVAWKADGSPVKAGVETTKPSKQSNNKYAASSYLSLTPEQWKSHRSYSCQVTHEGSTVEKTVAPTECSGRADCGFTSESYQQGVLSATILYEILLGKATLYAVLVSALVLMAMVKRKDSRGRAKRSGSGVKQTLNFDLLKLAGDVESNPGPTSMDWIWRILFLVGAATGAHSGPQLQLQESGPGLVKPSETLSLTCTVSGDSISSGDYYWGWIRQPPGKGLEWIGHIYYSGVTYYNPSLKSRVTISVDTSRNQFSLKLSSVTAADTAVYYCTREDSSNWRSRGQGTLVTVSSGSGGGGSGGGGSGGGGSFEEVQLVESGGGLVQPGGSLRLSCAASGYTFTEYTIHWVRQAPGKGLEWVANINPNNGGTTYNQKFEDRFTISRDNSKNTLYLQMNSLRAEDTAVYYCARGWNFDYWGQGTLVTVSSTRASTKGPSVFPLAPSSKSTSGGTAALGCLVKDYFPEPVTVSWNSGALTSGVHTFPAVLQSSGLYSLSSVVTVPSSSLGTQTYICNVNHKPSNTKVDKRVEPKSCIPEDTFFPSPESSCDVKLVEKSFETDTNLNFQNLSVIGFRILLLKVAGFNLLMTLRLWSS

SEQ ID NO: 20717 - protein, 752 aa, Artificial Sequence
  Synthetic Polypeptide
MALPVTALLLPLALLLHAARPEVQVLESGGGLVQPGGSLRLSCAASGFTFSNFAMSWVRQAPGKGLEWVSTISGSAGTTDYADSVKGRFTISRDNSKKTLYLQMNSLRVEDTAVYYCADGRGPFFDYRGQGTLVTVSSGTGGGGSGGGGSGGGGSEFDIVMTQSHKFMSTSVGDRVSIICKASQDVGTAVDWYQQKPGQSPKLLIYWASTRHTGVPDRFTGSGSGTDFTLAITNVQSEDLADYFCQQYNSYPLTFGAGTKLEIKRLEDLKNVFPPEVAVFEPSEAEISHTQKATLVCLATGFYPDHVELSWWVNGKEVHSGVCTDPQPLKEQPALNDSRYCLSSRLRVSATFWQNPRNHFRCQVQFYGLSENDEWTQDRAKPVTQIVSAEAWGRADCGFTSESYQQGVLSATILYEILLGKATLYAVLVSALVLMAMVKRKDSRGRAKRSGSGATNFSLLKQAGDVEENPGPTSMDWIWRILFLVGAATGAHSFEEVQLVESGGGLVQPGGSLRLSCAASGYTFTEYTIHWVRQAPGKGLEWVANINPNNGGTTYNQKFEDRFTISRDNSKNTLYLQMNSLRAEDTAVYYCARGWNFDYWGQGTLVTVSSTRIQNPDPAVYQLRDSKSSDKSVCLFTDFDSQTNVSQSKDSDVYITDKCVLDMRSMDFKSNSAVAWSNKSDFACANAFNNSIIPEDTFFPSPESSCDVKLVEKSFETDTNLNFQNLSVIGFRILLLKVAGFNLLMTLRLWSS

SEQ ID NO: 20718 - protein, 753 aa, Artificial Sequence
  Synthetic Polypeptide
MALPVTALLLPLALLLHAARPDIVMTQSHKFMSTSVGDRVSIICKASQDVGTAVDWYQQKPGQSPKLLIYWASTRHTGVPDRFTGSGSGTDFTLAITNVQSEDLADYFCQQYNSYPLTFGAGTKLEIKRLEDLKNVFPPEVAVFEPSEAEISHTQKATLVCLATGFYPDHVELSWWVNGKEVHSGVCTDPQPLKEQPALNDSRYCLSSRLRVSATFWQNPRNHFRCQVQFYGLSENDEWTQDRAKPVTQIVSAEAWGRADCGFTSESYQQGVLSATILYEILLGKATLYAVLVSALVLMAMVKRKDSRGRAKRSGSGATNFSLLKQAGDVEENPGPTSMDWIWRILFLVGAATGAHSGPEVQLVESGGGLVQAGGSLRLSCAASGRTFSMGWFRQAPGKEREFVAAITYSGGSPYYADSVKGRFTISRDNAKNTVYLQMNSLKPEDTAVYYCAANPTYGSDWNAENWGQGTQVTVSSGSGGGGSGGGGSGGGGSFEEVQLVESGGGLVQPGGSLRLSCAASGYTFTEYTIHWVRQAPGKGLEWVANINPNNGGTTYNQKFEDRFTISRDNSKNTLYLQMNSLRAEDTAVYYCARGWNFDYWGQGTLVTVSSTRIQNPDPAVYQLRDSKSSDKSVCLFTDFDSQTNVSQSKDSDVYITDKCVLDMRSMDFKSNSAVAWSNKSDFACANAFNNSIIPEDTFFPSPESSCDVKLVEKSFETDTNLNFQNLSVIGFRILLLKVAGFNLLMTLRLWSS

SEQ ID NO: 20719 - protein, 880 aa, Artificial Sequence
  Synthetic Polypeptide
MALPVTALLLPLALLLHAARPDIVMTQSHKFMSTSVGDRVSIICKASQDVGTAVDWYQQKPGQSPKLLIYWASTRHTGVPDRFTGSGSGTDFTLAITNVQSEDLADYFCQQYNSYPLTFGAGTKLEIKRLEDLKNVFPPEVAVFEPSEAEISHTQKATLVCLATGFYPDHVELSWWVNGKEVHSGVCTDPQPLKEQPALNDSRYCLSSRLRVSATFWQNPRNHFRCQVQFYGLSENDEWTQDRAKPVTQIVSAEAWGRADCGFTSESYQQGVLSATILYEILLGKATLYAVLVSALVLMAMVKRKDSRGRAKRSGSGATNFSLLKQAGDVEENPGPTSMDWIWRILFLVGAATGAHSQLQLQESGPGLVKPSETLSLTCTVSGGSISSGDYYWGWIRQPPGKGLEWIGSISYSGSTYYNPSLKSRVTISVDTSRNQFSLKLSSVTAADTAVYYCTREDSSNWRSRGQGTLVTVSSSGGGGSGGGGSEVQLVESGGGLVQAGGSLRLSCAASGRTFSMGWFRQAPGKEREFVAAITYSGGSPYYADSVKGRFTISRDNAKNTVYLQMNSLKPEDTAVYYCAANPTYGSDWNAENWGQGTQVTVSSGSGGGGSGGGGSGGGGSFEEVQLVESGGGLVQPGGSLRLSCAASGYTFTEYTIHWVRQAPGKGLEWVANINPNNGGTTYNQKFEDRFTISRDNSKNTLYLQMNSLRAEDTAVYYCARGWNFDYWGQGTLVTVSSTRIQNPDPAVYQLRDSKSSDKSVCLFTDFDSQTNVSQSKDSDVYITDKCVLDMRSMDFKSNSAVAWSNKSDFACANAFNNSIIPEDTFFPSPESSCDVKLVEKSFETDTNLNFQNLSVIGFRILLLKVAGFNLLMTLRLWSS

SEQ ID NO: 20720 - protein, 889 aa, Artificial Sequence
  Synthetic Polypeptide
MALPVTALLLPLALLLHAARPEVQVLESGGGLVQPGGSLRLSCAASGFTFSNFAMSWVRQAPGKGLEWVSTISGSAGTTDYADSVKGRFTISRDNSKKTLYLQMNSLRVEDTAVYYCADGRGPFFDYRGQGTLVTVSSGTGGGGSGGGGSGGGGSEFDIVMTQSHKFMSTSVGDRVSIICKASQDVGTAVDWYQQKPGQSPKLLIYWASTRHTGVPDRFTGSGSGTDFTLAITNVQSEDLADYFCQQYNSYPLTFGAGTKLEIKRLEDLKNVFPPEVAVFEPSEAEISHTQKATLVCLATGFYPDHVELSWWVNGKEVHSGVCTDPQPLKEQPALNDSRYCLSSRLRVSATFWQNPRNHFRCQVQFYGLSENDEWTQDRAKPVTQIVSAEAWGRADCGFTSESYQQGVLSATILYEILLGKATLYAVLVSALVLMAMVKRKDSRGRAKRSGSGATNFSLLKQAGDVEENPGPTSMDWIWRILFLVGAATGAHSGPEVQLVESGGGLVQAGGSLRLSCAASGRTFSMGWFRQAPGKEREFVAAITYSGGSPYYASSVRGRFTISRDNAKNTVYLQMNSLKPEDTAVYYCAANPTYGSDWNAENWGQGTQVTVSSGSGGGGSGGGGSGGGGSFEEVQLVESGGGLVQPGGSLRLSCAASGYTFTEYTIHWVRQAPGKGLEWVANINPNNGGTTYNQKFEDRFTISRDNSKNTLYLQMNSLRAEDTAVYYCARGWNFDYWGQGTLVTVSSTRIQNPDPAVYQLRDSKSSDKSVCLFTDFDSQTNVSQSKDSDVYITDKCVLDMRSMDFKSNSAVAWSNKSDFACANAFNNSIIPEDTFFPSPESSCDVKLVEKSFETDTNLNFQNLSVIGFRILLLKVAGFNLLMTLRLWSS

SEQ ID NO: 20721 - protein, 726 aa, Artificial Sequence
  Synthetic Polypeptide
MALPVTALLLPLALLLHAARPEIVLTQSPATLSLSPGERATLSCSATSSVSYIHWYQQKPGQAPRLLIYSTSNLASGIPARFSGSGSGTDFTLTIGRLEPEDFAVYYCQQRSSSPFTFGQGTKVEIKRGGGGSGGGGSGGGGSEVQLVESGGGLVKPEGSLRLSCAASGFTFSRYGMSWVRQAPGKGLEWVSTISGGGTYIYYPDSVKGRFTISRDNAKNSLFLQMNSLRAEDTAVYYCARDNYGRNYDYGMDYWGQGTLVTVSSTREQKLISEEDLAKPTTTPAPRPPTPAPTIASQPLSLRPEACRPAAGGAVHTRGLDFACDIYIWAPLAGTCGVLLLSLVITLYCKRGRKKLLYIFKQPFMRPVQTTQEEDGCSCRFPEEEEGGCELRVKFSRSADAPAYQQGQNQLYNELNLGRREEYDVLDKRRGRDPEMGGKPRRKNPQEGLYNELQKDKMAEAYSEIGMKGERRRGKGHDGLYQGLSTATKDTYDALHMQALPPRSSGSGEGRGSLLTCGDVEENPGPHMTEYKPTVRLATRDDVPRAVRTLAAAFADYPATRHTVDPDRHIERVTELQELFLTRVGLDIGKVWVADDGAAVAVWTTPESVEAGAVFAEIGPRMAELSGSRLAAQQQMEGLLAPHRPKEPAWFLATVGVSPDHQGKGLGSAVVLPGVEAAERAGVPAFLETSAPRNLPFYERLGFTVTADVEVPEGPRTWCMTRKPGA

SEQ ID NO: 20722 - protein, 720 aa, Artificial Sequence
  Synthetic Polypeptide
MALPVTALLLPLALLLHAARPEIVLTQSPATLSLSPGERATLSCSATSSVSYIHWYQQKPGQAPRLLIYSTSNLASGIPARFSGSGSGTDFTLTIGRLEPEDFAVYYCQQRSSSPFTFGQGTKVEIKRGGGGSGGGGSGGGGSEVQLVESGGGLVKPEGSLRLSCAASGFTFSRYGMSWVRQAPGKGLEWVSTISGGGTYIYYPDSVKGRFTISRDNAKNSLFLQMNSLRAEDTAVYYCARDNYGRNYDYGMDYWGQGTLVTVSSTREQKLISEEDLKIEVMYPPPYLDNEKSNGTIIHVKGKHLCPSPLFPGPSKPFWVLVVVGGVLACYSLLVTVAFIIFWVRSKRSRLLHSDYMNMTPRRPGPTRKHYQPYAPPRDFAAYRSRVKFSRSADAPAYQQGQNQLYNELNLGRREEYDVLDKRRGRDPEMGGKPRRKNPQEGLYNELQKDKMAEAYSEIGMKGERRRGKGHDGLYQGLSTATKDTYDALHMQALPPRSSGSGEGRGSLLTCGDVEENPGPHMTEYKPTVRLATRDDVPRAVRTLAAAFADYPATRHTVDPDRHIERVTELQELFLTRVGLDIGKVWVADDGAAVAVWTTPESVEAGAVFAEIGPRMAELSGSRLAAQQQMEGLLAPHRPKEPAWFLATVGVSPDHQGKGLGSAVVLPGVEAAERAGVPAFLETSAPRNLPFYERLGFTVTADVEVPEGPRTWCMTRKPGA

SEQ ID NO: 20723 - protein, 497 aa, Artificial Sequence
  Synthetic Polypeptide
MALPVTALLLPLALLLHAARPEIVLTQSPATLSLSPGERATLSCSATSSVSYIHWYQQKPGQAPRLLIYSTSNLASGIPARFSGSGSGTDFTLTIGRLEPEDFAVYYCQQRSSSPFTFGQGTKVEIKRGGGGSGGGGSGGGGSEVQLVESGGGLVKPEGSLRLSCAASGFTFSRYGMSWVRQAPGKGLEWVSTISGGGTYIYYPDSVKGRFTISRDNAKNSLFLQMNSLRAEDTAVYYCARDNYGRNYDYGMDYWGQGTLVTVSSTREQKLISEEDLKIEVMYPPPYLDNEKSNGTIIHVKGKHLCPSPLFPGPSKPFWVLVVVGGVLACYSLLVTVAFIIFWVRSKRSRLLHSDYMNMTPRRPGPTRKHYQPYAPPRDFAAYRSRVKFSRSADAPAYQQGQNQLYNELNLGRREEYDVLDKRRGRDPEMGGKPRRKNPQEGLYNELQKDKMAEAYSEIGMKGERRRGKGHDGLYQGLSTATKDTYDALHMQALPPR

SEQ ID NO: 20724 - protein, 503 aa, Artificial Sequence
  Synthetic Polypeptide
MALPVTALLLPLALLLHAARPEIVLTQSPATLSLSPGERATLSCSATSSVSYIHWYQQKPGQAPRLLIYSTSNLASGIPARFSGSGSGTDFTLTIGRLEPEDFAVYYCQQRSSSPFTFGQGTKVEIKRGGGGSGGGGSGGGGSEVQLVESGGGLVKPEGSLRLSCAASGFTFSRYGMSWVRQAPGKGLEWVSTISGGGTYIYYPDSVKGRFTISRDNAKNSLFLQMNSLRAEDTAVYYCARDNYGRNYDYGMDYWGQGTLVTVSSTREQKLISEEDLAKPTTTPAPRPPTPAPTIASQPLSLRPEACRPAAGGAVHTRGLDFACDIYIWAPLAGTCGVLLLSLVITLYCKRGRKKLLYIFKQPFMRPVQTTQEEDGCSCRFPEEEEGGCELRVKFSRSADAPAYQQGQNQLYNELNLGRREEYDVLDKRRGRDPEMGGKPRRKNPQEGLYNELQKDKMAEAYSEIGMKGERRRGKGHDGLYQGLSTATKDTYDALHMQALPPR

SEQ ID NO: 20725 - protein, 503 aa, Artificial Sequence
  Synthetic Polypeptide
MALPVTALLLPLALLLHAARPEVQLVESGGGLVKPEGSLRLSCAASGFTFSRYGMSWVRQAPGKGLEWVSTISGGGTYIYYPDSVKGRFTISRDNAKNSLFLQMNSLRAEDTAVYYCARDNYGRNYDYGMDYWGQGTLVTVSSGGGGSGGGGSGGGGSEIVLTQSPATLSLSPGERATLSCSATSSVSYIHWYQQKPGQAPRLLIYSTSNLASGIPARFSGSGSGTDFTLTIGRLEPEDFAVYYCQQRSSSPFTFGQGTKVEIKRTREQKLISEEDLAKPTTTPAPRPPTPAPTIASQPLSLRPEACRPAAGGAVHTRGLDFACDIYIWAPLAGTCGVLLLSLVITLYCKRGRKKLLYIFKQPFMRPVQTTQEEDGCSCRFPEEEEGGCELRVKFSRSADAPAYQQGQNQLYNELNLGRREEYDVLDKRRGRDPEMGGKPRRKNPQEGLYNELQKDKMAEAYSEIGMKGERRRGKGHDGLYQGLSTATKDTYDALHMQALPPR

SEQ ID NO: 20726 - protein, 916 aa, Artificial Sequence
  Synthetic Polypeptide
MALPVTALLLPLALLLHAARPEIVLTQSPATLSLSPGERATLSCSATSSVSYIHWYQQKPGQAPRLLIYSTSNLASGIPARFSGSGSGTDFTLTIGRLEPEDFAVYYCQQRSSSPFTFGQGTKVEIKRGGGGSGGGGSGGGGSEVQLVESGGGLVKPEGSLRLSCAASGFTFSRYGMSWVRQAPGKGLEWVSTISGGGTYIYYPDSVKGRFTISRDNAKNSLFLQMNSLRAEDTAVYYCARDNYGRNYDYGMDYWGQGTLVTVSSTREQKLISEEDLAKPTTTPAPRPPTPAPTIASQPLSLRPEACRPAAGGAVHTRGLDFACDIYIWAPLAGTCGVLLLSLVITLYCGRARVKFSRSADAPAYQQGQNQLYNELNLGRREEYDVLDKRRGRDPEMGGKPRRKNPQEGLYNELQKDKMAEAYSEIGMKGERRRGKGHDGLYQGLSTATKDTYDALHMQALPPRSRGSGATNFSLLKQAGDVEENPGPGIHMATYEVLCEVARKLGTDDREVVLFLLNVFIPQPTLAQLIGALRALKEEGRLTFPLLAECLFRAGRRDLLRDLLHLDPRFLERHLAGTMSYFSPYQLTVLHVDGELCARDIRSLIFLSKDTIGSRSTPQTFLHWVYCMENLDLLGPTDVDALMSMLRSLSRVDLQRQVQTLMGLHLSGPSHSQHYRHTPLETDFYDYKDDDDKTSGSGEGRGSLLTCGDVEENPGPHMTEYKPTVRLATRDDVPRAVRTLAAAFADYPATRHTVDPDRHIERVTELQELFLTRVGLDIGKVWVADDGAAVAVWTTPESVEAGAVFAEIGPRMAELSGSRLAAQQQMEGLLAPHRPKEPAWFLATVGVSPDHQGKGLGSAVVLPGVEAAERAGVPAFLETSAPRNLPFYERLGFTVTADVEVPEGPRTWCMTRKPGA

SEQ ID NO: 20727 - protein, 856 aa, Artificial Sequence
  Synthetic Polypeptide
MALPVTALLLPLALLLHAARPEIVLTQSPATLSLSPGERATLSCSATSSVSYIHWYQQKPGQAPRLLIYSTSNLASGIPARFSGSGSGTDFTLTIGRLEPEDFAVYYCQQRSSSPFTFGQGTKVEIKRLEIQNPDPAVYQLRDSKSSDKSVCLFTDFDSQTNVSQSKDSDVYITDKCVLDMRSMDFKSNSAVAWSNKSDFACANAFNNSIIPEDTFFPSSDVPCDVKLVEKSFETDTNLNFQNLSVIGFRILLLKVAGFNLLMTLRLWSSRAKRSGSGVKQTLNFDLLKLAGDVESNPGPTSMDWIWRILFLVGAATGAHSFEEVQLVESGGGLVKPEGSLRLSCAASGFTFSRYGMSWVRQAPGKGLEWVSTISGGGTYIYYPDSVKGRFTISRDNAKNSLFLQMNSLRAEDTAVYYCARDNYGRNYDYGMDYWGQGTLVTVSSTREDLKNVFPPEVAVFEPSKAEIAHTQKATLVCLATGFYPDHVELSWWVNGKEVHSGVCTDPQPLKEQPALNDSRYCLSSRLRVSATFWQNPRNHFRCQVQFYGLSENDEWTQDRAKPVTQIVSAEAWGRADCGITSASYHQGVLSATILYEILLGKATLYAVLVSALVLMAMVKRKDSRGRAKRSGSGATNFSLLKQAGDVEENPGPSRGHMTEYKPTVRLATRDDVPRAVRTLAAAFADYPATRHTVDPDRHIERVTELQELFLTRVGLDIGKVWVADDGAAVAVWTTPESVEAGAVFAEIGPRMAELSGSRLAAQQQMEGLLAPHRPKEPAWFLATVGVSPDHQGKGLGSAVVLPGVEAAERAGVPAFLETSAPRNLPFYERLGFTVTADVEVPEGPRTWCMTRKPGA

SEQ ID NO: 20728 - protein, 855 aa, Artificial Sequence
  Synthetic Polypeptide
MALPVTALLLPLALLLHAARPEIVLTQSPATLSLSPGERATLSCSATSSVSYIHWYQQKPGQAPRLLIYSTSNLASGIPARFSGSGSGTDFTLTIGRLEPEDFAVYYCQQRSSSPFTFGQGTKVEIKRLEDLKNVFPPEVAVFEPSKAEIAHTQKATLVCLATGFYPDHVELSWWVNGKEVHSGVCTDPQPLKEQPALNDSRYCLSSRLRVSATFWQNPRNHFRCQVQFYGLSENDEWTQDRAKPVTQIVSAEAWGRADCGITSASYHQGVLSATILYEILLGKATLYAVLVSALVLMAMVKRKDSRGRAKRSGSGATNFSLLKQAGDVEENPGPTSMDWIWRILFLVGAATGAHSFEEVQLVESGGGLVKPEGSLRLSCAASGFTFSRYGMSWVRQAPGKGLEWVSTISGGGTYIYYPDSVKGRFTISRDNAKNSLFLQMNSLRAEDTAVYYCARDNYGRNYDYGMDYWGQGTLVTVSSTRIQNPDPAVYQLRDSKSSDKSVCLFTDFDSQTNVSQSKDSDVYITDKCVLDMRSMDFKSNSAVAWSNKSDFACANAFNNSIIPEDTFFPSSDVPCDVKLVEKSFETDTNLNFQNLSVIGFRILLLKVAGFNLLMTLRLWSSRAKRSGSGVKQTLNFDLLKLAGDVESNPGPSRGHMTEYKPTVRLATRDDVPRAVRTLAAAFADYPATRHTVDPDRHIERVTELQELFLTRVGLDIGKVWVADDGAAVAVWTTPESVEAGAVFAEIGPRMAELSGSRLAAQQQMEGLLAPHRPKEPAWFLATVGVSPDHQGKGLGSAVVLPGVEAAERAGVPAFLETSAPRNLPFYERLGFTVTADVEVPEGPRTWCMTRKPGA

SEQ ID NO: 20729 - protein, 622 aa, Artificial Sequence
  Synthetic Polypeptide
MALPVTALLLPLALLLHAARPEIVLTQSPATLSLSPGERATLSCSATSSVSYIHWYQQKPGQAPRLLIYSTSNLASGIPARFSGSGSGTDFTLTIGRLEPEDFAVYYCQQRSSSPFTFGQGTKVEIKRLEDLKNVFPPEVAVFEPSEAEISHTQKATLVCLATGFYPDHVELSWWVNGKEVHSGVCTDPQPLKEQPALNDSRYCLSSRLRVSATFWQNPRNHFRCQVQFYGLSENDEWTQDRAKPVTQIVSAEAWGRADCGFTSESYQQGVLSATILYEILLGKATLYAVLVSALVLMAMVKRKDSRGRAKRSGSGATNFSLLKQAGDVEENPGPTSMDWIWRILFLVGAATGAHSFEEVQLVESGGGLVKPEGSLRLSCAASGFTFSRYGMSWVRQAPGKGLEWVSTISGGGTYIYYPDSVKGRFTISRDNAKNSLFLQMNSLRAEDTAVYYCARDNYGRNYDYGMDYWGQGTLVTVSSTRIQNPDPAVYQLRDSKSSDKSVCLFTDFDSQTNVSQSKDSDVYITDKCVLDMRSMDFKSNSAVAWSNKSDFACANAFNNSIIPEDTFFPSPESSCDVKLVEKSFETDTNLNFQNLSVIGFRILLLKVAGFNLLMTLRLWSS

SEQ ID NO: 20730 - protein, 847 aa, Artificial Sequence
  Synthetic Polypeptide
MALPVTALLLPLALLLHAARPEIVLTQSPATLSLSPGERATLSCSATSSVSYIHWYQQKPGQAPRLLIYSTSNLASGIPARFSGSGSGTDFTLTIGRLEPEDFAVYYCQQRSSSPFTFGQGTKVEIKRLEDLKNVFPPEVAVFEPSEAEISHTQKATLVCLATGFYPDHVELSWWVNGKEVHSGVCTDPQPLKEQPALNDSRYCLSSRLRVSATFWQNPRNHFRCQVQFYGLSENDEWTQDRAKPVTQIVSAEAWGRADCGFTSESYQQGVLSATILYEILLGKATLYAVLVSALVLMAMVKRKDSRGRAKRSGSGATNFSLLKQAGDVEENPGPTSMDWIWRILFLVGAATGAHSFEEVQLVESGGGLVKPEGSLRLSCAASGFTFSRYGMSWVRQAPGKGLEWVSTISGGGTYIYYPDSVKGRFTISRDNAKNSLFLQMNSLRAEDTAVYYCARDNYGRNYDYGMDYWGQGTLVTVSSTRIQNPDPAVYQLRDSKSSDKSVCLFTDFDSQTNVSQSKDSDVYITDKCVLDMRSMDFKSNSAVAWSNKSDFACANAFNNSIIPEDTFFPSPESSCDVKLVEKSFETDTNLNFQNLSVIGFRILLLKVAGFNLLMTLRLWSSRAKRSGSGVKQTLNFDLLKLAGDVESNPGPSRGGIHTMATYEVLCEVARKLGTDDREVVLFLLNVFIPQPTLAQLIGALRALKEEGRLTFPLLAECLFRAGRRDLLRDLLHLDPRFLERHLAGTMSYFSPYQLTVLHVDGELCARDIRSLIFLSKDTIGSRSTPQTFLHWVYCMENLDLLGPTDVDALMSMLRSLSRVDLQRQVQTLMGLHLSGPSHSQHYRHTP

SEQ ID NO: 20731 - protein, 626 aa, Artificial Sequence
  Synthetic Polypeptide
MALPVTALLLPLALLLHAARPEIVLTQSPATLSLSPGERATLSCSATSSVSYIHWYQQKPGQAPRLLIYSTSNLASGIPARFSGSGSGTDFTLTIGRLEPEDFAVYYCQQRSSSPFTFGQGTKVEIKRLEIQNPDPAVYQLRDSKSSDKSVCLFTDFDSQTNVSQSKDSDVYITDKCVLDMRSMDFKSNSAVAWSNKSDFACANAFNNSIIPEDTFFPSPESSCDVKLVEKSFETDTNLNFQNLSVIGFRILLLKVAGFNLLMTLRLWSSRAKRSGSGVKQTLNFDLLKLAGDVESNPGPTSMDWIWRILFLVGAATGAHSFEEVQLVESGGGLVKPEGSLRLSCAASGFTFSRYGMSWVRQAPGKGLEWVSTISGGGTYIYYPDSVKGRFTISRDNAKNSLFLQMNSLRAEDTAVYYCARDNYGRNYDYGMDYWGQGTLVTVSSTREDLKNVFPPEVAVFEPSEAEISHTQKATLVCLATGFYPDHVELSWWVNGKEVHSGVCTDPQPLKEQPALNDSRYCLSSRLRVSATFWQNPRNHFRCQVQFYGLSENDEWTQDRAKPVTQIVSAEAWGRADCGFTSESYQQGVLSATILYEILLGKATLYAVLVSALVLMAMVKRKDSRG

SEQ ID NO: 20732 - protein, 848 aa, Artificial Sequence
  Synthetic Polypeptide
MALPVTALLLPLALLLHAARPEIVLTQSPATLSLSPGERATLSCSATSSVSYIHWYQQKPGQAPRLLIYSTSNLASGIPARFSGSGSGTDFTLTIGRLEPEDFAVYYCQQRSSSPFTFGQGTKVEIKRLEIQNPDPAVYQLRDSKSSDKSVCLFTDFDSQTNVSQSKDSDVYITDKCVLDMRSMDFKSNSAVAWSNKSDFACANAFNNSIIPEDTFFPSPESSCDVKLVEKSFETDTNLNFQNLSVIGFRILLLKVAGFNLLMTLRLWSSRAKRSGSGVKQTLNFDLLKLAGDVESNPGPTSMDWIWRILFLVGAATGAHSFEEVQLVESGGGLVKPEGSLRLSCAASGFTFSRYGMSWVRQAPGKGLEWVSTISGGGTYIYYPDSVKGRFTISRDNAKNSLFLQMNSLRAEDTAVYYCARDNYGRNYDYGMDYWGQGTLVTVSSTREDLKNVFPPEVAVFEPSEAEISHTQKATLVCLATGFYPDHVELSWWVNGKEVHSGVCTDPQPLKEQPALNDSRYCLSSRLRVSATFWQNPRNHFRCQVQFYGLSENDEWTQDRAKPVTQIVSAEAWGRADCGFTSESYQQGVLSATILYEILLGKATLYAVLVSALVLMAMVKRKDSRGRAKRSGSGATNFSLLKQAGDVEENPGPSRGGIHTMATYEVLCEVARKLGTDDREVVLFLLNVFIPQPTLAQLIGALRALKEEGRLTFPLLAECLFRAGRRDLLRDLLHLDPRFLERHLAGTMSYFSPYQLTVLHVDGELCARDIRSLIFLSKDTIGSRSTPQTFLHWVYCMENLDLLGPTDVDALMSMLRSLSRVDLQRQVQTLMGLHLSGPSHSQHYRHTP

SEQ ID NO: 20733 - protein, 900 aa, Artificial Sequence
  Synthetic Polypeptide
MALPVTALLLPLALLLHAARPLEGKPIPNPLLGLDSTGSGEDLKNVFPPEVAVFEPSKAEIAHTQKATLVCLATGFYPDHVELSWWVNGKEVHSGVCTDPQPLKEQPALNDSRYCLSSRLRVSATFWQNPRNHFRCQVQFYGLSENDEWTQDRAKPVTQIVSAEAWGRADCGITSASYHQGVLSATILYEILLGKATLYAVLVSALVLMAMVKRKDSRGRAKRSGSGATNFSLLKQAGDVEENPGPTSMALPVTALLLPLALLLHAARPEIVLTQSPATLSLSPGERATLSCSATSSVSYIHWYQQKPGQAPRLLIYSTSNLASGIPARFSGSGSGTDFTLTIGRLEPEDFAVYYCQQRSSSPFTFGQGTKVEIKRGGGGSGGGGSGGGGSEVQLVESGGGLVKPEGSLRLSCAASGFTFSRYGMSWVRQAPGKGLEWVSTISGGGTYIYYPDSVKGRFTISRDNAKNSLFLQMNSLRAEDTAVYYCARDNYGRNYDYGMDYWGQGTLVTVSSTREQKLISEEDGSGIQNPDPAVYQLRDSKSSDKSVCLFTDFDSQTNVSQSKDSDVYITDKCVLDMRSMDFKSNSAVAWSNKSDFACANAFNNSIIPEDTFFPSSDVPCDVKLVEKSFETDTNLNFQNLSVIGFRILLLKVAGFNLLMTLRLWSSRAKRSGSGVKQTLNFDLLKLAGDVESNPGPSRGHMTEYKPTVRLATRDDVPRAVRTLAAAFADYPATRHTVDPDRHIERVTELQELFLTRVGLDIGKVWVADDGAAVAVWTTPESVEAGAVFAEIGPRMAELSGSRLAAQQQMEGLLAPHRPKEPAWFLATVGVSPDHQGKGLGSAVVLPGVEAAERAGVPAFLETSAPRNLPFYERLGFTVTADVEVPEGPRTWCMTRKPGA

SEQ ID NO: 20734 - protein, 901 aa, Artificial Sequence
  Synthetic Polypeptide
MALPVTALLLPLALLLHAARPLEQKLISEEDLGSGDRPDPAVYQLRDSKSSDKSVCLFTDFDSQTNVSQSKDSDVYITDKCVLDMRSMDFKSNSAVAWSNKSDFACANAFNNSIIPEDTFFPSPESSCDVKLVEKSFETDTNLNFQNLSVIGFRILLLKVAGFNLLMTLRLWSSSSRAKRSGSGVKQTLNFDLLKLAGDVESNPGPTSMALPVTALLLPLALLLHAARPEIVLTQSPATLSLSPGERATLSCSATSSVSYIHWYQQKPGQAPRLLIYSTSNLASGIPARFSGSGSGTDFTLTIGRLEPEDFAVYYCQQRSSSPFTFGQGTKVEIKRGGGGSGGGGSGGGGSEVQLVESGGGLVKPEGSLRLSCAASGFTFSRYGMSWVRQAPGKGLEWVSTISGGGTYIYYPDSVKGRFTISRDNAKNSLFLQMNSLRAEDTAVYYCARDNYGRNYDYGMDYWGQGTLVTVSSTRGKPIPNPLLGLDSTGSGEDLKNVFPPEVAVFEPSEAEISHTQKATLVCLATGFYPDHVELSWWVNGKEVHSGVCTDPQPLKEQPALNDSRYCLSSRLRVSATFWQNPRNHFRCQVQFYGLSENDEWTQDRAKPVTQIVSAEAWGRADCGFTSESYQQGVLSATILYEILLGKATLYAVLVSALVLMAMVKRKDSRGRAKRSGSGATNFSLLKQAGDVEENPGPSRGHMTEYKPTVRLATRDDVPRAVRTLAAAFADYPATRHTVDPDRHIERVTELQELFLTRVGLDIGKVWVADDGAAVAVWTTPESVEAGAVFAEIGPRMAELSGSRLAAQQQMEGLLAPHRPKEPAWFLATVGVSPDHQGKGLGSAVVLPGVEAAERAGVPAFLETSAPRNLPFYERLGFTVTADVEVPEGPRTWCMTRKPGA

SEQ ID NO: 20735 - protein, 855 aa, Artificial Sequence
  Synthetic Polypeptide
MALPVTALLLPLALLLHAARPEIVLTQSPATLSLSPGERATLSCSATSSVSYIHWYQQKPGQAPRLLIYSTSNLASGIPARFSGSGSGTDFTLTIGRLEPEDFAVYYCQQRSSSPFTFGQGTKVEIKRLEDLKNVFPPEVAVFEPSEAEISHTQKATLVCLATGFYPDHVELSWWVNGKEVHSGVSTDPQPLKEQPALNDSRYCLSSRLRVSATFWQNPRNHFRCQVQFYGLSENDEWTQDRAKPVTQIVSAEAWGRADCGFTSESYQQGVLSATILYEILLGKATLYAVLVSALVLMAMVKRKDSRGRAKRSGSGATNFSLLKQAGDVEENPGPTSMDWIWRILFLVGAATGAHSFEEVQLVESGGGLVKPEGSLRLSCAASGFTFSRYGMSWVRQAPGKGLEWVSTISGGGTYIYYPDSVKGRFTISRDNAKNSLFLQMNSLRAEDTAVYYCARDNYGRNYDYGMDYWGQGTLVTVSSTRIQNPDPAVYQLRDSKSSDKSVCLFTDFDSQTNVSQSKDSDVYITDKTVLDMRSMDFKSNSAVAWSNKSDFACANAFNNSIIPEDTFFPSPESSCDVKLVEKSFETDTNLNFQNLSVIGFRILLLKVAGFNLLMTLRLWSSRAKRSGSGVKQTLNFDLLKLAGDVESNPGPSRGHMTEYKPTVRLATRDDVPRAVRTLAAAFADYPATRHTVDPDRHIERVTELQELFLTRVGLDIGKVWVADDGAAVAVWTTPESVEAGAVFAEIGPRMAELSGSRLAAQQQMEGLLAPHRPKEPAWFLATVGVSPDHQGKGLGSAVVLPGVEAAERAGVPAFLETSAPRNLPFYERLGFTVTADVEVPEGPRTWCMTRKPGA

SEQ ID NO: 20736 - protein, 937 aa, Artificial Sequence
  Synthetic Polypeptide
MALPVTALLLPLALLLHAARPEIVLTQSPATLSLSPGERATLSCSATSSVSYIHWYQQKPGQAPRLLIYSTSNLASGIPARFSGSGSGTDFTLTIGRLEPEDFAVYYCQQRSSSPFTFGQGTKVEIKRLEDLKNVFPPEVAVFEPSEAEISHTQKATLVCLATGFYPDHVELSWWVNGKEVHSGVSTDPQPLKEQPALNDSRYCLSSRLRVSATFWQNPRNHFRCQVQFYGLSENDEWTQDRAKPVTQIVSAEAWGRADCGFTSESYQQGVLSATILYEILLGKATLYAVLVSALVLMAMVKRKDSRGRAKRSGSGATNFSLLKQAGDVEENPGPTSMDWIWRILFLVGAATGAHSFEEVQLVESGGGLVKPEGSLRLSCAASGFTFSRYGMSWVRQAPGKGLEWVSTISGGGTYIYYPDSVKGRFTISRDNAKNSLFLQMNSLRAEDTAVYYCARDNYGRNYDYGMDYWGQGTLVTVSSTREQKLISEEDGSGTPFPSLAPPIMLLVDGKQQMVVVCLVLDVAPPGLDSPIWFSAGNGSALDAFTYGPSPATDGTWTNLAHLSLPSEELASWEPLVCHTGPGAEGHSRSTQPMHLSGEASTARTCPQEPLRGTPGGALWLGVLRLLLFKLLLFDLLLTCSCLCDPAGPLPSPATTTRLRALGSHRLHPATETGGREATSSPRPQPRDRRWGDTPPGRKPGSPVRAKRSGSGVKQTLNFDLLKLAGDVESNPGPSRGHMTEYKPTVRLATRDDVPRAVRTLAAAFADYPATRHTVDPDRHIERVTELQELFLTRVGLDIGKVWVADDGAAVAVWTTPESVEAGAVFAEIGPRMAELSGSRLAAQQQMEGLLAPHRPKEPAWFLATVGVSPDHQGKGLGSAVVLPGVEAAERAGVPAFLETSAPRNLPFYERLGFTVTADVEVPEGPRTWCMTRKPGA

SEQ ID NO: 20737 - protein, 955 aa, Artificial Sequence
  Synthetic Polypeptide
MALPVTALLLPLALLLHAARPLEDLKNVFPPEVAVFEPSEAEISHTQKATLVCLATGFYPDHVELSWWVNGKEVHSGVSTDPQPLKEQPALNDSRYCLSSRLRVSATFWQNPRNHFRCQVQFYGLSENDEWTQDRAKPVTQIVSAEAWGRADCGFTSESYQQGVLSATILYEILLGKATLYAVLVSALVLMAMVKRKDSRGRAKRSGSGATNFSLLKQAGDVEENPGPTSMALPVTALLLPLALLLHAARPEIVLTQSPATLSLSPGERATLSCSATSSVSYIHWYQQKPGQAPRLLIYSTSNLASGIPARFSGSGSGTDFTLTIGRLEPEDFAVYYCQQRSSSPFTFGQGTKVEIKRGGGGSGGGGSGGGGSEVQLVESGGGLVKPEGSLRLSCAASGFTFSRYGMSWVRQAPGKGLEWVSTISGGGTYIYYPDSVKGRFTISRDNAKNSLFLQMNSLRAEDTAVYYCARDNYGRNYDYGMDYWGQGTLVTVSSTREQKLISEEDLGSGTPFPSLAPPIMLLVDGKQQMVVVCLVLDVAPPGLDSPIWFSAGNGSALDAFTYGPSPATDGTWTNLAHLSLPSEELASWEPLVCHTGPGAEGHSRSTQPMHLSGEASTARTCPQEPLRGTPGGALWLGVLRLLLFKLLLFDLLLTCSCLCDPAGPLPSPATTTRLRALGSHRLHPATETGGREATSSPRPQPRDRRWGDTPPGRKPGSPVRAKRSGSGVKQTLNFDLLKLAGDVESNPGPSRSRGHMTEYKPTVRLATRDDVPRAVRTLAAAFADYPATRHTVDPDRHIERVTELQELFLTRVGLDIGKVWVADDGAAVAVWTTPESVEAGAVFAEIGPRMAELSGSRLAAQQQMEGLLAPHRPKEPAWFLATVGVSPDHQGKGLGSAVVLPGVEAAERAGVPAFLETSAPRNLPFYERLGFTVTADVEVPEGPRTWCMTRKPGA

SEQ ID NO: 20738 - protein, 892 aa, Artificial Sequence
  Synthetic Polypeptide
MALPVTALLLPLALLLHAARPEIVLTQSPATLSLSPGERATLSCSATSSVSYIHWYQQKPGQAPRLLIYSTSNLASGIPARFSGSGSGTDFTLTIGRLEPEDFAVYYCQQRSSSPFTFGQGTKVEIKRLEGKPIPNPLLGLDSTGSGDKQLDADVSPKPTIFLPSIAETKLQKAGTYLCLLEKFFPDVIKIHWQEKKSNTILGSQEGNTMKTNDTYMKFSWLTVPEKSLDKEHRCIVRHENNKNGVDQEIIFPPIKTDVITMDPKDNCSKDANDTLLLQLTNTSAYYMYLLLLLKSVVYFAIITCCLLRRTAFCCNGEKSRAKRSGSGATNFSLLKQAGDVEENPGPTSMDWIWRILFLVGAATGAHSFEEVQLVESGGGLVKPEGSLRLSCAASGFTFSRYGMSWVRQAPGKGLEWVSTISGGGTYIYYPDSVKGRFTISRDNAKNSLFLQMNSLRAEDTAVYYCARDNYGRNYDYGMDYWGQGTLVTVSSTREQKLISEEDGSGSQPHTKPSVFVMKNGTNVACLVKEFYPKDIRINLVSSKKITEFDPAIVISPSGKYNAVKLGKYEDSNSVTCSVQHDNKTVHSTDFEVKTDSTDHVKPKETENTKQPSKSCHKPKAIVHTEKVNMMSLTVLGLRMLFAKTVAVNFLLTAKLFFLRAKRSGSGVKQTLNFDLLKLAGDVESNPGPSRGHMTEYKPTVRLATRDDVPRAVRTLAAAFADYPATRHTVDPDRHIERVTELQELFLTRVGLDIGKVWVADDGAAVAVWTTPESVEAGAVFAEIGPRMAELSGSRLAAQQQMEGLLAPHRPKEPAWFLATVGVSPDHQGKGLGSAVVLPGVEAAERAGVPAFLETSAPRNLPFYERLGFTVTADVEVPEGPRTWCMTRKPGA

SEQ ID NO: 20739 - protein, 630 aa, Artificial Sequence
  Synthetic Polypeptide
MALPVTALLLPLALLLHAARPEIVLTQSPATLSLSPGERATLSCSATSSVSYIHWYQQKPGQAPRLLIYSTSNLASGIPARFSGSGSGTDFTLTIGRLEPEDFAVYYCQQRSSSPFTFGQGTKVEIKRLESQPHTKPSVFVMKNGTNVACLVKEFYPKDIRINLVSSKKITEFDPAIVISPSGKYNAVKLGKYEDSNSVTCSVQHDNKTVHSTDFEVKTDSTDHVKPKETENTKQPSKSCHKPKAIVHTEKVNMMSLTVLGLRMLFAKTVAVNFLLTAKLFFLRAKRSGSGATNFSLLKQAGDVEENPGPTSMDWIWRILFLVGAATGAHSFEEVQLVESGGGLVKPEGSLRLSCAASGFTFSRYGMSWVRQAPGKGLEWVSTISGGGTYIYYPDSVKGRFTISRDNAKNSLFLQMNSLRAEDTAVYYCARDNYGRNYDYGMDYWGQGTLVTVSSTRDKQLDADVSPKPTIFLPSIAETKLQKAGTYLCLLEKFFPDVIKIHWQEKKSNTILGSQEGNTMKTNDTYMKFSWLTVPEKSLDKEHRCIVRHENNKNGVDQEIIFPPIKTDVITMDPKDNCSKDANDTLLLQLTNTSAYYMYLLLLLKSVVYFAIITCCLLRRTAFCCNGEKS

SEQ ID NO: 20740 - protein, 907 aa, Artificial Sequence
  Synthetic Polypeptide
MALPVTALLLPLALLLHAARPLEGKPIPNPLLGLDSTGSGDKQLDADVSPKPTIFLPSIAETKLQKAGTYLCLLEKFFPDVIKIHWQEKKSNTILGSQEGNTMKTNDTYMKFSWLTVPEKSLDKEHRCIVRHENNKNGVDQEIIFPPIKTDVITMDPKDNCSKDANDTLLLQLTNTSAYYMYLLLLLKSVVYFAIITCCLLRRTAFCCNGEKSRAKRSGSGATNFSLLKQAGDVEENPGPTSMALPVTALLLPLALLLHAARPEIVLTQSPATLSLSPGERATLSCSATSSVSYIHWYQQKPGQAPRLLIYSTSNLASGIPARFSGSGSGTDFTLTIGRLEPEDFAVYYCQQRSSSPFTFGQGTKVEIKRGGGGSGGGGSGGGGSEVQLVESGGGLVKPEGSLRLSCAASGFTFSRYGMSWVRQAPGKGLEWVSTISGGGTYIYYPDSVKGRFTISRDNAKNSLFLQMNSLRAEDTAVYYCARDNYGRNYDYGMDYWGQGTLVTVSSTREQKLISEEDGSGSQPHTKPSVFVMKNGTNVACLVKEFYPKDIRINLVSSKKITEFDPAIVISPSGKYNAVKLGKYEDSNSVTCSVQHDNKTVHSTDFEVKTDSTDHVKPKETENTKQPSKSCHKPKAIVHTEKVNMMSLTVLGLRMLFAKTVAVNFLLTAKLFFLRAKRSGSGVKQTLNFDLLKLAGDVESNPGPSRGHMTEYKPTVRLATRDDVPRAVRTLAAAFADYPATRHTVDPDRHIERVTELQELFLTRVGLDIGKVWVADDGAAVAVWTTPESVEAGAVFAEIGPRMAELSGSRLAAQQQMEGLLAPHRPKEPAWFLATVGVSPDHQGKGLGSAVVLPGVEAAERAGVPAFLETSAPRNLPFYERLGFTVTADVEVPEGPRTWCMTRKPGA

SEQ ID NO: 20741 - protein, 1032 aa, Artificial Sequence
  Synthetic Polypeptide
MALPVTALLLPLALLLHAARPEIVLTQSPATLSLSPGERATLSCSATSSVSYIHWYQQKPGQAPRLLIYSTSNLASGIPARFSGSGSGTDFTLTIGRLEPEDFAVYYCQQRSSSPFTFGQGTKVEIKRGQPKANPTVTLFPPSSEELQANKATLVCLISDFYPGAVTVAWKADGSPVKAGVETTKPSKQSNNKYAASSYLSLTPEQWKSHRSYSCQVTHEGSTVEKTVAPTECSGSQSFGLLDPKLCYLLDGILFIYGVILTALFLRVKFSRSADAPAYQQGQNQLYNELNLGRREEYDVLDKRRGRDPEMGGKPQRRKNPQEGLYNELQKDKMAEAYSEIGMKGERRRGKGHDGLYQGLSTATKDTYDALHMQALPPRRAKRSGSGATNFSLLKQAGDVEENPGPTSMDWIWRILFLVGAATGAHSFEEVQLVESGGGLVKPEGSLRLSCAASGFTFSRYGMSWVRQAPGKGLEWVSTISGGGTYIYYPDSVKGRFTISRDNAKNSLFLQMNSLRAEDTAVYYCARDNYGRNYDYGMDYWGQGTLVTVSSASTKGPSVFPLAPSSKSTSGGTAALGCLVKDYFPEPVTVSWNSGALTSGVHTFPAVLQSSGLYSLSSVVTVPSSSLGTQTYICNVNHKPSNTKVDKRVEPKSCGTQSFGLLDPKLCYLLDGILFIYGVILTALFLRVKFSRSADAPAYQQGQNQLYNELNLGRREEYDVLDKRRGRDPEMGGKPQRRKNPQEGLYNELQKDKMAEAYSEIGMKGERRRGKGHDGLYQGLSTATKDTYDALHMQALPPRRAKRSGSGVKQTLNFDLLKLAGDVESNPGPSRGHMTEYKPTVRLATRDDVPRAVRTLAAAFADYPATRHTVDPDRHIERVTELQELFLTRVGLDIGKVWVADDGAAVAVWTTPESVEAGAVFAEIGPRMAELSGSRLAAQQQMEGLLAPHRPKEPAWFLATVGVSPDHQGKGLGSAVVLPGVEAAERAGVPAFLETSAPRNLPFYERLGFTVTADVEVPEGPRTWCMTRKPGA

SEQ ID NO: 20742 - protein, 818 aa, Artificial Sequence
  Synthetic Polypeptide
MALPVTALLLPLALLLHAARPEIVLTQSPATLSLSPGERATLSCSATSSVSYIHWYQQKPGQAPRLLIYSTSNLASGIPARFSGSGSGTDFTLTIGRLEPEDFAVYYCQQRSSSPFTFGQGTKVEIKRLEDLKNVFPPEVAVFEPSEAEISHTQKATLVCLATGFYPDHVELSWWVNGKEVHSGVSTDPQPLKEQPALNDSRYCLSSRLRVSATFWQNPRNHFRCQVQFYGLSENDEWTQDRAKPVTQIVSAEAWGRADCGSQSFGLLDPKLCYLLDGILFIYGVILTALFLRVKFSRSADAPAYQQGQNQLYNELNLGRREEYDVLDKRRGRDPEMGGKPQRRKNPQEGLYNELQKDKMAEAYSEIGMKGERRRGKGHDGLYQGLSTATKDTYDALHMQALPPRRAKRSGSGATNFSLLKQAGDVEENPGPTSMDWIWRILFLVGAATGAHSFEEVQLVESGGGLVKPEGSLRLSCAASGFTFSRYGMSWVRQAPGKGLEWVSTISGGGTYIYYPDSVKGRFTISRDNAKNSLFLQMNSLRAEDTAVYYCARDNYGRNYDYGMDYWGQGTLVTVSSTRIQNPDPAVYQLRDSKSSDKSVCLFTDFDSQTNVSQSKDSDVYITDKTVLDMRSMDFKSNSAVAWSNKSDFACANAFNNSIIPEDTFFPSPESSCGTQSFGLLDPKLCYLLDGILFIYGVILTALFLRVKFSRSADAPAYQQGQNQLYNELNLGRREEYDVLDKRRGRDPEMGGKPQRRKNPQEGLYNELQKDKMAEAYSEIGMKGERRRGKGHDGLYQGLSTATKDTYDALHMQALPPR

SEQ ID NO: 20743 - protein, 818 aa, Artificial Sequence
  Synthetic Polypeptide
MALPVTALLLPLALLLHAARPEIVLTQSPATLSLSPGERATLSCSATSSVSYIHWYQQKPGQAPRLLIYSTSNLASGIPARFSGSGSGTDFTLTIGRLEPEDFAVYYCQQRSSSPFTFGQGTKVEIKRLEDLKNVFPPEVAVFEPSKAEIAHTQKATLVCLATGFYPDHVELSWWVNGKEVHSGVCTDPQPLKEQPALNDSRYCLSSRLRVSATFWQNPRNHFRCQVQFYGLSENDEWTQDRAKPVTQIVSAEAWGRADCGSQSFGLLDPKLCYLLDGILFIYGVILTALFLRVKFSRSADAPAYQQGQNQLYNELNLGRREEYDVLDKRRGRDPEMGGKPQRRKNPQEGLYNELQKDKMAEAYSEIGMKGERRRGKGHDGLYQGLSTATKDTYDALHMQALPPRRAKRSGSGATNFSLLKQAGDVEENPGPTSMDWIWRILFLVGAATGAHSFEEVQLVESGGGLVKPEGSLRLSCAASGFTFSRYGMSWVRQAPGKGLEWVSTISGGGTYIYYPDSVKGRFTISRDNAKNSLFLQMNSLRAEDTAVYYCARDNYGRNYDYGMDYWGQGTLVTVSSTRIQNPDPAVYQLRDSKSSDKSVCLFTDFDSQTNVSQSKDSDVYITDKCVLDMRSMDFKSNSAVAWSNKSDFACANAFNNSIIPEDTFFPSSDVPCGTQSFGLLDPKLCYLLDGILFIYGVILTALFLRVKFSRSADAPAYQQGQNQLYNELNLGRREEYDVLDKRRGRDPEMGGKPQRRKNPQEGLYNELQKDKMAEAYSEIGMKGERRRGKGHDGLYQGLSTATKDTYDALHMQALPPR

SEQ ID NO: 20744 - protein, 889 aa, Artificial Sequence
  Synthetic Polypeptide
MALPVTALLLPLALLLHAARPEIVLTQSPATLSLSPGERATLSCSATSSVSYIHWYQQKPGQAPRLLIYSTSNLASGIPARFSGSGSGTDFTLTIGRLEPEDFAVYYCQQRSSSPFTFGQGTKVEIKRLEGKPIPNPLLGLDSTGSGEDLKNVFPPEVAVFEPSEAEISHTQKATLVCLATGFYPDHVELSWWVNGKEVHSGVSTDPQPLKEQPALNDSRYCLSSRLRVSATFWQNPRNHFRCQVQFYGLSENDEWTQDRAKPVTQIVSAEAWGRADCGSQSFGLLDPKLCYLLDGILFIYGVILTALFLRVKFSRSADAPAYQQGQNQLYNELNLGRREEYDVLDKRRGRDPEMGGKPQRRKNPQEGLYNELQKDKMAEAYSEIGMKGERRRGKGHDGLYQGLSTATKDTYDALHMQALPPRRAKRSGSGATNFSLLKQAGDVEENPGPTSMDWIWRILFLVGAATGAHSFEEVQLVESGGGLVKPEGSLRLSCAASGFTFSRYGMSWVRQAPGKGLEWVSTISGGGTYIYYPDSVKGRFTISRDNAKNSLFLQMNSLRAEDTAVYYCARDNYGRNYDYGMDYWGQGTLVTVSSTREQKLISEEDGSGIQNPDPAVYQLRDSKSSDKSVCLFTDFDSQTNVSQSKDSDVYITDKTVLDMRSMDFKSNSAVAWSNKSDFACANAFNNSIIPEDTFFPSPESSCGTQSFGLLDPKLCYLLDGILFIYGVILTALFLRSKRSRLLHSDYMNMTPRRPGPTRKHYQPYAPPRDFAAYRSRVKFSRSADAPAYQQGQNQLYNELNLGRREEYDVLDKRRGRDPEMGGKPQRRKNPQEGLYNELQKDKMAEAYSEIGMKGERRRGKGHDGLYQGLSTATKDTYDALHMQALPPR

SEQ ID NO: 20745 - protein, 930 aa, Artificial Sequence
  Synthetic Polypeptide
MALPVTALLLPLALLLHAARPEIVLTQSPATLSLSPGERATLSCSATSSVSYIHWYQQKPGQAPRLLIYSTSNLASGIPARFSGSGSGTDFTLTIGRLEPEDFAVYYCQQRSSSPFTFGQGTKVEIKRLEGKPIPNPLLGLDSTGSGEDLKNVFPPEVAVFEPSEAEISHTQKATLVCLATGFYPDHVELSWWVNGKEVHSGVSTDPQPLKEQPALNDSRYCLSSRLRVSATFWQNPRNHFRCQVQFYGLSENDEWTQDRAKPVTQIVSAEAWGRADCGSQSFGLLDPKLCYLLDGILFIYGVILTALFLRSKRSRLLHSDYMNMTPRRPGPTRKHYQPYAPPRDFAAYRSRVKFSRSADAPAYQQGQNQLYNELNLGRREEYDVLDKRRGRDPEMGGKPQRRKNPQEGLYNELQKDKMAEAYSEIGMKGERRRGKGHDGLYQGLSTATKDTYDALHMQALPPRRAKRSGSGATNFSLLKQAGDVEENPGPTSMDWIWRILFLVGAATGAHSFEEVQLVESGGGLVKPEGSLRLSCAASGFTFSRYGMSWVRQAPGKGLEWVSTISGGGTYIYYPDSVKGRFTISRDNAKNSLFLQMNSLRAEDTAVYYCARDNYGRNYDYGMDYWGQGTLVTVSSTREQKLISEEDGSGIQNPDPAVYQLRDSKSSDKSVCLFTDFDSQTNVSQSKDSDVYITDKTVLDMRSMDFKSNSAVAWSNKSDFACANAFNNSIIPEDTFFPSPESSCGTQSFGLLDPKLCYLLDGILFIYGVILTALFLRSKRSRLLHSDYMNMTPRRPGPTRKHYQPYAPPRDFAAYRSRVKFSRSADAPAYQQGQNQLYNELNLGRREEYDVLDKRRGRDPEMGGKPQRRKNPQEGLYNELQKDKMAEAYSEIGMKGERRRGKGHDGLYQGLSTATKDTYDALHMQALPPR

SEQ ID NO: 20746 - protein, 891 aa, Artificial Sequence
  Synthetic Polypeptide
MALPVTALLLPLALLLHAARPEIVLTQSPATLSLSPGERATLSCSATSSVSYIHWYQQKPGQAPRLLIYSTSNLASGIPARFSGSGSGTDFTLTIGRLEPEDFAVYYCQQRSSSPFTFGQGTKVEIKRLEGKPIPNPLLGLDSTGSGEDLKNVFPPEVAVFEPSEAEISHTQKATLVCLATGFYPDHVELSWWVNGKEVHSGVSTDPQPLKEQPALNDSRYCLSSRLRVSATFWQNPRNHFRCQVQFYGLSENDEWTQDRAKPVTQIVSAEAWGRADCGSQSFGLLDPKLCYLLDGILFIYGVILTALFLRVKFSRSADAPAYQQGQNQLYNELNLGRREEYDVLDKRRGRDPEMGGKPQRRKNPQEGLYNELQKDKMAEAYSEIGMKGERRRGKGHDGLYQGLSTATKDTYDALHMQALPPRRAKRSGSGATNFSLLKQAGDVEENPGPTSMDWIWRILFLVGAATGAHSFEEVQLVESGGGLVKPEGSLRLSCAASGFTFSRYGMSWVRQAPGKGLEWVSTISGGGTYIYYPDSVKGRFTISRDNAKNSLFLQMNSLRAEDTAVYYCARDNYGRNYDYGMDYWGQGTLVTVSSTREQKLISEEDLGSGIQNPDPAVYQLRDSKSSDKSVCLFTDFDSQTNVSQSKDSDVYITDKTVLDMRSMDFKSNSAVAWSNKSDFACANAFNNSIIPEDTFFPSPESSCGTQSFGLLDPKLCYLLDGILFIYGVILTALFLKRGRKKLLYIFKQPFMRPVQTTQEEDGCSCRFPEEEEGGCELRVKFSRSADAPAYQQGQNQLYNELNLGRREEYDVLDKRRGRDPEMGGKPQRRKNPQEGLYNELQKDKMAEAYSEIGMKGERRRGKGHDGLYQGLSTATKDTYDALHMQALPPR

SEQ ID NO: 20747 - protein, 933 aa, Artificial Sequence
  Synthetic Polypeptide
MALPVTALLLPLALLLHAARPEIVLTQSPATLSLSPGERATLSCSATSSVSYIHWYQQKPGQAPRLLIYSTSNLASGIPARFSGSGSGTDFTLTIGRLEPEDFAVYYCQQRSSSPFTFGQGTKVEIKRLEGKPIPNPLLGLDSTGSGEDLKNVFPPEVAVFEPSEAEISHTQKATLVCLATGFYPDHVELSWWVNGKEVHSGVSTDPQPLKEQPALNDSRYCLSSRLRVSATFWQNPRNHFRCQVQFYGLSENDEWTQDRAKPVTQIVSAEAWGRADCGSQSFGLLDPKLCYLLDGILFIYGVILTALFLKRGRKKLLYIFKQPFMRPVQTTQEEDGCSCRFPEEEEGGCELRVKFSRSADAPAYQQGQNQLYNELNLGRREEYDVLDKRRGRDPEMGGKPQRRKNPQEGLYNELQKDKMAEAYSEIGMKGERRRGKGHDGLYQGLSTATKDTYDALHMQALPPRRAKRSGSGATNFSLLKQAGDVEENPGPTSMDWIWRILFLVGAATGAHSFEEVQLVESGGGLVKPEGSLRLSCAASGFTFSRYGMSWVRQAPGKGLEWVSTISGGGTYIYYPDSVKGRFTISRDNAKNSLFLQMNSLRAEDTAVYYCARDNYGRNYDYGMDYWGQGTLVTVSSTREQKLISEEDLGSGIQNPDPAVYQLRDSKSSDKSVCLFTDFDSQTNVSQSKDSDVYITDKTVLDMRSMDFKSNSAVAWSNKSDFACANAFNNSIIPEDTFFPSPESSCGTQSFGLLDPKLCYLLDGILFIYGVILTALFLKRGRKKLLYIFKQPFMRPVQTTQEEDGCSCRFPEEEEGGCELRVKFSRSADAPAYQQGQNQLYNELNLGRREEYDVLDKRRGRDPEMGGKPQRRKNPQEGLYNELQKDKMAEAYSEIGMKGERRRGKGHDGLYQGLSTATKDTYDALHMQALPPR

SEQ ID NO: 20748 - protein, 823 aa, Artificial Sequence
  Synthetic Polypeptide
MALPVTALLLPLALLLHAARPEIVLTQSPATLSLSPGERATLSCSATSSVSYIHWYQQKPGQAPRLLIYSTSNLASGIPARFSGSGSGTDFTLTIGRLEPEDFAVYYCQQRSSSPFTFGQGTKVEIKRLEQSFGLLDPKLCYLLDGILFIYGVILTALFLRVKFSRSADAPAYQQGQNQLYNELNLGRREEYDVLDKRRGRDPEMGGKPQRRKNPQEGLYNELQKDKMAEAYSEIGMKGERRRGKGHDGLYQGLSTATKDTYDALHMQALPPRRAKRSGSGATNFSLLKQAGDVEENPGPTSMDWIWRILFLVGAATGAHSFEEVQLVESGGGLVKPEGSLRLSCAASGFTFSRYGMSWVRQAPGKGLEWVSTISGGGTYIYYPDSVKGRFTISRDNAKNSLFLQMNSLRAEDTAVYYCARDNYGRNYDYGMDYWGQGTLVTVSSTRQSFGLLDPKLCYLLDGILFIYGVILTALFLRVKFSRSADAPAYQQGQNQLYNELNLGRREEYDVLDKRRGRDPEMGGKPQRRKNPQEGLYNELQKDKMAEAYSEIGMKGERRRGKGHDGLYQGLSTATKDTYDALHMQALPPRRAKRSGSGVKQTLNFDLLKLAGDVESNPGPSRGHMTEYKPTVRLATRDDVPRAVRTLAAAFADYPATRHTVDPDRHIERVTELQELFLTRVGLDIGKVWVADDGAAVAVWTTPESVEAGAVFAEIGPRMAELSGSRLAAQQQMEGLLAPHRPKEPAWFLATVGVSPDHQGKGLGSAVVLPGVEAAERAGVPAFLETSAPRNLPFYERLGFTVTADVEVPEGPRTWCMTRKPGA

SEQ ID NO: 20749 - protein, 648 aa, Artificial Sequence
  Synthetic Polypeptide
MALPVTALLLPLALLLHAARPEIVLTQSPATLSLSPGERATLSCSATSSVSYIHWYQQKPGQAPRLLIYSTSNLASGIPARFSGSGSGTDFTLTIGRLEPEDFAVYYCQQRSSSPFTFGQGTKVEIKRLEGQPKANPTVTLFPPSSEELQANKATLVCLISDFYPGAVTVAWKADGSPVKAGVETTKPSKQSNNKYAASSYLSLTPEQWKSHRSYSCQVTHEGSTVEKTVAPTECSPIKTDVITMDPKDNCSKDANDTLLLQLTNTSAYYMYLLLLLKSVVYFAIITCCLLRRTAFCCNGEKSRAKRSGSGATNFSLLKQAGDVEENPGPTSMDWIWRILFLVGAATGAHSFEEVQLVESGGGLVKPEGSLRLSCAASGFTFSRYGMSWVRQAPGKGLEWVSTISGGGTYIYYPDSVKGRFTISRDNAKNSLFLQMNSLRAEDTAVYYCARDNYGRNYDYGMDYWGQGTLVTVSSTRASTKGPSVFPLAPSSKSTSGGTAALGCLVKDYFPEPVTVSWNSGALTSGVHTFPAVLQSSGLYSLSSVVTVPSSSLGTQTYICNVNHKPSNTKVDKRVEPKSCEVKTDSTDHVKPKETENTKQPSKSCHKPKAIVHTEKVNMMSLTVLGLRMLFAKTVAVNFLLTAKLFFL

SEQ ID NO: 20750 - protein, 626 aa, Artificial Sequence
  Synthetic Polypeptide
MALPVTALLLPLALLLHAARPEIVLTQSPATLSLSPGERATLSCSATSSVSYIHWYQQKPGQAPRLLIYSTSNLASGIPARFSGSGSGTDFTLTIGRLEPEDFAVYYCQQRSSSPFTFGQGTKVEIKRLEGQPKANPTVTLFPPSSEELQANKATLVCLISDFYPGAVTVAWKADGSPVKAGVETTKPSKQSNNKYAASSYLSLTPEQWKSHRSYSCQVTHEGSTVEKTVAPTECSGRADCGITSASYHQGVLSATILYEILLGKATLYAVLVSALVLMAMVKRKDSRGRAKRSGSGATNFSLLKQAGDVEENPGPTSMDWIWRILFLVGAATGAHSFEEVQLVESGGGLVKPEGSLRLSCAASGFTFSRYGMSWVRQAPGKGLEWVSTISGGGTYIYYPDSVKGRFTISRDNAKNSLFLQMNSLRAEDTAVYYCARDNYGRNYDYGMDYWGQGTLVTVSSTRASTKGPSVFPLAPSSKSTSGGTAALGCLVKDYFPEPVTVSWNSGALTSGVHTFPAVLQSSGLYSLSSVVTVPSSSLGTQTYICNVNHKPSNTKVDKRVEPKSCIPEDTFFPSSDVPCDVKLVEKSFETDTNLNFQNLSVIGFRILLLKVAGFNLLMTLRLWSS

SEQ ID NO: 20751 - protein, 626 aa, Artificial Sequence
  Synthetic Polypeptide
MALPVTALLLPLALLLHAARPEIVLTQSPATLSLSPGERATLSCSATSSVSYIHWYQQKPGQAPRLLIYSTSNLASGIPARFSGSGSGTDFTLTIGRLEPEDFAVYYCQQRSSSPFTFGQGTKVEIKRLEGQPKANPTVTLFPPSSEELQANKATLVCLISDFYPGAVTVAWKADGSPVKAGVETTKPSKQSNNKYAASSYLSLTPEQWKSHRSYSCQVTHEGSTVEKTVAPTECSGRADCGFTSESYQQGVLSATILYEILLGKATLYAVLVSALVLMAMVKRKDSRGRAKRSGSGATNFSLLKQAGDVEENPGPTSMDWIWRILFLVGAATGAHSFEEVQLVESGGGLVKPEGSLRLSCAASGFTFSRYGMSWVRQAPGKGLEWVSTISGGGTYIYYPDSVKGRFTISRDNAKNSLFLQMNSLRAEDTAVYYCARDNYGRNYDYGMDYWGQGTLVTVSSTRASTKGPSVFPLAPSSKSTSGGTAALGCLVKDYFPEPVTVSWNSGALTSGVHTFPAVLQSSGLYSLSSVVTVPSSSLGTQTYICNVNHKPSNTKVDKRVEPKSCIPEDTFFPSPESSCDVKLVEKSFETDTNLNFQNLSVIGFRILLLKVAGFNLLMTLRLWSS

SEQ ID NO: 20752 - protein, 452 aa, Artificial Sequence
  Synthetic Polypeptide
MALPVTALLLPLALLLHAARPEIVLTQSPATLSLSPGERATLSCSATSSVSYIHWYQQKPGQAPRLLIYSTSNLASGIPARFSGSGSGTDFTLTIGRLEPEDFAVYYCQQRSSSPFTFGQGTKVEIKRGGGGSGGGGSGGGGSEVQLVESGGGLVKPEGSLRLSCAASGFTFSRYGMSWVRQAPGKGLEWVSTISGGGTYIYYPDSVKGRFTISRDNAKNSLFLQMNSLRAEDTAVYYCARDNYGRNYDYGMDYWGQGTLVTVSSTRDGNEEMGGITQTPYKVSISGTTVILTCPQYPGSEILWQHNDKNIGGDEDDKNIGSDEDHLSLKEFSELEQSGYYVCYPRGSKPEDANFYLYLRARVCENCMEMDVMSVATIVIVDICITGGLLLLVYYWSKNRKAKAKPVTRGAGAGGRQRGQNKERPPPVPNPDYEPIRKGQRDLYSGLNQRRI

SEQ ID NO: 20753 - protein, 417 aa, Artificial Sequence
  Synthetic Polypeptide
MALPVTALLLPLALLLHAARPEIVLTQSPATLSLSPGERATLSCSATSSVSYIHWYQQKPGQAPRLLIYSTSNLASGIPARFSGSGSGTDFTLTIGRLEPEDFAVYYCQQRSSSPFTFGQGTKVEIKRGGGGSGGGGSGGGGSEVQLVESGGGLVKPEGSLRLSCAASGFTFSRYGMSWVRQAPGKGLEWVSTISGGGTYIYYPDSVKGRFTISRDNAKNSLFLQMNSLRAEDTAVYYCARDNYGRNYDYGMDYWGQGTLVTVSSTRFKIPIEELEDRVFVNCNTSITWVEGTVGTLLSDITRLDLGKRILDPRGIYRCNGTDIYKDKESTVQVHYRMCQSCVELDPATVAGIIVTDVIATLLLALGVFCFAGHETGRLSGAADTQALLRNDQVYQPLRDRDDAQYSHLGGNWARNK

SEQ ID NO: 20754 - protein, 427 aa, Artificial Sequence
  Synthetic Polypeptide
MALPVTALLLPLALLLHAARPEIVLTQSPATLSLSPGERATLSCSATSSVSYIHWYQQKPGQAPRLLIYSTSNLASGIPARFSGSGSGTDFTLTIGRLEPEDFAVYYCQQRSSSPFTFGQGTKVEIKRGGGGSGGGGSGGGGSEVQLVESGGGLVKPEGSLRLSCAASGFTFSRYGMSWVRQAPGKGLEWVSTISGGGTYIYYPDSVKGRFTISRDNAKNSLFLQMNSLRAEDTAVYYCARDNYGRNYDYGMDYWGQGTLVTVSSTRQSIKGNHLVKVYDYQEDGSVLLTCDAEAKNITWFKDGKMIGFLTEDKKKWNLGSNAKDPRGMYQCKGSQNKSKPLQVYYRMCQNCIELNAATISGFLFAEIVSIFVLAVGVYFIAGQDGVRQSRASDKQTLLPNDQLYQPLKDREDDQYSHLQGNQLRRN

SEQ ID NO: 20755 - protein, 410 aa, Artificial Sequence
  Synthetic Polypeptide
MALPVTALLLPLALLLHAARPEIVLTQSPATLSLSPGERATLSCSATSSVSYIHWYQQKPGQAPRLLIYSTSNLASGIPARFSGSGSGTDFTLTIGRLEPEDFAVYYCQQRSSSPFTFGQGTKVEIKRGGGGSGGGGSGGGGSEVQLVESGGGLVKPEGSLRLSCAASGFTFSRYGMSWVRQAPGKGLEWVSTISGGGTYIYYPDSVKGRFTISRDNAKNSLFLQMNSLRAEDTAVYYCARDNYGRNYDYGMDYWGQGTLVTVSSTRQSFGLLDPKLCYLLDGILFIYGVILTALFLRVKFSRSADAPAYQQGQNQLYNELNLGRREEYDVLDKRRGRDPEMGGKPQRRKNPQEGLYNELQKDKMAEAYSEIGMKGERRRGKGHDGLYQGLSTATKDTYDALHMQALPPR

SEQ ID NO: 20756 - protein, 452 aa, Artificial Sequence
  Synthetic Polypeptide
MALPVTALLLPLALLLHAARPEVQLVESGGGLVKPEGSLRLSCAASGFTFSRYGMSWVRQAPGKGLEWVSTISGGGTYIYYPDSVKGRFTISRDNAKNSLFLQMNSLRAEDTAVYYCARDNYGRNYDYGMDYWGQGTLVTVSSGGGGSGGGGSGGGGSEIVLTQSPATLSLSPGERATLSCSATSSVSYIHWYQQKPGQAPRLLIYSTSNLASGIPARFSGSGSGTDFTLTIGRLEPEDFAVYYCQQRSSSPFTFGQGTKVEIKRTRDGNEEMGGITQTPYKVSISGTTVILTCPQYPGSEILWQHNDKNIGGDEDDKNIGSDEDHLSLKEFSELEQSGYYVCYPRGSKPEDANFYLYLRARVCENCMEMDVMSVATIVIVDICITGGLLLLVYYWSKNRKAKAKPVTRGAGAGGRQRGQNKERPPPVPNPDYEPIRKGQRDLYSGLNQRRI

SEQ ID NO: 20757 - protein, 417 aa, Artificial Sequence
  Synthetic Polypeptide
MALPVTALLLPLALLLHAARPEVQLVESGGGLVKPEGSLRLSCAASGFTFSRYGMSWVRQAPGKGLEWVSTISGGGTYIYYPDSVKGRFTISRDNAKNSLFLQMNSLRAEDTAVYYCARDNYGRNYDYGMDYWGQGTLVTVSSGGGGSGGGGSGGGGSEIVLTQSPATLSLSPGERATLSCSATSSVSYIHWYQQKPGQAPRLLIYSTSNLASGIPARFSGSGSGTDFTLTIGRLEPEDFAVYYCQQRSSSPFTFGQGTKVEIKRTRFKIPIEELEDRVFVNCNTSITWVEGTVGTLLSDITRLDLGKRILDPRGIYRCNGTDIYKDKESTVQVHYRMCQSCVELDPATVAGIIVTDVIATLLLALGVFCFAGHETGRLSGAADTQALLRNDQVYQPLRDRDDAQYSHLGGNWARNK

SEQ ID NO: 20758 - protein, 427 aa, Artificial Sequence
  Synthetic Polypeptide
MALPVTALLLPLALLLHAARPEVQLVESGGGLVKPEGSLRLSCAASGFTFSRYGMSWVRQAPGKGLEWVSTISGGGTYIYYPDSVKGRFTISRDNAKNSLFLQMNSLRAEDTAVYYCARDNYGRNYDYGMDYWGQGTLVTVSSGGGGSGGGGSGGGGSEIVLTQSPATLSLSPGERATLSCSATSSVSYIHWYQQKPGQAPRLLIYSTSNLASGIPARFSGSGSGTDFTLTIGRLEPEDFAVYYCQQRSSSPFTFGQGTKVEIKRTRQSIKGNHLVKVYDYQEDGSVLLTCDAEAKNITWFKDGKMIGFLTEDKKKWNLGSNAKDPRGMYQCKGSQNKSKPLQVYYRMCQNCIELNAATISGFLFAEIVSIFVLAVGVYFIAGQDGVRQSRASDKQTLLPNDQLYQPLKDREDDQYSHLQGNQLRRN

SEQ ID NO: 20759 - protein, 410 aa, Artificial Sequence
  Synthetic Polypeptide
MALPVTALLLPLALLLHAARPEVQLVESGGGLVKPEGSLRLSCAASGFTFSRYGMSWVRQAPGKGLEWVSTISGGGTYIYYPDSVKGRFTISRDNAKNSLFLQMNSLRAEDTAVYYCARDNYGRNYDYGMDYWGQGTLVTVSSGGGGSGGGGSGGGGSEIVLTQSPATLSLSPGERATLSCSATSSVSYIHWYQQKPGQAPRLLIYSTSNLASGIPARFSGSGSGTDFTLTIGRLEPEDFAVYYCQQRSSSPFTFGQGTKVEIKRTRQSFGLLDPKLCYLLDGILFIYGVILTALFLRVKFSRSADAPAYQQGQNQLYNELNLGRREEYDVLDKRRGRDPEMGGKPQRRKNPQEGLYNELQKDKMAEAYSEIGMKGERRRGKGHDGLYQGLSTATKDTYDALHMQALPPR

SEQ ID NO: 20760 - protein, 643 aa, Artificial Sequence
  Synthetic Polypeptide
MALPVTALLLPLALLLHAARPEIVLTQSPATLSLSPGERATLSCSATSSVSYIHWYQQKPGQAPRLLIYSTSNLASGIPARFSGSGSGTDFTLTIGRLEPEDFAVYYCQQRSSSPFTFGQGTKVEIKRGGGGSGGGGSGGGGSEVQLVESGGGLVKPEGSLRLSCAASGFTFSRYGMSWVRQAPGKGLEWVSTISGGGTYIYYPDSVKGRFTISRDNAKNSLFLQMNSLRAEDTAVYYCARDNYGRNYDYGMDYWGQGTLVTVSSTRGSGIQNPDPAVYQLRDSKSSDKSVCLFTDFDSQTNVSQSKDSDVYITDKTVLDMRSMDFKSNSAVAWSNKSDFACANAFNNSIIPEDTFFPSPESSCDVKLVEKSFETDTNLNFQNLSVIGFRILLLKVAGFNLLMTLRLWSSRAKRSGSGVKQTLNFDLLKLAGDVESNPGPSRGHMTEYKPTVRLATRDDVPRAVRTLAAAFADYPATRHTVDPDRHIERVTELQELFLTRVGLDIGKVWVADDGAAVAVWTTPESVEAGAVFAEIGPRMAELSGSRLAAQQQMEGLLAPHRPKEPAWFLATVGVSPDHQGKGLGSAVVLPGVEAAERAGVPAFLETSAPRNLPFYERLGFTVTADVEVPEGPRTWCMTRKPGA

SEQ ID NO: 20761 - protein, 675 aa, Artificial Sequence
  Synthetic Polypeptide
MALPVTALLLPLALLLHAARPEIVLTQSPATLSLSPGERATLSCSATSSVSYIHWYQQKPGQAPRLLIYSTSNLASGIPARFSGSGSGTDFTLTIGRLEPEDFAVYYCQQRSSSPFTFGQGTKVEIKRGGGGSGGGGSGGGGSEVQLVESGGGLVKPEGSLRLSCAASGFTFSRYGMSWVRQAPGKGLEWVSTISGGGTYIYYPDSVKGRFTISRDNAKNSLFLQMNSLRAEDTAVYYCARDNYGRNYDYGMDYWGQGTLVTVSSLEDLKNVFPPEVAVFEPSEAEISHTQKATLVCLATGFYPDHVELSWWVNGKEVHSGVSTDPQPLKEQPALNDSRYCLSSRLRVSATFWQNPRNHFRCQVQFYGLSENDEWTQDRAKPVTQIVSAEAWGRADCGFTSESYQQGVLSATILYEILLGKATLYAVLVSALVLMAMVKRKDSRGRAKRSGSGATNFSLLKQAGDVEENPGPTRGHMTEYKPTVRLATRDDVPRAVRTLAAAFADYPATRHTVDPDRHIERVTELQELFLTRVGLDIGKVWVADDGAAVAVWTTPESVEAGAVFAEIGPRMAELSGSRLAAQQQMEGLLAPHRPKEPAWFLATVGVSPDHQGKGLGSAVVLPGVEAAERAGVPAFLETSAPRNLPFYERLGFTVTADVEVPEGPRTWCMTRKPGA

SEQ ID NO: 20762 - protein, 725 aa, Artificial Sequence
  Synthetic Polypeptide
MALPVTALLLPLALLLHAARPEIVLTQSPATLSLSPGERATLSCSATSSVSYIHWYQQKPGQAPRLLIYSTSNLASGIPARFSGSGSGTDFTLTIGRLEPEDFAVYYCQQRSSSPFTFGQGTKVEIKRGGGGSGGGGSGGGGSEVQLVESGGGLVKPEGSLRLSCAASGFTFSRYGMSWVRQAPGKGLEWVSTISGGGTYIYYPDSVKGRFTISRDNAKNSLFLQMNSLRAEDTAVYYCARDNYGRNYDYGMDYWGQGTLVTVSSTREQKLISEEDLGSGTPFPSLAPPIMLLVDGKQQMVVVCLVLDVAPPGLDSPIWFSAGNGSALDAFTYGPSPATDGTWTNLAHLSLPSEELASWEPLVCHTGPGAEGHSRSTQPMHLSGEASTARTCPQEPLRGTPGGALWLGVLRLLLFKLLLFDLLLTCSCLCDPAGPLPSPATTTRLRALGSHRLHPATETGGREATSSPRPQPRDRRWGDTPPGRKPGSPVRAKRSGSGVKQTLNFDLLKLAGDVESNPGPSRSRGHMTEYKPTVRLATRDDVPRAVRTLAAAFADYPATRHTVDPDRHIERVTELQELFLTRVGLDIGKVWVADDGAAVAVWTTPESVEAGAVFAEIGPRMAELSGSRLAAQQQMEGLLAPHRPKEPAWFLATVGVSPDHQGKGLGSAVVLPGVEAAERAGVPAFLETSAPRNLPFYERLGFTVTADVEVPEGPRTWCMTRKPGA

SEQ ID NO: 20763 - protein, 538 aa, Artificial Sequence
  Synthetic Polypeptide
MALPVTALLLPLALLLHAARPEIVLTQSPATLSLSPGERATLSCSATSSVSYIHWYQQKPGQAPRLLIYSTSNLASGIPARFSGSGSGTDFTLTIGRLEPEDFAVYYCQQRSSSPFTFGQGTKVEIKRLEDLKNVFPPEVAVFEPSEAEISHTQKATLVCLATGFYPDHVELSWWVNGKEVHSGVSTDPQPLKEQPALNDSRYCLSSRLRVSATFWQNPRNHFRCQVQFYGLSENDEWTQDRAKPVTQIVSAEAWGRADCGFTSESYQQGVLSATILYEILLGKATLYAVLVSALVLMAMVKRKDSRGRAKRSGSGATNFSLLKQAGDVEENPGPTRGHMTEYKPTVRLATRDDVPRAVRTLAAAFADYPATRHTVDPDRHIERVTELQELFLTRVGLDIGKVWVADDGAAVAVWTTPESVEAGAVFAEIGPRMAELSGSRLAAQQQMEGLLAPHRPKEPAWFLATVGVSPDHQGKGLGSAVVLPGVEAAERAGVPAFLETSAPRNLPFYERLGFTVTADVEVPEGPRTWCMTRKPGA

SEQ ID NO: 20764 - protein, 308 aa, Artificial Sequence
  Synthetic Polypeptide
MALPVTALLLPLALLLHAARPEIVLTQSPATLSLSPGERATLSCSATSSVSYIHWYQQKPGQAPRLLIYSTSNLASGIPARFSGSGSGTDFTLTIGRLEPEDFAVYYCQQRSSSPFTFGQGTKVEIKRLEDLKNVFPPEVAVFEPSEAEISHTQKATLVCLATGFYPDHVELSWWVNGKEVHSGVSTDPQPLKEQPALNDSRYCLSSRLRVSATFWQNPRNHFRCQVQFYGLSENDEWTQDRAKPVTQIVSAEAWGRADCGFTSESYQQGVLSATILYEILLGKATLYAVLVSALVLMAMVKRKDSRG

SEQ ID NO: 20765 - protein, 451 aa, Artificial Sequence
  Synthetic Polypeptide
MDWIWRILFLVGAATGAHSFEEVQLVESGGGLVKPEGSLRLSCAASGFTFSRYGMSWVRQAPGKGLEWVSTISGGGTYIYYPDSVKGRFTISRDNAKNSLFLQMNSLRAEDTAVYYCARDNYGRNYDYGMDYWGQGTLVTVSSTRIQNPDPAVYQLRDSKSSDKSVCLFTDFDSQTNVSQSKDSDVYITDKTVLDMRSMDFKSNSAVAWSNKSDFACANAFNNSIIPEDTFFPSPESSCDVKLVEKSFETDTNLNFQNLSVIGFRILLLKVAGFNLLMTLRLWSSRAKRSGSGVKQTLNFDLLKLAGDVESNPGPSRGHMAKPLSQEESTLIERATATINSIPISEDYSVASAALSSDGRIFTGVNVYHFTGGPCAELVVLGTAAAAAAGNLTCIVAIGNENRGILSPCGRCRQVLLDLHPGIKAIVKDSDGQPTAVGIRELLPSGYVWEG

SEQ ID NO: 20766 - protein, 285 aa, Artificial Sequence
  Synthetic Polypeptide
MDWIWRILFLVGAATGAHSFEEVQLVESGGGLVKPEGSLRLSCAASGFTFSRYGMSWVRQAPGKGLEWVSTISGGGTYIYYPDSVKGRFTISRDNAKNSLFLQMNSLRAEDTAVYYCARDNYGRNYDYGMDYWGQGTLVTVSSTRIQNPDPAVYQLRDSKSSDKSVCLFTDFDSQTNVSQSKDSDVYITDKTVLDMRSMDFKSNSAVAWSNKSDFACANAFNNSIIPEDTFFPSPESSCDVKLVEKSFETDTNLNFQNLSVIGFRILLLKVAGFNLLMTLRLWSS

SEQ ID NO: 20767 - protein, 556 aa, Artificial Sequence
  Synthetic Polypeptide
MALPVTALLLPLALLLHAARPEIVLTQSPATLSLSPGERATLSCSATSSVSYIHWYQQKPGQAPRLLIYSTSNLASGIPARFSGSGSGTDFTLTIGRLEPEDFAVYYCQQRSSSPFTFGQGTKVEIKRLEGKPIPNPLLGLDSTGSGEDLKNVFPPEVAVFEPSEAEISHTQKATLVCLATGFYPDHVELSWWVNGKEVHSGVCTDPQPLKEQPALNDSRYCLSSRLRVSATFWQNPRNHFRCQVQFYGLSENDEWTQDRAKPVTQIVSAEAWGRADCGFTSESYQQGVLSATILYEILLGKATLYAVLVSALVLMAMVKRKDSRGRAKRSGSGATNFSLLKQAGDVEENPGPTRGHMTEYKPTVRLATRDDVPRAVRTLAAAFADYPATRHTVDPDRHIERVTELQELFLTRVGLDIGKVWVADDGAAVAVWTTPESVEAGAVFAEIGPRMAELSGSRLAAQQQMEGLLAPHRPKEPAWFLATVGVSPDHQGKGLGSAVVLPGVEAAERAGVPAFLETSAPRNLPFYERLGFTVTADVEVPEGPRTWCMTRKPGA

SEQ ID NO: 20768 - protein, 326 aa, Artificial Sequence
  Synthetic Polypeptide
MALPVTALLLPLALLLHAARPEIVLTQSPATLSLSPGERATLSCSATSSVSYIHWYQQKPGQAPRLLIYSTSNLASGIPARFSGSGSGTDFTLTIGRLEPEDFAVYYCQQRSSSPFTFGQGTKVEIKRLEGKPIPNPLLGLDSTGSGEDLKNVFPPEVAVFEPSEAEISHTQKATLVCLATGFYPDHVELSWWVNGKEVHSGVCTDPQPLKEQPALNDSRYCLSSRLRVSATFWQNPRNHFRCQVQFYGLSENDEWTQDRAKPVTQIVSAEAWGRADCGFTSESYQQGVLSATILYEILLGKATLYAVLVSALVLMAMVKRKDSRG

SEQ ID NO: 20769 - protein, 463 aa, Artificial Sequence
  Synthetic Polypeptide
MDWIWRILFLVGAATGAHSFEEVQLVESGGGLVKPEGSLRLSCAASGFTFSRYGMSWVRQAPGKGLEWVSTISGGGTYIYYPDSVKGRFTISRDNAKNSLFLQMNSLRAEDTAVYYCARDNYGRNYDYGMDYWGQGTLVTVSSTREQKLISEEDGSGIQNPDPAVYQLRDSKSSDKSVCLFTDFDSQTNVSQSKDSDVYITDKCVLDMRSMDFKSNSAVAWSNKSDFACANAFNNSIIPEDTFFPSPESSCDVKLVEKSFETDTNLNFQNLSVIGFRILLLKVAGFNLLMTLRLWSSRAKRSGSGVKQTLNFDLLKLAGDVESNPGPSRGHMAKPLSQEESTLIERATATINSIPISEDYSVASAALSSDGRIFTGVNVYHFTGGPCAELVVLGTAAAAAAGNLTCIVAIGNENRGILSPCGRCRQVLLDLHPGIKAIVKDSDGQPTAVGIRELLPSGYVWEG

SEQ ID NO: 20770 - protein, 297 aa, Artificial Sequence
  Synthetic Polypeptide
MDWIWRILFLVGAATGAHSFEEVQLVESGGGLVKPEGSLRLSCAASGFTFSRYGMSWVRQAPGKGLEWVSTISGGGTYIYYPDSVKGRFTISRDNAKNSLFLQMNSLRAEDTAVYYCARDNYGRNYDYGMDYWGQGTLVTVSSTREQKLISEEDGSGIQNPDPAVYQLRDSKSSDKSVCLFTDFDSQTNVSQSKDSDVYITDKCVLDMRSMDFKSNSAVAWSNKSDFACANAFNNSIIPEDTFFPSPESSCDVKLVEKSFETDTNLNFQNLSVIGFRILLLKVAGFNLLMTLRLWSS

SEQ ID NO: 20771 - protein, 643 aa, Artificial Sequence
  Synthetic Polypeptide
MALPVTALLLPLALLLHAARPEIVLTQSPATLSLSPGERATLSCSATSSVSYIHWYQQKPGQAPRLLIYSTSNLASGIPARFSGSGSGTDFTLTIGRLEPEDFAVYYCQQRSSSPFTFGQGTKVEIKRGGGGSGGGGSGGGGSEVQLVESGGGLVKPEGSLRLSCAASGFTFSRYGMSWVRQAPGKGLEWVSTISGGGTYIYYPDSVKGRFTISRDNAKNSLFLQMNSLRAEDTAVYYCARDNYGRNYDYGMDYWGQGTLVTVSSTRGSGIQNPDPAVYQLRDSKSSDKSVCLFTDFDSQTNVSQSKDSDVYITDKTVLDMRSMDFKSNSAVAWSNKSDFACANAFNNSIIPEDTFFPSSDVPCDVKLVEKSFETDTNLNFQNLSVIGFRILLLKVAGFNLLMTLRLWSSRAKRSGSGVKQTLNFDLLKLAGDVESNPGPSRGHMTEYKPTVRLATRDDVPRAVRTLAAAFADYPATRHTVDPDRHIERVTELQELFLTRVGLDIGKVWVADDGAAVAVWTTPESVEAGAVFAEIGPRMAELSGSRLAAQQQMEGLLAPHRPKEPAWFLATVGVSPDHQGKGLGSAVVLPGVEAAERAGVPAFLETSAPRNLPFYERLGFTVTADVEVPEGPRTWCMTRKPGA

SEQ ID NO: 20772 - protein, 675 aa, Artificial Sequence
  Synthetic Polypeptide
MALPVTALLLPLALLLHAARPEIVLTQSPATLSLSPGERATLSCSATSSVSYIHWYQQKPGQAPRLLIYSTSNLASGIPARFSGSGSGTDFTLTIGRLEPEDFAVYYCQQRSSSPFTFGQGTKVEIKRGGGGSGGGGSGGGGSEVQLVESGGGLVKPEGSLRLSCAASGFTFSRYGMSWVRQAPGKGLEWVSTISGGGTYIYYPDSVKGRFTISRDNAKNSLFLQMNSLRAEDTAVYYCARDNYGRNYDYGMDYWGQGTLVTVSSLEDLKNVFPPEVAVFEPSKAEIAHTQKATLVCLATGFYPDHVELSWWVNGKEVHSGVSTDPQPLKEQPALNDSRYCLSSRLRVSATFWQNPRNHFRCQVQFYGLSENDEWTQDRAKPVTQIVSAEAWGRADCGITSASYHQGVLSATILYEILLGKATLYAVLVSALVLMAMVKRKDSRGRAKRSGSGATNFSLLKQAGDVEENPGPTRGHMTEYKPTVRLATRDDVPRAVRTLAAAFADYPATRHTVDPDRHIERVTELQELFLTRVGLDIGKVWVADDGAAVAVWTTPESVEAGAVFAEIGPRMAELSGSRLAAQQQMEGLLAPHRPKEPAWFLATVGVSPDHQGKGLGSAVVLPGVEAAERAGVPAFLETSAPRNLPFYERLGFTVTADVEVPEGPRTWCMTRKPGA

SEQ ID NO: 20773 - protein, 698 aa, Artificial Sequence
  Synthetic Polypeptide
MALPVTALLLPLALLLHAARPEIVLTQSPATLSLSPGERATLSCSATSSVSYIHWYQQKPGQAPRLLIYSTSNLASGIPARFSGSGSGTDFTLTIGRLEPEDFAVYYCQQRSSSPFTFGQGTKVEIKRGGGGSGGGGSGGGGSEVQLVESGGGLVKPEGSLRLSCAASGFTFSRYGMSWVRQAPGKGLEWVSTISGGGTYIYYPDSVKGRFTISRDNAKNSLFLQMNSLRAEDTAVYYCARDNYGRNYDYGMDYWGQGTLVTVSSTRGSGGGGSGGGGSGDGNEEMGGITQTPYKVSISGTTVILTCPQYPGSEILWQHNDKNIGGDEDDKNIGSDEDHLSLKEFSELEQSGYYVCYPRGSKPEDANFYLYLRARVCENCMEMDVMSVATIVIVDICITGGLLLLVYYWSKNRKAKAKPVTRGAGAGGRQRGQNKERPPPVPNPDYEPIRKGQRDLYSGLNQRRIRAKRSGSGVKQTLNFDLLKLAGDVESNPGPSRGHMTEYKPTVRLATRDDVPRAVRTLAAAFADYPATRHTVDPDRHIERVTELQELFLTRVGLDIGKVWVADDGAAVAVWTTPESVEAGAVFAEIGPRMAELSGSRLAAQQQMEGLLAPHRPKEPAWFLATVGVSPDHQGKGLGSAVVLPGVEAAERAGVPAFLETSAPRNLPFYERLGFTVTADVEVPEGPRTWCMTRKPGA

SEQ ID NO: 20774 - protein, 663 aa, Artificial Sequence
  Synthetic Polypeptide
MALPVTALLLPLALLLHAARPEIVLTQSPATLSLSPGERATLSCSATSSVSYIHWYQQKPGQAPRLLIYSTSNLASGIPARFSGSGSGTDFTLTIGRLEPEDFAVYYCQQRSSSPFTFGQGTKVEIKRGGGGSGGGGSGGGGSEVQLVESGGGLVKPEGSLRLSCAASGFTFSRYGMSWVRQAPGKGLEWVSTISGGGTYIYYPDSVKGRFTISRDNAKNSLFLQMNSLRAEDTAVYYCARDNYGRNYDYGMDYWGQGTLVTVSSTRGSGGGGSGGGGSGFKIPIEELEDRVFVNCNTSITWVEGTVGTLLSDITRLDLGKRILDPRGIYRCNGTDIYKDKESTVQVHYRMCQSCVELDPATVAGIIVTDVIATLLLALGVFCFAGHETGRLSGAADTQALLRNDQVYQPLRDRDDAQYSHLGGNWARNKRAKRSGSGVKQTLNFDLLKLAGDVESNPGPSRGHMTEYKPTVRLATRDDVPRAVRTLAAAFADYPATRHTVDPDRHIERVTELQELFLTRVGLDIGKVWVADDGAAVAVWTTPESVEAGAVFAEIGPRMAELSGSRLAAQQQMEGLLAPHRPKEPAWFLATVGVSPDHQGKGLGSAVVLPGVEAAERAGVPAFLETSAPRNLPFYERLGFTVTADVEVPEGPRTWCMTRKPGA

SEQ ID NO: 20775 - protein, 673 aa, Artificial Sequence
  Synthetic Polypeptide
MALPVTALLLPLALLLHAARPEIVLTQSPATLSLSPGERATLSCSATSSVSYIHWYQQKPGQAPRLLIYSTSNLASGIPARFSGSGSGTDFTLTIGRLEPEDFAVYYCQQRSSSPFTFGQGTKVEIKRGGGGSGGGGSGGGGSEVQLVESGGGLVKPEGSLRLSCAASGFTFSRYGMSWVRQAPGKGLEWVSTISGGGTYIYYPDSVKGRFTISRDNAKNSLFLQMNSLRAEDTAVYYCARDNYGRNYDYGMDYWGQGTLVTVSSTRGSGGGGSGGGGSGQSIKGNHLVKVYDYQEDGSVLLTCDAEAKNITWFKDGKMIGFLTEDKKKWNLGSNAKDPRGMYQCKGSQNKSKPLQVYYRMCQNCIELNAATISGFLFAEIVSIFVLAVGVYFIAGQDGVRQSRASDKQTLLPNDQLYQPLKDREDDQYSHLQGNQLRRNRAKRSGSGVKQTLNFDLLKLAGDVESNPGPSRGHMTEYKPTVRLATRDDVPRAVRTLAAAFADYPATRHTVDPDRHIERVTELQELFLTRVGLDIGKVWVADDGAAVAVWTTPESVEAGAVFAEIGPRMAELSGSRLAAQQQMEGLLAPHRPKEPAWFLATVGVSPDHQGKGLGSAVVLPGVEAAERAGVPAFLETSAPRNLPFYERLGFTVTADVEVPEGPRTWCMTRKPGA

SEQ ID NO: 20776 - protein, 656 aa, Artificial Sequence
  Synthetic Polypeptide
MALPVTALLLPLALLLHAARPEIVLTQSPATLSLSPGERATLSCSATSSVSYIHWYQQKPGQAPRLLIYSTSNLASGIPARFSGSGSGTDFTLTIGRLEPEDFAVYYCQQRSSSPFTFGQGTKVEIKRGGGGSGGGGSGGGGSEVQLVESGGGLVKPEGSLRLSCAASGFTFSRYGMSWVRQAPGKGLEWVSTISGGGTYIYYPDSVKGRFTISRDNAKNSLFLQMNSLRAEDTAVYYCARDNYGRNYDYGMDYWGQGTLVTVSSTRGSGGGGSGGGGSGQSFGLLDPKLCYLLDGILFIYGVILTALFLRVKFSRSADAPAYQQGQNQLYNELNLGRREEYDVLDKRRGRDPEMGGKPQRRKNPQEGLYNELQKDKMAEAYSEIGMKGERRRGKGHDGLYQGLSTATKDTYDALHMQALPPRRAKRSGSGVKQTLNFDLLKLAGDVESNPGPSRGHMTEYKPTVRLATRDDVPRAVRTLAAAFADYPATRHTVDPDRHIERVTELQELFLTRVGLDIGKVWVADDGAAVAVWTTPESVEAGAVFAEIGPRMAELSGSRLAAQQQMEGLLAPHRPKEPAWFLATVGVSPDHQGKGLGSAVVLPGVEAAERAGVPAFLETSAPRNLPFYERLGFTVTADVEVPEGPRTWCMTRKPGA

SEQ ID NO: 20777 - protein, 757 aa, Artificial Sequence
  Synthetic Polypeptide
MALPVTALLLPLALLLHAARPEVQLVESGGGLVQPGGSLRLSCAASGFSFSDFWMSWVRQAPGKGLEWVATISQAGSEKDYVDSVKGRFTISRDNAKKSLYLQMNSLRAEDTAVYYCASGVYSFDYRGQGTLVTVSSGTGGGGSGGGGSGGGGSEFEIVLTQSPATLSLSPGERATLSCSATSSVSYIHWYQQKPGQAPRLLIYSTSNLASGIPARFSGSGSGTDFTLTIGRLEPEDFAVYYCQQRSSSPFTFGQGTKVEIKRLEDLKNVFPPEVAVFEPSEAEISHTQKATLVCLATGFYPDHVELSWWVNGKEVHSGVCTDPQPLKEQPALNDSRYCLSSRLRVSATFWQNPRNHFRCQVQFYGLSENDEWTQDRAKPVTQIVSAEAWGRADCGFTSESYQQGVLSATILYEILLGKATLYAVLVSALVLMAMVKRKDSRGRAKRSGSGATNFSLLKQAGDVEENPGPTSMDWIWRILFLVGAATGAHSFEEVQLVESGGGLVKPEGSLRLSCAASGFTFSRYGMSWVRQAPGKGLEWVSTISGGGTYIYYPDSVKGRFTISRDNAKNSLFLQMNSLRAEDTAVYYCARDNYGRNYDYGMDYWGQGTLVTVSSTRIQNPDPAVYQLRDSKSSDKSVCLFTDFDSQTNVSQSKDSDVYITDKCVLDMRSMDFKSNSAVAWSNKSDFACANAFNNSIIPEDTFFPSPESSCDVKLVEKSFETDTNLNFQNLSVIGFRILLLKVAGFNLLMTLRLWSS

SEQ ID NO: 20778 - protein, 761 aa, Artificial Sequence
  Synthetic Polypeptide
MALPVTALLLPLALLLHAARPEVQLVESGGGLVQPGGSLRLSCAASGFSFSDFWMSWVRQAPGKGLEWVATISQAGSEKDYVDSVKGRFTISRDNAKKSLYLQMNSLRAEDTAVYYCASGVYSFDYRGQGTLVTVSSGTGGGGSGGGGSGGGGSEFEIVLTQSPATLSLSPGERATLSCSATSSVSYIHWYQQKPGQAPRLLIYSTSNLASGIPARFSGSGSGTDFTLTIGRLEPEDFAVYYCQQRSSSPFTFGQGTKVEIKRLEIQNPDPAVYQLRDSKSSDKSVCLFTDFDSQTNVSQSKDSDVYITDKCVLDMRSMDFKSNSAVAWSNKSDFACANAFNNSIIPEDTFFPSPESSCDVKLVEKSFETDTNLNFQNLSVIGFRILLLKVAGFNLLMTLRLWSSRAKRSGSGVKQTLNFDLLKLAGDVESNPGPTSMDWIWRILFLVGAATGAHSFEEVQLVESGGGLVKPEGSLRLSCAASGFTFSRYGMSWVRQAPGKGLEWVSTISGGGTYIYYPDSVKGRFTISRDNAKNSLFLQMNSLRAEDTAVYYCARDNYGRNYDYGMDYWGQGTLVTVSSTREDLKNVFPPEVAVFEPSEAEISHTQKATLVCLATGFYPDHVELSWWVNGKEVHSGVCTDPQPLKEQPALNDSRYCLSSRLRVSATFWQNPRNHFRCQVQFYGLSENDEWTQDRAKPVTQIVSAEAWGRADCGFTSESYQQGVLSATILYEILLGKATLYAVLVSALVLMAMVKRKDSRG

SEQ ID NO: 20779 - protein, 953 aa, Artificial Sequence
  Synthetic Polypeptide
MALPVTALLLPLALLLHAARPEVQLVESGGGLVQPGGSLRLSCAASGFSFSDFWMSWVRQAPGKGLEWVATISQAGSEKDYVDSVKGRFTISRDNAKKSLYLQMNSLRAEDTAVYYCASGVYSFDYRGQGTLVTVSSGTGGGGSGGGGSGGGGSEFEIVLTQSPATLSLSPGERATLSCSATSSVSYIHWYQQKPGQAPRLLIYSTSNLASGIPARFSGSGSGTDFTLTIGRLEPEDFAVYYCQQRSSSPFTFGQGTKVEIKRLEDLKNVFPPEVAVFEPSEAEISHTQKATLVCLATGFYPDHVELSWWVNGKEVHSGVSTDPQPLKEQPALNDSRYCLSSRLRVSATFWQNPRNHFRCQVQFYGLSENDEWTQDRAKPVTQIVSAEAWGRADCGSQSFGLLDPKLCYLLDGILFIYGVILTALFLRVKFSRSADAPAYQQGQNQLYNELNLGRREEYDVLDKRRGRDPEMGGKPQRRKNPQEGLYNELQKDKMAEAYSEIGMKGERRRGKGHDGLYQGLSTATKDTYDALHMQALPPRRAKRSGSGATNFSLLKQAGDVEENPGPTSMDWIWRILFLVGAATGAHSFEEVQLVESGGGLVKPEGSLRLSCAASGFTFSRYGMSWVRQAPGKGLEWVSTISGGGTYIYYPDSVKGRFTISRDNAKNSLFLQMNSLRAEDTAVYYCARDNYGRNYDYGMDYWGQGTLVTVSSTRIQNPDPAVYQLRDSKSSDKSVCLFTDFDSQTNVSQSKDSDVYITDKTVLDMRSMDFKSNSAVAWSNKSDFACANAFNNSIIPEDTFFPSPESSCGTQSFGLLDPKLCYLLDGILFIYGVILTALFLRVKFSRSADAPAYQQGQNQLYNELNLGRREEYDVLDKRRGRDPEMGGKPQRRKNPQEGLYNELQKDKMAEAYSEIGMKGERRRGKGHDGLYQGLSTATKDTYDALHMQALPPR

SEQ ID NO: 20780 - protein, 783 aa, Artificial Sequence
  Synthetic Polypeptide
MALPVTALLLPLALLLHAARPEVQLVESGGGLVQPGGSLRLSCAASGFSFSDFWMSWVRQAPGKGLEWVATISQAGSEKDYVDSVKGRFTISRDNAKKSLYLQMNSLRAEDTAVYYCASGVYSFDYRGQGTLVTVSSGTGGGGSGGGGSGGGGSEFEIVLTQSPATLSLSPGERATLSCSATSSVSYIHWYQQKPGQAPRLLIYSTSNLASGIPARFSGSGSGTDFTLTIGRLEPEDFAVYYCQQRSSSPFTFGQGTKVEIKRLEGQPKANPTVTLFPPSSEELQANKATLVCLISDFYPGAVTVAWKADGSPVKAGVETTKPSKQSNNKYAASSYLSLTPEQWKSHRSYSCQVTHEGSTVEKTVAPTECSPIKTDVITMDPKDNCSKDANDTLLLQLTNTSAYYMYLLLLLKSVVYFAIITCCLLRRTAFCCNGEKSRAKRSGSGATNFSLLKQAGDVEENPGPTSMDWIWRILFLVGAATGAHSFEEVQLVESGGGLVKPEGSLRLSCAASGFTFSRYGMSWVRQAPGKGLEWVSTISGGGTYIYYPDSVKGRFTISRDNAKNSLFLQMNSLRAEDTAVYYCARDNYGRNYDYGMDYWGQGTLVTVSSTRASTKGPSVFPLAPSSKSTSGGTAALGCLVKDYFPEPVTVSWNSGALTSGVHTFPAVLQSSGLYSLSSVVTVPSSSLGTQTYICNVNHKPSNTKVDKRVEPKSCEVKTDSTDHVKPKETENTKQPSKSCHKPKAIVHTEKVNMMSLTVLGLRMLFAKTVAVNFLLTAKLFFL

SEQ ID NO: 20781 - protein, 764 aa, Artificial Sequence
  Synthetic Polypeptide
MALPVTALLLPLALLLHAARPEVQLVESGGGLVQPGGSLRLSCAASGFSFSDFWMSWVRQAPGKGLEWVATISQAGSEKDYVDSVKGRFTISRDNAKKSLYLQMNSLRAEDTAVYYCASGVYSFDYRGQGTLVTVSSGTGGGGSGGGGSGGGGSEFEIVLTQSPATLSLSPGERATLSCSATSSVSYIHWYQQKPGQAPRLLIYSTSNLASGIPARFSGSGSGTDFTLTIGRLEPEDFAVYYCQQRSSSPFTFGQGTKVEIKRLEGQPKANPTVTLFPPSSEELQANKATLVCLISDFYPGAVTVAWKADGSPVKAGVETTKPSKQSNNKYAASSYLSLTPEQWKSHRSYSCQVTHEGSTVEKTVAPTECSGRADCGFTSESYQQGVLSATILYEILLGKATLYAVLVSALVLMAMVKRKDSRGRAKRSGSGVKQTLNFDLLKLAGDVESNPGPTSMDWIWRILFLVGAATGAHSFEEVQLVESGGGLVKPEGSLRLSCAASGFTFSRYGMSWVRQAPGKGLEWVSTISGGGTYIYYPDSVKGRFTISRDNAKNSLFLQMNSLRAEDTAVYYCARDNYGRNYDYGMDYWGQGTLVTVSSTRASTKGPSVFPLAPSSKSTSGGTAALGCLVKDYFPEPVTVSWNSGALTSGVHTFPAVLQSSGLYSLSSVVTVPSSSLGTQTYICNVNHKPSNTKVDKRVEPKSCIPEDTFFPSPESSCDVKLVEKSFETDTNLNFQNLSVIGFRILLLKVAGFNLLMTLRLWSS

SEQ ID NO: 20782 - protein, 898 aa, Artificial Sequence
  Synthetic Polypeptide
MALPVTALLLPLALLLHAARPEVQLVESGGGLVQPGGSLRLSCAASGFSFSDFWMSWVRQAPGKGLEWVATISQAGSEKDYVDSVKGRFTISRDNAKKSLYLQMNSLRAEDTAVYYCASGVYSFDYRGQGTLVTVSSGTGGGGSGGGGSGGGGSEFEIVLTQSPATLSLSPGERATLSCSATSSVSYIHWYQQKPGQAPRLLIYSTSNLASGIPARFSGSGSGTDFTLTIGRLEPEDFAVYYCQQRSSSPFTFGQGTKVEIKRLEIQNPDPAVYQLRDSKSSDKSVCLFTDFDSQTNVSQSKDSDVYITDKCVLDMRSMDFKSNSAVAWSNKSDFACANAFNNSIIPEDTFFPSPESSCDVKLVEKSFETDTNLNFQNLSVIGFRILLLKVAGFNLLMTLRLWSSRAKRSGSGVKQTLNFDLLKLAGDVESNPGPTSMDWIWRILFLVGAATGAHSGPQLQLQESGPGLVKPSETLSLTCTVSGDSISSGDYYWGWIRQPPGKGLEWIGHIYYSGVTYYNPSLKSRVTISVDTSRNQFSLKLSSVTAADTAVYYCTREDSSNWRSRGQGTLVTVSSGSGGGGSGGGGSGGGGSFEEVQLVESGGGLVKPEGSLRLSCAASGFTFSRYGMSWVRQAPGKGLEWVSTISGGGTYIYYPDSVKGRFTISRDNAKNSLFLQMNSLRAEDTAVYYCARDNYGRNYDYGMDYWGQGTLVTVSSTREDLKNVFPPEVAVFEPSEAEISHTQKATLVCLATGFYPDHVELSWWVNGKEVHSGVCTDPQPLKEQPALNDSRYCLSSRLRVSATFWQNPRNHFRCQVQFYGLSENDEWTQDRAKPVTQIVSAEAWGRADCGFTSESYQQGVLSATILYEILLGKATLYAVLVSALVLMAMVKRKDSRG

SEQ ID NO: 20783 - protein, 1090 aa, Artificial Sequence
  Synthetic Polypeptide
MALPVTALLLPLALLLHAARPEVQLVESGGGLVQPGGSLRLSCAASGFSFSDFWMSWVRQAPGKGLEWVATISQAGSEKDYVDSVKGRFTISRDNAKKSLYLQMNSLRAEDTAVYYCASGVYSFDYRGQGTLVTVSSGTGGGGSGGGGSGGGGSEFEIVLTQSPATLSLSPGERATLSCSATSSVSYIHWYQQKPGQAPRLLIYSTSNLASGIPARFSGSGSGTDFTLTIGRLEPEDFAVYYCQQRSSSPFTFGQGTKVEIKRLEDLKNVFPPEVAVFEPSEAEISHTQKATLVCLATGFYPDHVELSWWVNGKEVHSGVSTDPQPLKEQPALNDSRYCLSSRLRVSATFWQNPRNHFRCQVQFYGLSENDEWTQDRAKPVTQIVSAEAWGRADCGSQSFGLLDPKLCYLLDGILFIYGVILTALFLRVKFSRSADAPAYQQGQNQLYNELNLGRREEYDVLDKRRGRDPEMGGKPQRRKNPQEGLYNELQKDKMAEAYSEIGMKGERRRGKGHDGLYQGLSTATKDTYDALHMQALPPRRAKRSGSGATNFSLLKQAGDVEENPGPTSMDWIWRILFLVGAATGAHSGPQLQLQESGPGLVKPSETLSLTCTVSGDSISSGDYYWGWIRQPPGKGLEWIGHIYYSGVTYYNPSLKSRVTISVDTSRNQFSLKLSSVTAADTAVYYCTREDSSNWRSRGQGTLVTVSSGSGGGGSGGGGSGGGGSFEEVQLVESGGGLVKPEGSLRLSCAASGFTFSRYGMSWVRQAPGKGLEWVSTISGGGTYIYYPDSVKGRFTISRDNAKNSLFLQMNSLRAEDTAVYYCARDNYGRNYDYGMDYWGQGTLVTVSSTRIQNPDPAVYQLRDSKSSDKSVCLFTDFDSQTNVSQSKDSDVYITDKTVLDMRSMDFKSNSAVAWSNKSDFACANAFNNSIIPEDTFFPSPESSCGTQSFGLLDPKLCYLLDGILFIYGVILTALFLRVKFSRSADAPAYQQGQNQLYNELNLGRREEYDVLDKRRGRDPEMGGKPQRRKNPQEGLYNELQKDKMAEAYSEIGMKGERRRGKGHDGLYQGLSTATKDTYDALHMQALPPR

SEQ ID NO: 20784 - protein, 920 aa, Artificial Sequence
  Synthetic Polypeptide
MALPVTALLLPLALLLHAARPEVQLVESGGGLVQPGGSLRLSCAASGFSFSDFWMSWVRQAPGKGLEWVATISQAGSEKDYVDSVKGRFTISRDNAKKSLYLQMNSLRAEDTAVYYCASGVYSFDYRGQGTLVTVSSGTGGGGSGGGGSGGGGSEFEIVLTQSPATLSLSPGERATLSCSATSSVSYIHWYQQKPGQAPRLLIYSTSNLASGIPARFSGSGSGTDFTLTIGRLEPEDFAVYYCQQRSSSPFTFGQGTKVEIKRLEGQPKANPTVTLFPPSSEELQANKATLVCLISDFYPGAVTVAWKADGSPVKAGVETTKPSKQSNNKYAASSYLSLTPEQWKSHRSYSCQVTHEGSTVEKTVAPTECSPIKTDVITMDPKDNCSKDANDTLLLQLTNTSAYYMYLLLLLKSVVYFAIITCCLLRRTAFCCNGEKSRAKRSGSGATNFSLLKQAGDVEENPGPTSMDWIWRILFLVGAATGAHSGPQLQLQESGPGLVKPSETLSLTCTVSGDSISSGDYYWGWIRQPPGKGLEWIGHIYYSGVTYYNPSLKSRVTISVDTSRNQFSLKLSSVTAADTAVYYCTREDSSNWRSRGQGTLVTVSSGSGGGGSGGGGSGGGGSFEEVQLVESGGGLVKPEGSLRLSCAASGFTFSRYGMSWVRQAPGKGLEWVSTISGGGTYIYYPDSVKGRFTISRDNAKNSLFLQMNSLRAEDTAVYYCARDNYGRNYDYGMDYWGQGTLVTVSSTRASTKGPSVFPLAPSSKSTSGGTAALGCLVKDYFPEPVTVSWNSGALTSGVHTFPAVLQSSGLYSLSSVVTVPSSSLGTQTYICNVNHKPSNTKVDKRVEPKSCEVKTDSTDHVKPKETENTKQPSKSCHKPKAIVHTEKVNMMSLTVLGLRMLFAKTVAVNFLLTAKLFFL

SEQ ID NO: 20785 - protein, 901 aa, Artificial Sequence
  Synthetic Polypeptide
MALPVTALLLPLALLLHAARPEVQLVESGGGLVQPGGSLRLSCAASGFSFSDFWMSWVRQAPGKGLEWVATISQAGSEKDYVDSVKGRFTISRDNAKKSLYLQMNSLRAEDTAVYYCASGVYSFDYRGQGTLVTVSSGTGGGGSGGGGSGGGGSEFEIVLTQSPATLSLSPGERATLSCSATSSVSYIHWYQQKPGQAPRLLIYSTSNLASGIPARFSGSGSGTDFTLTIGRLEPEDFAVYYCQQRSSSPFTFGQGTKVEIKRLEGQPKANPTVTLFPPSSEELQANKATLVCLISDFYPGAVTVAWKADGSPVKAGVETTKPSKQSNNKYAASSYLSLTPEQWKSHRSYSCQVTHEGSTVEKTVAPTECSGRADCGFTSESYQQGVLSATILYEILLGKATLYAVLVSALVLMAMVKRKDSRGRAKRSGSGVKQTLNFDLLKLAGDVESNPGPTSMDWIWRILFLVGAATGAHSGPQLQLQESGPGLVKPSETLSLTCTVSGDSISSGDYYWGWIRQPPGKGLEWIGHIYYSGVTYYNPSLKSRVTISVDTSRNQFSLKLSSVTAADTAVYYCTREDSSNWRSRGQGTLVTVSSGSGGGGSGGGGSGGGGSFEEVQLVESGGGLVKPEGSLRLSCAASGFTFSRYGMSWVRQAPGKGLEWVSTISGGGTYIYYPDSVKGRFTISRDNAKNSLFLQMNSLRAEDTAVYYCARDNYGRNYDYGMDYWGQGTLVTVSSTRASTKGPSVFPLAPSSKSTSGGTAALGCLVKDYFPEPVTVSWNSGALTSGVHTFPAVLQSSGLYSLSSVVTVPSSSLGTQTYICNVNHKPSNTKVDKRVEPKSCIPEDTFFPSPESSCDVKLVEKSFETDTNLNFQNLSVIGFRILLLKVAGFNLLMTLRLWSS

SEQ ID NO: 20786 - protein, 758 aa, Artificial Sequence
  Synthetic Polypeptide
MALPVTALLLPLALLLHAARPEVQVLESGGGLVQPGGSLRLSCAASGFTFSNFAMSWVRQAPGKGLEWVSTISGSAGTTDYADSVKGRFTISRDNSKKTLYLQMNSLRVEDTAVYYCADGRGPFFDYRGQGTLVTVSSGTGGGGSGGGGSGGGGSEFEIVLTQSPATLSLSPGERATLSCSATSSVSYIHWYQQKPGQAPRLLIYSTSNLASGIPARFSGSGSGTDFTLTIGRLEPEDFAVYYCQQRSSSPFTFGQGTKVEIKRLEDLKNVFPPEVAVFEPSEAEISHTQKATLVCLATGFYPDHVELSWWVNGKEVHSGVCTDPQPLKEQPALNDSRYCLSSRLRVSATFWQNPRNHFRCQVQFYGLSENDEWTQDRAKPVTQIVSAEAWGRADCGFTSESYQQGVLSATILYEILLGKATLYAVLVSALVLMAMVKRKDSRGRAKRSGSGATNFSLLKQAGDVEENPGPTSMDWIWRILFLVGAATGAHSFEEVQLVESGGGLVKPEGSLRLSCAASGFTFSRYGMSWVRQAPGKGLEWVSTISGGGTYIYYPDSVKGRFTISRDNAKNSLFLQMNSLRAEDTAVYYCARDNYGRNYDYGMDYWGQGTLVTVSSTRIQNPDPAVYQLRDSKSSDKSVCLFTDFDSQTNVSQSKDSDVYITDKCVLDMRSMDFKSNSAVAWSNKSDFACANAFNNSIIPEDTFFPSPESSCDVKLVEKSFETDTNLNFQNLSVIGFRILLLKVAGFNLLMTLRLWSS

SEQ ID NO: 20787 - protein, 759 aa, Artificial Sequence
  Synthetic Polypeptide
MALPVTALLLPLALLLHAARPEIVLTQSPATLSLSPGERATLSCSATSSVSYIHWYQQKPGQAPRLLIYSTSNLASGIPARFSGSGSGTDFTLTIGRLEPEDFAVYYCQQRSSSPFTFGQGTKVEIKRLEDLKNVFPPEVAVFEPSEAEISHTQKATLVCLATGFYPDHVELSWWVNGKEVHSGVCTDPQPLKEQPALNDSRYCLSSRLRVSATFWQNPRNHFRCQVQFYGLSENDEWTQDRAKPVTQIVSAEAWGRADCGFTSESYQQGVLSATILYEILLGKATLYAVLVSALVLMAMVKRKDSRGRAKRSGSGATNFSLLKQAGDVEENPGPTSMDWIWRILFLVGAATGAHSGPEVQLVESGGGLVQAGGSLRLSCAASGRTFSMGWFRQAPGKEREFVAAITYSGGSPYYADSVKGRFTISRDNAKNTVYLQMNSLKPEDTAVYYCAANPTYGSDWNAENWGQGTQVTVSSGSGGGGSGGGGSGGGGSFEEVQLVESGGGLVKPEGSLRLSCAASGFTFSRYGMSWVRQAPGKGLEWVSTISGGGTYIYYPDSVKGRFTISRDNAKNSLFLQMNSLRAEDTAVYYCARDNYGRNYDYGMDYWGQGTLVTVSSTRIQNPDPAVYQLRDSKSSDKSVCLFTDFDSQTNVSQSKDSDVYITDKCVLDMRSMDFKSNSAVAWSNKSDFACANAFNNSIIPEDTFFPSPESSCDVKLVEKSFETDTNLNFQNLSVIGFRILLLKVAGFNLLMTLRLWSS

SEQ ID NO: 20788 - protein, 886 aa, Artificial Sequence
  Synthetic Polypeptide
MALPVTALLLPLALLLHAARPEIVLTQSPATLSLSPGERATLSCSATSSVSYIHWYQQKPGQAPRLLIYSTSNLASGIPARFSGSGSGTDFTLTIGRLEPEDFAVYYCQQRSSSPFTFGQGTKVEIKRLEDLKNVFPPEVAVFEPSEAEISHTQKATLVCLATGFYPDHVELSWWVNGKEVHSGVCTDPQPLKEQPALNDSRYCLSSRLRVSATFWQNPRNHFRCQVQFYGLSENDEWTQDRAKPVTQIVSAEAWGRADCGFTSESYQQGVLSATILYEILLGKATLYAVLVSALVLMAMVKRKDSRGRAKRSGSGATNFSLLKQAGDVEENPGPTSMDWIWRILFLVGAATGAHSQLQLQESGPGLVKPSETLSLTCTVSGGSISSGDYYWGWIRQPPGKGLEWIGSISYSGSTYYNPSLKSRVTISVDTSRNQFSLKLSSVTAADTAVYYCTREDSSNWRSRGQGTLVTVSSSGGGGSGGGGSEVQLVESGGGLVQAGGSLRLSCAASGRTFSMGWFRQAPGKEREFVAAITYSGGSPYYADSVKGRFTISRDNAKNTVYLQMNSLKPEDTAVYYCAANPTYGSDWNAENWGQGTQVTVSSGSGGGGSGGGGSGGGGSFEEVQLVESGGGLVKPEGSLRLSCAASGFTFSRYGMSWVRQAPGKGLEWVSTISGGGTYIYYPDSVKGRFTISRDNAKNSLFLQMNSLRAEDTAVYYCARDNYGRNYDYGMDYWGQGTLVTVSSTRIQNPDPAVYQLRDSKSSDKSVCLFTDFDSQTNVSQSKDSDVYITDKCVLDMRSMDFKSNSAVAWSNKSDFACANAFNNSIIPEDTFFPSPESSCDVKLVEKSFETDTNLNFQNLSVIGFRILLLKVAGFNLLMTLRLWSS

SEQ ID NO: 20789 - protein, 895 aa, Artificial Sequence
  Synthetic Polypeptide
MALPVTALLLPLALLLHAARPEVQVLESGGGLVQPGGSLRLSCAASGFTFSNFAMSWVRQAPGKGLEWVSTISGSAGTTDYADSVKGRFTISRDNSKKTLYLQMNSLRVEDTAVYYCADGRGPFFDYRGQGTLVTVSSGTGGGGSGGGGSGGGGSEFEIVLTQSPATLSLSPGERATLSCSATSSVSYIHWYQQKPGQAPRLLIYSTSNLASGIPARFSGSGSGTDFTLTIGRLEPEDFAVYYCQQRSSSPFTFGQGTKVEIKRLEDLKNVFPPEVAVFEPSEAEISHTQKATLVCLATGFYPDHVELSWWVNGKEVHSGVCTDPQPLKEQPALNDSRYCLSSRLRVSATFWQNPRNHFRCQVQFYGLSENDEWTQDRAKPVTQIVSAEAWGRADCGFTSESYQQGVLSATILYEILLGKATLYAVLVSALVLMAMVKRKDSRGRAKRSGSGATNFSLLKQAGDVEENPGPTSMDWIWRILFLVGAATGAHSGPEVQLVESGGGLVQAGGSLRLSCAASGRTFSMGWFRQAPGKEREFVAAITYSGGSPYYASSVRGRFTISRDNAKNTVYLQMNSLKPEDTAVYYCAANPTYGSDWNAENWGQGTQVTVSSGSGGGGSGGGGSGGGGSFEEVQLVESGGGLVKPEGSLRLSCAASGFTFSRYGMSWVRQAPGKGLEWVSTISGGGTYIYYPDSVKGRFTISRDNAKNSLFLQMNSLRAEDTAVYYCARDNYGRNYDYGMDYWGQGTLVTVSSTRIQNPDPAVYQLRDSKSSDKSVCLFTDFDSQTNVSQSKDSDVYITDKCVLDMRSMDFKSNSAVAWSNKSDFACANAFNNSIIPEDTFFPSPESSCDVKLVEKSFETDTNLNFQNLSVIGFRILLLKVAGFNLLMTLRLWSS

SEQ ID NO: 20790 - protein, 725 aa, Artificial Sequence
  Synthetic Polypeptide
MALPVTALLLPLALLLHAARPQIVLTQSPAIMSASPGEEVTLTCSATSSVSYIHWFQQRPGTSPKLWIYSTSNLASGVPVRFSGSGYGTSYSLTISRMEAEDAATYYCQQRSSSPFTFGSGTKLEIKGGGGSGGGGSGGGGSEVKVVESGGDLVKPGGSLKLSCVVSGFTFSRYGMSWVRQTPGKRLEWVATISGGGTYIYYPDSVKGRFTISRDNAKNTLYLQMSSLKSEDTAMYHCTRDNYGRNYDYGMDYWGQGTSVTVSSTREQKLISEEDLAKPTTTPAPRPPTPAPTIASQPLSLRPEACRPAAGGAVHTRGLDFACDIYIWAPLAGTCGVLLLSLVITLYCKRGRKKLLYIFKQPFMRPVQTTQEEDGCSCRFPEEEEGGCELRVKFSRSADAPAYQQGQNQLYNELNLGRREEYDVLDKRRGRDPEMGGKPRRKNPQEGLYNELQKDKMAEAYSEIGMKGERRRGKGHDGLYQGLSTATKDTYDALHMQALPPRSSGSGEGRGSLLTCGDVEENPGPHMTEYKPTVRLATRDDVPRAVRTLAAAFADYPATRHTVDPDRHIERVTELQELFLTRVGLDIGKVWVADDGAAVAVWTTPESVEAGAVFAEIGPRMAELSGSRLAAQQQMEGLLAPHRPKEPAWFLATVGVSPDHQGKGLGSAVVLPGVEAAERAGVPAFLETSAPRNLPFYERLGFTVTADVEVPEGPRTWCMTRKPGA

SEQ ID NO: 20791 - protein, 719 aa, Artificial Sequence
  Synthetic Polypeptide
MALPVTALLLPLALLLHAARPQIVLTQSPAIMSASPGEEVTLTCSATSSVSYIHWFQQRPGTSPKLWIYSTSNLASGVPVRFSGSGYGTSYSLTISRMEAEDAATYYCQQRSSSPFTFGSGTKLEIKGGGGSGGGGSGGGGSEVKVVESGGDLVKPGGSLKLSCVVSGFTFSRYGMSWVRQTPGKRLEWVATISGGGTYIYYPDSVKGRFTISRDNAKNTLYLQMSSLKSEDTAMYHCTRDNYGRNYDYGMDYWGQGTSVTVSSTREQKLISEEDLKIEVMYPPPYLDNEKSNGTIIHVKGKHLCPSPLFPGPSKPFWVLVVVGGVLACYSLLVTVAFIIFWVRSKRSRLLHSDYMNMTPRRPGPTRKHYQPYAPPRDFAAYRSRVKFSRSADAPAYQQGQNQLYNELNLGRREEYDVLDKRRGRDPEMGGKPRRKNPQEGLYNELQKDKMAEAYSEIGMKGERRRGKGHDGLYQGLSTATKDTYDALHMQALPPRSSGSGEGRGSLLTCGDVEENPGPHMTEYKPTVRLATRDDVPRAVRTLAAAFADYPATRHTVDPDRHIERVTELQELFLTRVGLDIGKVWVADDGAAVAVWTTPESVEAGAVFAEIGPRMAELSGSRLAAQQQMEGLLAPHRPKEPAWFLATVGVSPDHQGKGLGSAVVLPGVEAAERAGVPAFLETSAPRNLPFYERLGFTVTADVEVPEGPRTWCMTRKPGA

SEQ ID NO: 20792 - protein, 496 aa, Artificial Sequence
  Synthetic Polypeptide
MALPVTALLLPLALLLHAARPQIVLTQSPAIMSASPGEEVTLTCSATSSVSYIHWFQQRPGTSPKLWIYSTSNLASGVPVRFSGSGYGTSYSLTISRMEAEDAATYYCQQRSSSPFTFGSGTKLEIKGGGGSGGGGSGGGGSEVKVVESGGDLVKPGGSLKLSCVVSGFTFSRYGMSWVRQTPGKRLEWVATISGGGTYIYYPDSVKGRFTISRDNAKNTLYLQMSSLKSEDTAMYHCTRDNYGRNYDYGMDYWGQGTSVTVSSTREQKLISEEDLKIEVMYPPPYLDNEKSNGTIIHVKGKHLCPSPLFPGPSKPFWVLVVVGGVLACYSLLVTVAFIIFWVRSKRSRLLHSDYMNMTPRRPGPTRKHYQPYAPPRDFAAYRSRVKFSRSADAPAYQQGQNQLYNELNLGRREEYDVLDKRRGRDPEMGGKPRRKNPQEGLYNELQKDKMAEAYSEIGMKGERRRGKGHDGLYQGLSTATKDTYDALHMQALPPR

SEQ ID NO: 20793 - protein, 502 aa, Artificial Sequence
  Synthetic Polypeptide
MALPVTALLLPLALLLHAARPQIVLTQSPAIMSASPGEEVTLTCSATSSVSYIHWFQQRPGTSPKLWIYSTSNLASGVPVRFSGSGYGTSYSLTISRMEAEDAATYYCQQRSSSPFTFGSGTKLEIKGGGGSGGGGSGGGGSEVKVVESGGDLVKPGGSLKLSCVVSGFTFSRYGMSWVRQTPGKRLEWVATISGGGTYIYYPDSVKGRFTISRDNAKNTLYLQMSSLKSEDTAMYHCTRDNYGRNYDYGMDYWGQGTSVTVSSTREQKLISEEDLAKPTTTPAPRPPTPAPTIASQPLSLRPEACRPAAGGAVHTRGLDFACDIYIWAPLAGTCGVLLLSLVITLYCKRGRKKLLYIFKQPFMRPVQTTQEEDGCSCRFPEEEEGGCELRVKFSRSADAPAYQQGQNQLYNELNLGRREEYDVLDKRRGRDPEMGGKPRRKNPQEGLYNELQKDKMAEAYSEIGMKGERRRGKGHDGLYQGLSTATKDTYDALHMQALPPR

SEQ ID NO: 20794 - protein, 502 aa, Artificial Sequence
  Synthetic Polypeptide
MALPVTALLLPLALLLHAARPEVKVVESGGDLVKPGGSLKLSCVVSGFTFSRYGMSWVRQTPGKRLEWVATISGGGTYIYYPDSVKGRFTISRDNAKNTLYLQMSSLKSEDTAMYHCTRDNYGRNYDYGMDYWGQGTSVTVSSGGGGSGGGGSGGGGSQIVLTQSPAIMSASPGEEVTLTCSATSSVSYIHWFQQRPGTSPKLWIYSTSNLASGVPVRFSGSGYGTSYSLTISRMEAEDAATYYCQQRSSSPFTFGSGTKLEIKTREQKLISEEDLAKPTTTPAPRPPTPAPTIASQPLSLRPEACRPAAGGAVHTRGLDFACDIYIWAPLAGTCGVLLLSLVITLYCKRGRKKLLYIFKQPFMRPVQTTQEEDGCSCRFPEEEEGGCELRVKFSRSADAPAYQQGQNQLYNELNLGRREEYDVLDKRRGRDPEMGGKPRRKNPQEGLYNELQKDKMAEAYSEIGMKGERRRGKGHDGLYQGLSTATKDTYDALHMQALPPR

SEQ ID NO: 20795 - protein, 915 aa, Artificial Sequence
  Synthetic Polypeptide
MALPVTALLLPLALLLHAARPQIVLTQSPAIMSASPGEEVTLTCSATSSVSYIHWFQQRPGTSPKLWIYSTSNLASGVPVRFSGSGYGTSYSLTISRMEAEDAATYYCQQRSSSPFTFGSGTKLEIKGGGGSGGGGSGGGGSEVKVVESGGDLVKPGGSLKLSCVVSGFTFSRYGMSWVRQTPGKRLEWVATISGGGTYIYYPDSVKGRFTISRDNAKNTLYLQMSSLKSEDTAMYHCTRDNYGRNYDYGMDYWGQGTSVTVSSTREQKLISEEDLAKPTTTPAPRPPTPAPTIASQPLSLRPEACRPAAGGAVHTRGLDFACDIYIWAPLAGTCGVLLLSLVITLYCGRARVKFSRSADAPAYQQGQNQLYNELNLGRREEYDVLDKRRGRDPEMGGKPRRKNPQEGLYNELQKDKMAEAYSEIGMKGERRRGKGHDGLYQGLSTATKDTYDALHMQALPPRSRGSGATNFSLLKQAGDVEENPGPGIHMATYEVLCEVARKLGTDDREVVLFLLNVFIPQPTLAQLIGALRALKEEGRLTFPLLAECLFRAGRRDLLRDLLHLDPRFLERHLAGTMSYFSPYQLTVLHVDGELCARDIRSLIFLSKDTIGSRSTPQTFLHWVYCMENLDLLGPTDVDALMSMLRSLSRVDLQRQVQTLMGLHLSGPSHSQHYRHTPLETDFYDYKDDDDKTSGSGEGRGSLLTCGDVEENPGPHMTEYKPTVRLATRDDVPRAVRTLAAAFADYPATRHTVDPDRHIERVTELQELFLTRVGLDIGKVWVADDGAAVAVWTTPESVEAGAVFAEIGPRMAELSGSRLAAQQQMEGLLAPHRPKEPAWFLATVGVSPDHQGKGLGSAVVLPGVEAAERAGVPAFLETSAPRNLPFYERLGFTVTADVEVPEGPRTWCMTRKPGA

SEQ ID NO: 20796 - protein, 855 aa, Artificial Sequence
  Synthetic Polypeptide
MALPVTALLLPLALLLHAARPQIVLTQSPAIMSASPGEEVTLTCSATSSVSYIHWFQQRPGTSPKLWIYSTSNLASGVPVRFSGSGYGTSYSLTISRMEAEDAATYYCQQRSSSPFTFGSGTKLEIKLEIQNPDPAVYQLRDSKSSDKSVCLFTDFDSQTNVSQSKDSDVYITDKCVLDMRSMDFKSNSAVAWSNKSDFACANAFNNSIIPEDTFFPSSDVPCDVKLVEKSFETDTNLNFQNLSVIGFRILLLKVAGFNLLMTLRLWSSRAKRSGSGVKQTLNFDLLKLAGDVESNPGPTSMDWIWRILFLVGAATGAHSFEEVKVVESGGDLVKPGGSLKLSCVVSGFTFSRYGMSWVRQTPGKRLEWVATISGGGTYIYYPDSVKGRFTISRDNAKNTLYLQMSSLKSEDTAMYHCTRDNYGRNYDYGMDYWGQGTSVTVSSTREDLKNVFPPEVAVFEPSKAEIAHTQKATLVCLATGFYPDHVELSWWVNGKEVHSGVCTDPQPLKEQPALNDSRYCLSSRLRVSATFWQNPRNHFRCQVQFYGLSENDEWTQDRAKPVTQIVSAEAWGRADCGITSASYHQGVLSATILYEILLGKATLYAVLVSALVLMAMVKRKDSRGRAKRSGSGATNFSLLKQAGDVEENPGPSRGHMTEYKPTVRLATRDDVPRAVRTLAAAFADYPATRHTVDPDRHIERVTELQELFLTRVGLDIGKVWVADDGAAVAVWTTPESVEAGAVFAEIGPRMAELSGSRLAAQQQMEGLLAPHRPKEPAWFLATVGVSPDHQGKGLGSAVVLPGVEAAERAGVPAFLETSAPRNLPFYERLGFTVTADVEVPEGPRTWCMTRKPGA

SEQ ID NO: 20797 - protein, 854 aa, Artificial Sequence
  Synthetic Polypeptide
MALPVTALLLPLALLLHAARPQIVLTQSPAIMSASPGEEVTLTCSATSSVSYIHWFQQRPGTSPKLWIYSTSNLASGVPVRFSGSGYGTSYSLTISRMEAEDAATYYCQQRSSSPFTFGSGTKLEIKLEDLKNVFPPEVAVFEPSKAEIAHTQKATLVCLATGFYPDHVELSWWVNGKEVHSGVCTDPQPLKEQPALNDSRYCLSSRLRVSATFWQNPRNHFRCQVQFYGLSENDEWTQDRAKPVTQIVSAEAWGRADCGITSASYHQGVLSATILYEILLGKATLYAVLVSALVLMAMVKRKDSRGRAKRSGSGATNFSLLKQAGDVEENPGPTSMDWIWRILFLVGAATGAHSFEEVKVVESGGDLVKPGGSLKLSCVVSGFTFSRYGMSWVRQTPGKRLEWVATISGGGTYIYYPDSVKGRFTISRDNAKNTLYLQMSSLKSEDTAMYHCTRDNYGRNYDYGMDYWGQGTSVTVSSTRIQNPDPAVYQLRDSKSSDKSVCLFTDFDSQTNVSQSKDSDVYITDKCVLDMRSMDFKSNSAVAWSNKSDFACANAFNNSIIPEDTFFPSSDVPCDVKLVEKSFETDTNLNFQNLSVIGFRILLLKVAGFNLLMTLRLWSSRAKRSGSGVKQTLNFDLLKLAGDVESNPGPSRGHMTEYKPTVRLATRDDVPRAVRTLAAAFADYPATRHTVDPDRHIERVTELQELFLTRVGLDIGKVWVADDGAAVAVWTTPESVEAGAVFAEIGPRMAELSGSRLAAQQQMEGLLAPHRPKEPAWFLATVGVSPDHQGKGLGSAVVLPGVEAAERAGVPAFLETSAPRNLPFYERLGFTVTADVEVPEGPRTWCMTRKPGA

SEQ ID NO: 20798 - protein, 621 aa, Artificial Sequence
  Synthetic Polypeptide
MALPVTALLLPLALLLHAARPQIVLTQSPAIMSASPGEEVTLTCSATSSVSYIHWFQQRPGTSPKLWIYSTSNLASGVPVRFSGSGYGTSYSLTISRMEAEDAATYYCQQRSSSPFTFGSGTKLEIKLEDLKNVFPPEVAVFEPSEAEISHTQKATLVCLATGFYPDHVELSWWVNGKEVHSGVCTDPQPLKEQPALNDSRYCLSSRLRVSATFWQNPRNHFRCQVQFYGLSENDEWTQDRAKPVTQIVSAEAWGRADCGFTSESYQQGVLSATILYEILLGKATLYAVLVSALVLMAMVKRKDSRGRAKRSGSGATNFSLLKQAGDVEENPGPTSMDWIWRILFLVGAATGAHSFEEVKVVESGGDLVKPGGSLKLSCVVSGFTFSRYGMSWVRQTPGKRLEWVATISGGGTYIYYPDSVKGRFTISRDNAKNTLYLQMSSLKSEDTAMYHCTRDNYGRNYDYGMDYWGQGTSVTVSSTRIQNPDPAVYQLRDSKSSDKSVCLFTDFDSQTNVSQSKDSDVYITDKCVLDMRSMDFKSNSAVAWSNKSDFACANAFNNSIIPEDTFFPSPESSCDVKLVEKSFETDTNLNFQNLSVIGFRILLLKVAGFNLLMTLRLWSS

SEQ ID NO: 20799 - protein, 846 aa, Artificial Sequence
  Synthetic Polypeptide
MALPVTALLLPLALLLHAARPQIVLTQSPAIMSASPGEEVTLTCSATSSVSYIHWFQQRPGTSPKLWIYSTSNLASGVPVRFSGSGYGTSYSLTISRMEAEDAATYYCQQRSSSPFTFGSGTKLEIKLEDLKNVFPPEVAVFEPSEAEISHTQKATLVCLATGFYPDHVELSWWVNGKEVHSGVCTDPQPLKEQPALNDSRYCLSSRLRVSATFWQNPRNHFRCQVQFYGLSENDEWTQDRAKPVTQIVSAEAWGRADCGFTSESYQQGVLSATILYEILLGKATLYAVLVSALVLMAMVKRKDSRGRAKRSGSGATNFSLLKQAGDVEENPGPTSMDWIWRILFLVGAATGAHSFEEVKVVESGGDLVKPGGSLKLSCVVSGFTFSRYGMSWVRQTPGKRLEWVATISGGGTYIYYPDSVKGRFTISRDNAKNTLYLQMSSLKSEDTAMYHCTRDNYGRNYDYGMDYWGQGTSVTVSSTRIQNPDPAVYQLRDSKSSDKSVCLFTDFDSQTNVSQSKDSDVYITDKCVLDMRSMDFKSNSAVAWSNKSDFACANAFNNSIIPEDTFFPSPESSCDVKLVEKSFETDTNLNFQNLSVIGFRILLLKVAGFNLLMTLRLWSSRAKRSGSGVKQTLNFDLLKLAGDVESNPGPSRGGIHTMATYEVLCEVARKLGTDDREVVLFLLNVFIPQPTLAQLIGALRALKEEGRLTFPLLAECLFRAGRRDLLRDLLHLDPRFLERHLAGTMSYFSPYQLTVLHVDGELCARDIRSLIFLSKDTIGSRSTPQTFLHWVYCMENLDLLGPTDVDALMSMLRSLSRVDLQRQVQTLMGLHLSGPSHSQHYRHTP

SEQ ID NO: 20800 - protein, 625 aa, Artificial Sequence
  Synthetic Polypeptide
MALPVTALLLPLALLLHAARPQIVLTQSPAIMSASPGEEVTLTCSATSSVSYIHWFQQRPGTSPKLWIYSTSNLASGVPVRFSGSGYGTSYSLTISRMEAEDAATYYCQQRSSSPFTFGSGTKLEIKLEIQNPDPAVYQLRDSKSSDKSVCLFTDFDSQTNVSQSKDSDVYITDKCVLDMRSMDFKSNSAVAWSNKSDFACANAFNNSIIPEDTFFPSPESSCDVKLVEKSFETDTNLNFQNLSVIGFRILLLKVAGFNLLMTLRLWSSRAKRSGSGVKQTLNFDLLKLAGDVESNPGPTSMDWIWRILFLVGAATGAHSFEEVKVVESGGDLVKPGGSLKLSCVVSGFTFSRYGMSWVRQTPGKRLEWVATISGGGTYIYYPDSVKGRFTISRDNAKNTLYLQMSSLKSEDTAMYHCTRDNYGRNYDYGMDYWGQGTSVTVSSTREDLKNVFPPEVAVFEPSEAEISHTQKATLVCLATGFYPDHVELSWWVNGKEVHSGVCTDPQPLKEQPALNDSRYCLSSRLRVSATFWQNPRNHFRCQVQFYGLSENDEWTQDRAKPVTQIVSAEAWGRADCGFTSESYQQGVLSATILYEILLGKATLYAVLVSALVLMAMVKRKDSRG

SEQ ID NO: 20801 - protein, 847 aa, Artificial Sequence
  Synthetic Polypeptide
MALPVTALLLPLALLLHAARPQIVLTQSPAIMSASPGEEVTLTCSATSSVSYIHWFQQRPGTSPKLWIYSTSNLASGVPVRFSGSGYGTSYSLTISRMEAEDAATYYCQQRSSSPFTFGSGTKLEIKLEIQNPDPAVYQLRDSKSSDKSVCLFTDFDSQTNVSQSKDSDVYITDKCVLDMRSMDFKSNSAVAWSNKSDFACANAFNNSIIPEDTFFPSPESSCDVKLVEKSFETDTNLNFQNLSVIGFRILLLKVAGFNLLMTLRLWSSRAKRSGSGVKQTLNFDLLKLAGDVESNPGPTSMDWIWRILFLVGAATGAHSFEEVKVVESGGDLVKPGGSLKLSCVVSGFTFSRYGMSWVRQTPGKRLEWVATISGGGTYIYYPDSVKGRFTISRDNAKNTLYLQMSSLKSEDTAMYHCTRDNYGRNYDYGMDYWGQGTSVTVSSTREDLKNVFPPEVAVFEPSEAEISHTQKATLVCLATGFYPDHVELSWWVNGKEVHSGVCTDPQPLKEQPALNDSRYCLSSRLRVSATFWQNPRNHFRCQVQFYGLSENDEWTQDRAKPVTQIVSAEAWGRADCGFTSESYQQGVLSATILYEILLGKATLYAVLVSALVLMAMVKRKDSRGRAKRSGSGATNFSLLKQAGDVEENPGPSRGGIHTMATYEVLCEVARKLGTDDREVVLFLLNVFIPQPTLAQLIGALRALKEEGRLTFPLLAECLFRAGRRDLLRDLLHLDPRFLERHLAGTMSYFSPYQLTVLHVDGELCARDIRSLIFLSKDTIGSRSTPQTFLHWVYCMENLDLLGPTDVDALMSMLRSLSRVDLQRQVQTLMGLHLSGPSHSQHYRHTP

SEQ ID NO: 20802 - protein, 899 aa, Artificial Sequence
  Synthetic Polypeptide
MALPVTALLLPLALLLHAARPLEGKPIPNPLLGLDSTGSGEDLKNVFPPEVAVFEPSKAEIAHTQKATLVCLATGFYPDHVELSWWVNGKEVHSGVCTDPQPLKEQPALNDSRYCLSSRLRVSATFWQNPRNHFRCQVQFYGLSENDEWTQDRAKPVTQIVSAEAWGRADCGITSASYHQGVLSATILYEILLGKATLYAVLVSALVLMAMVKRKDSRGRAKRSGSGATNFSLLKQAGDVEENPGPTSMALPVTALLLPLALLLHAARPQIVLTQSPAIMSASPGEEVTLTCSATSSVSYIHWFQQRPGTSPKLWIYSTSNLASGVPVRFSGSGYGTSYSLTISRMEAEDAATYYCQQRSSSPFTFGSGTKLEIKGGGGSGGGGSGGGGSEVKVVESGGDLVKPGGSLKLSCVVSGFTFSRYGMSWVRQTPGKRLEWVATISGGGTYIYYPDSVKGRFTISRDNAKNTLYLQMSSLKSEDTAMYHCTRDNYGRNYDYGMDYWGQGTSVTVSSTREQKLISEEDGSGIQNPDPAVYQLRDSKSSDKSVCLFTDFDSQTNVSQSKDSDVYITDKCVLDMRSMDFKSNSAVAWSNKSDFACANAFNNSIIPEDTFFPSSDVPCDVKLVEKSFETDTNLNFQNLSVIGFRILLLKVAGFNLLMTLRLWSSRAKRSGSGVKQTLNFDLLKLAGDVESNPGPSRGHMTEYKPTVRLATRDDVPRAVRTLAAAFADYPATRHTVDPDRHIERVTELQELFLTRVGLDIGKVWVADDGAAVAVWTTPESVEAGAVFAEIGPRMAELSGSRLAAQQQMEGLLAPHRPKEPAWFLATVGVSPDHQGKGLGSAVVLPGVEAAERAGVPAFLETSAPRNLPFYERLGFTVTADVEVPEGPRTWCMTRKPGA

SEQ ID NO: 20803 - protein, 900 aa, Artificial Sequence
  Synthetic Polypeptide
MALPVTALLLPLALLLHAARPLEQKLISEEDLGSGDRPDPAVYQLRDSKSSDKSVCLFTDFDSQTNVSQSKDSDVYITDKCVLDMRSMDFKSNSAVAWSNKSDFACANAFNNSIIPEDTFFPSPESSCDVKLVEKSFETDTNLNFQNLSVIGFRILLLKVAGFNLLMTLRLWSSSSRAKRSGSGVKQTLNFDLLKLAGDVESNPGPTSMALPVTALLLPLALLLHAARPQIVLTQSPAIMSASPGEEVTLTCSATSSVSYIHWFQQRPGTSPKLWIYSTSNLASGVPVRFSGSGYGTSYSLTISRMEAEDAATYYCQQRSSSPFTFGSGTKLEIKGGGGSGGGGSGGGGSEVKVVESGGDLVKPGGSLKLSCVVSGFTFSRYGMSWVRQTPGKRLEWVATISGGGTYIYYPDSVKGRFTISRDNAKNTLYLQMSSLKSEDTAMYHCTRDNYGRNYDYGMDYWGQGTSVTVSSTRGKPIPNPLLGLDSTGSGEDLKNVFPPEVAVFEPSEAEISHTQKATLVCLATGFYPDHVELSWWVNGKEVHSGVCTDPQPLKEQPALNDSRYCLSSRLRVSATFWQNPRNHFRCQVQFYGLSENDEWTQDRAKPVTQIVSAEAWGRADCGFTSESYQQGVLSATILYEILLGKATLYAVLVSALVLMAMVKRKDSRGRAKRSGSGATNFSLLKQAGDVEENPGPSRGHMTEYKPTVRLATRDDVPRAVRTLAAAFADYPATRHTVDPDRHIERVTELQELFLTRVGLDIGKVWVADDGAAVAVWTTPESVEAGAVFAEIGPRMAELSGSRLAAQQQMEGLLAPHRPKEPAWFLATVGVSPDHQGKGLGSAVVLPGVEAAERAGVPAFLETSAPRNLPFYERLGFTVTADVEVPEGPRTWCMTRKPGA

SEQ ID NO: 20804 - protein, 854 aa, Artificial Sequence
  Synthetic Polypeptide
MALPVTALLLPLALLLHAARPQIVLTQSPAIMSASPGEEVTLTCSATSSVSYIHWFQQRPGTSPKLWIYSTSNLASGVPVRFSGSGYGTSYSLTISRMEAEDAATYYCQQRSSSPFTFGSGTKLEIKLEDLKNVFPPEVAVFEPSEAEISHTQKATLVCLATGFYPDHVELSWWVNGKEVHSGVSTDPQPLKEQPALNDSRYCLSSRLRVSATFWQNPRNHFRCQVQFYGLSENDEWTQDRAKPVTQIVSAEAWGRADCGFTSESYQQGVLSATILYEILLGKATLYAVLVSALVLMAMVKRKDSRGRAKRSGSGATNFSLLKQAGDVEENPGPTSMDWIWRILFLVGAATGAHSFEEVKVVESGGDLVKPGGSLKLSCVVSGFTFSRYGMSWVRQTPGKRLEWVATISGGGTYIYYPDSVKGRFTISRDNAKNTLYLQMSSLKSEDTAMYHCTRDNYGRNYDYGMDYWGQGTSVTVSSTRIQNPDPAVYQLRDSKSSDKSVCLFTDFDSQTNVSQSKDSDVYITDKTVLDMRSMDFKSNSAVAWSNKSDFACANAFNNSIIPEDTFFPSPESSCDVKLVEKSFETDTNLNFQNLSVIGFRILLLKVAGFNLLMTLRLWSSRAKRSGSGVKQTLNFDLLKLAGDVESNPGPSRGHMTEYKPTVRLATRDDVPRAVRTLAAAFADYPATRHTVDPDRHIERVTELQELFLTRVGLDIGKVWVADDGAAVAVWTTPESVEAGAVFAEIGPRMAELSGSRLAAQQQMEGLLAPHRPKEPAWFLATVGVSPDHQGKGLGSAVVLPGVEAAERAGVPAFLETSAPRNLPFYERLGFTVTADVEVPEGPRTWCMTRKPGA

SEQ ID NO: 20805 - protein, 936 aa, Artificial Sequence
  Synthetic Polypeptide
MALPVTALLLPLALLLHAARPQIVLTQSPAIMSASPGEEVTLTCSATSSVSYIHWFQQRPGTSPKLWIYSTSNLASGVPVRFSGSGYGTSYSLTISRMEAEDAATYYCQQRSSSPFTFGSGTKLEIKLEDLKNVFPPEVAVFEPSEAEISHTQKATLVCLATGFYPDHVELSWWVNGKEVHSGVSTDPQPLKEQPALNDSRYCLSSRLRVSATFWQNPRNHFRCQVQFYGLSENDEWTQDRAKPVTQIVSAEAWGRADCGFTSESYQQGVLSATILYEILLGKATLYAVLVSALVLMAMVKRKDSRGRAKRSGSGATNFSLLKQAGDVEENPGPTSMDWIWRILFLVGAATGAHSFEEVKVVESGGDLVKPGGSLKLSCVVSGFTFSRYGMSWVRQTPGKRLEWVATISGGGTYIYYPDSVKGRFTISRDNAKNTLYLQMSSLKSEDTAMYHCTRDNYGRNYDYGMDYWGQGTSVTVSSTREQKLISEEDGSGTPFPSLAPPIMLLVDGKQQMVVVCLVLDVAPPGLDSPIWFSAGNGSALDAFTYGPSPATDGTWTNLAHLSLPSEELASWEPLVCHTGPGAEGHSRSTQPMHLSGEASTARTCPQEPLRGTPGGALWLGVLRLLLFKLLLFDLLLTCSCLCDPAGPLPSPATTTRLRALGSHRLHPATETGGREATSSPRPQPRDRRWGDTPPGRKPGSPVRAKRSGSGVKQTLNFDLLKLAGDVESNPGPSRGHMTEYKPTVRLATRDDVPRAVRTLAAAFADYPATRHTVDPDRHIERVTELQELFLTRVGLDIGKVWVADDGAAVAVWTTPESVEAGAVFAEIGPRMAELSGSRLAAQQQMEGLLAPHRPKEPAWFLATVGVSPDHQGKGLGSAVVLPGVEAAERAGVPAFLETSAPRNLPFYERLGFTVTADVEVPEGPRTWCMTRKPGA

SEQ ID NO: 20806 - protein, 954 aa, Artificial Sequence
  Synthetic Polypeptide
MALPVTALLLPLALLLHAARPLEDLKNVFPPEVAVFEPSEAEISHTQKATLVCLATGFYPDHVELSWWVNGKEVHSGVSTDPQPLKEQPALNDSRYCLSSRLRVSATFWQNPRNHFRCQVQFYGLSENDEWTQDRAKPVTQIVSAEAWGRADCGFTSESYQQGVLSATILYEILLGKATLYAVLVSALVLMAMVKRKDSRGRAKRSGSGATNFSLLKQAGDVEENPGPTSMALPVTALLLPLALLLHAARPQIVLTQSPAIMSASPGEEVTLTCSATSSVSYIHWFQQRPGTSPKLWIYSTSNLASGVPVRFSGSGYGTSYSLTISRMEAEDAATYYCQQRSSSPFTFGSGTKLEIKGGGGSGGGGSGGGGSEVKVVESGGDLVKPGGSLKLSCVVSGFTFSRYGMSWVRQTPGKRLEWVATISGGGTYIYYPDSVKGRFTISRDNAKNTLYLQMSSLKSEDTAMYHCTRDNYGRNYDYGMDYWGQGTSVTVSSTREQKLISEEDLGSGTPFPSLAPPIMLLVDGKQQMVVVCLVLDVAPPGLDSPIWFSAGNGSALDAFTYGPSPATDGTWTNLAHLSLPSEELASWEPLVCHTGPGAEGHSRSTQPMHLSGEASTARTCPQEPLRGTPGGALWLGVLRLLLFKLLLFDLLLTCSCLCDPAGPLPSPATTTRLRALGSHRLHPATETGGREATSSPRPQPRDRRWGDTPPGRKPGSPVRAKRSGSGVKQTLNFDLLKLAGDVESNPGPSRSRGHMTEYKPTVRLATRDDVPRAVRTLAAAFADYPATRHTVDPDRHIERVTELQELFLTRVGLDIGKVWVADDGAAVAVWTTPESVEAGAVFAEIGPRMAELSGSRLAAQQQMEGLLAPHRPKEPAWFLATVGVSPDHQGKGLGSAVVLPGVEAAERAGVPAFLETSAPRNLPFYERLGFTVTADVEVPEGPRTWCMTRKPGA

SEQ ID NO: 20807 - protein, 891 aa, Artificial Sequence
  Synthetic Polypeptide
MALPVTALLLPLALLLHAARPQIVLTQSPAIMSASPGEEVTLTCSATSSVSYIHWFQQRPGTSPKLWIYSTSNLASGVPVRFSGSGYGTSYSLTISRMEAEDAATYYCQQRSSSPFTFGSGTKLEIKLEGKPIPNPLLGLDSTGSGDKQLDADVSPKPTIFLPSIAETKLQKAGTYLCLLEKFFPDVIKIHWQEKKSNTILGSQEGNTMKTNDTYMKFSWLTVPEKSLDKEHRCIVRHENNKNGVDQEIIFPPIKTDVITMDPKDNCSKDANDTLLLQLTNTSAYYMYLLLLLKSVVYFAIITCCLLRRTAFCCNGEKSRAKRSGSGATNFSLLKQAGDVEENPGPTSMDWIWRILFLVGAATGAHSFEEVKVVESGGDLVKPGGSLKLSCVVSGFTFSRYGMSWVRQTPGKRLEWVATISGGGTYIYYPDSVKGRFTISRDNAKNTLYLQMSSLKSEDTAMYHCTRDNYGRNYDYGMDYWGQGTSVTVSSTREQKLISEEDGSGSQPHTKPSVFVMKNGTNVACLVKEFYPKDIRINLVSSKKITEFDPAIVISPSGKYNAVKLGKYEDSNSVTCSVQHDNKTVHSTDFEVKTDSTDHVKPKETENTKQPSKSCHKPKAIVHTEKVNMMSLTVLGLRMLFAKTVAVNFLLTAKLFFLRAKRSGSGVKQTLNFDLLKLAGDVESNPGPSRGHMTEYKPTVRLATRDDVPRAVRTLAAAFADYPATRHTVDPDRHIERVTELQELFLTRVGLDIGKVWVADDGAAVAVWTTPESVEAGAVFAEIGPRMAELSGSRLAAQQQMEGLLAPHRPKEPAWFLATVGVSPDHQGKGLGSAVVLPGVEAAERAGVPAFLETSAPRNLPFYERLGFTVTADVEVPEGPRTWCMTRKPGA

SEQ ID NO: 20808 - protein, 629 aa, Artificial Sequence
  Synthetic Polypeptide
MALPVTALLLPLALLLHAARPQIVLTQSPAIMSASPGEEVTLTCSATSSVSYIHWFQQRPGTSPKLWIYSTSNLASGVPVRFSGSGYGTSYSLTISRMEAEDAATYYCQQRSSSPFTFGSGTKLEIKLESQPHTKPSVFVMKNGTNVACLVKEFYPKDIRINLVSSKKITEFDPAIVISPSGKYNAVKLGKYEDSNSVTCSVQHDNKTVHSTDFEVKTDSTDHVKPKETENTKQPSKSCHKPKAIVHTEKVNMMSLTVLGLRMLFAKTVAVNFLLTAKLFFLRAKRSGSGATNFSLLKQAGDVEENPGPTSMDWIWRILFLVGAATGAHSFEEVKVVESGGDLVKPGGSLKLSCVVSGFTFSRYGMSWVRQTPGKRLEWVATISGGGTYIYYPDSVKGRFTISRDNAKNTLYLQMSSLKSEDTAMYHCTRDNYGRNYDYGMDYWGQGTSVTVSSTRDKQLDADVSPKPTIFLPSIAETKLQKAGTYLCLLEKFFPDVIKIHWQEKKSNTILGSQEGNTMKTNDTYMKFSWLTVPEKSLDKEHRCIVRHENNKNGVDQEIIFPPIKTDVITMDPKDNCSKDANDTLLLQLTNTSAYYMYLLLLLKSVVYFAIITCCLLRRTAFCCNGEKS

SEQ ID NO: 20809 - protein, 906 aa, Artificial Sequence
  Synthetic Polypeptide
MALPVTALLLPLALLLHAARPLEGKPIPNPLLGLDSTGSGDKQLDADVSPKPTIFLPSIAETKLQKAGTYLCLLEKFFPDVIKIHWQEKKSNTILGSQEGNTMKTNDTYMKFSWLTVPEKSLDKEHRCIVRHENNKNGVDQEIIFPPIKTDVITMDPKDNCSKDANDTLLLQLTNTSAYYMYLLLLLKSVVYFAIITCCLLRRTAFCCNGEKSRAKRSGSGATNFSLLKQAGDVEENPGPTSMALPVTALLLPLALLLHAARPQIVLTQSPAIMSASPGEEVTLTCSATSSVSYIHWFQQRPGTSPKLWIYSTSNLASGVPVRFSGSGYGTSYSLTISRMEAEDAATYYCQQRSSSPFTFGSGTKLEIKGGGGSGGGGSGGGGSEVKVVESGGDLVKPGGSLKLSCVVSGFTFSRYGMSWVRQTPGKRLEWVATISGGGTYIYYPDSVKGRFTISRDNAKNTLYLQMSSLKSEDTAMYHCTRDNYGRNYDYGMDYWGQGTSVTVSSTREQKLISEEDGSGSQPHTKPSVFVMKNGTNVACLVKEFYPKDIRINLVSSKKITEFDPAIVISPSGKYNAVKLGKYEDSNSVTCSVQHDNKTVHSTDFEVKTDSTDHVKPKETENTKQPSKSCHKPKAIVHTEKVNMMSLTVLGLRMLFAKTVAVNFLLTAKLFFLRAKRSGSGVKQTLNFDLLKLAGDVESNPGPSRGHMTEYKPTVRLATRDDVPRAVRTLAAAFADYPATRHTVDPDRHIERVTELQELFLTRVGLDIGKVWVADDGAAVAVWTTPESVEAGAVFAEIGPRMAELSGSRLAAQQQMEGLLAPHRPKEPAWFLATVGVSPDHQGKGLGSAVVLPGVEAAERAGVPAFLETSAPRNLPFYERLGFTVTADVEVPEGPRTWCMTRKPGA

SEQ ID NO: 20810 - protein, 1031 aa, Artificial Sequence
  Synthetic Polypeptide
MALPVTALLLPLALLLHAARPQIVLTQSPAIMSASPGEEVTLTCSATSSVSYIHWFQQRPGTSPKLWIYSTSNLASGVPVRFSGSGYGTSYSLTISRMEAEDAATYYCQQRSSSPFTFGSGTKLEIKGQPKANPTVTLFPPSSEELQANKATLVCLISDFYPGAVTVAWKADGSPVKAGVETTKPSKQSNNKYAASSYLSLTPEQWKSHRSYSCQVTHEGSTVEKTVAPTECSGSQSFGLLDPKLCYLLDGILFIYGVILTALFLRVKFSRSADAPAYQQGQNQLYNELNLGRREEYDVLDKRRGRDPEMGGKPQRRKNPQEGLYNELQKDKMAEAYSEIGMKGERRRGKGHDGLYQGLSTATKDTYDALHMQALPPRRAKRSGSGATNFSLLKQAGDVEENPGPTSMDWIWRILFLVGAATGAHSFEEVKVVESGGDLVKPGGSLKLSCVVSGFTFSRYGMSWVRQTPGKRLEWVATISGGGTYIYYPDSVKGRFTISRDNAKNTLYLQMSSLKSEDTAMYHCTRDNYGRNYDYGMDYWGQGTSVTVSSASTKGPSVFPLAPSSKSTSGGTAALGCLVKDYFPEPVTVSWNSGALTSGVHTFPAVLQSSGLYSLSSVVTVPSSSLGTQTYICNVNHKPSNTKVDKRVEPKSCGTQSFGLLDPKLCYLLDGILFIYGVILTALFLRVKFSRSADAPAYQQGQNQLYNELNLGRREEYDVLDKRRGRDPEMGGKPQRRKNPQEGLYNELQKDKMAEAYSEIGMKGERRRGKGHDGLYQGLSTATKDTYDALHMQALPPRRAKRSGSGVKQTLNFDLLKLAGDVESNPGPSRGHMTEYKPTVRLATRDDVPRAVRTLAAAFADYPATRHTVDPDRHIERVTELQELFLTRVGLDIGKVWVADDGAAVAVWTTPESVEAGAVFAEIGPRMAELSGSRLAAQQQMEGLLAPHRPKEPAWFLATVGVSPDHQGKGLGSAVVLPGVEAAERAGVPAFLETSAPRNLPFYERLGFTVTADVEVPEGPRTWCMTRKPGA

SEQ ID NO: 20811 - protein, 817 aa, Artificial Sequence
  Synthetic Polypeptide
MALPVTALLLPLALLLHAARPQIVLTQSPAIMSASPGEEVTLTCSATSSVSYIHWFQQRPGTSPKLWIYSTSNLASGVPVRFSGSGYGTSYSLTISRMEAEDAATYYCQQRSSSPFTFGSGTKLEIKLEDLKNVFPPEVAVFEPSEAEISHTQKATLVCLATGFYPDHVELSWWVNGKEVHSGVSTDPQPLKEQPALNDSRYCLSSRLRVSATFWQNPRNHFRCQVQFYGLSENDEWTQDRAKPVTQIVSAEAWGRADCGSQSFGLLDPKLCYLLDGILFIYGVILTALFLRVKFSRSADAPAYQQGQNQLYNELNLGRREEYDVLDKRRGRDPEMGGKPQRRKNPQEGLYNELQKDKMAEAYSEIGMKGERRRGKGHDGLYQGLSTATKDTYDALHMQALPPRRAKRSGSGATNFSLLKQAGDVEENPGPTSMDWIWRILFLVGAATGAHSFEEVKVVESGGDLVKPGGSLKLSCVVSGFTFSRYGMSWVRQTPGKRLEWVATISGGGTYIYYPDSVKGRFTISRDNAKNTLYLQMSSLKSEDTAMYHCTRDNYGRNYDYGMDYWGQGTSVTVSSTRIQNPDPAVYQLRDSKSSDKSVCLFTDFDSQTNVSQSKDSDVYITDKTVLDMRSMDFKSNSAVAWSNKSDFACANAFNNSIIPEDTFFPSPESSCGTQSFGLLDPKLCYLLDGILFIYGVILTALFLRVKFSRSADAPAYQQGQNQLYNELNLGRREEYDVLDKRRGRDPEMGGKPQRRKNPQEGLYNELQKDKMAEAYSEIGMKGERRRGKGHDGLYQGLSTATKDTYDALHMQALPPR

SEQ ID NO: 20812 - protein, 817 aa, Artificial Sequence
  Synthetic Polypeptide
MALPVTALLLPLALLLHAARPQIVLTQSPAIMSASPGEEVTLTCSATSSVSYIHWFQQRPGTSPKLWIYSTSNLASGVPVRFSGSGYGTSYSLTISRMEAEDAATYYCQQRSSSPFTFGSGTKLEIKLEDLKNVFPPEVAVFEPSKAEIAHTQKATLVCLATGFYPDHVELSWWVNGKEVHSGVCTDPQPLKEQPALNDSRYCLSSRLRVSATFWQNPRNHFRCQVQFYGLSENDEWTQDRAKPVTQIVSAEAWGRADCGSQSFGLLDPKLCYLLDGILFIYGVILTALFLRVKFSRSADAPAYQQGQNQLYNELNLGRREEYDVLDKRRGRDPEMGGKPQRRKNPQEGLYNELQKDKMAEAYSEIGMKGERRRGKGHDGLYQGLSTATKDTYDALHMQALPPRRAKRSGSGATNFSLLKQAGDVEENPGPTSMDWIWRILFLVGAATGAHSFEEVKVVESGGDLVKPGGSLKLSCVVSGFTFSRYGMSWVRQTPGKRLEWVATISGGGTYIYYPDSVKGRFTISRDNAKNTLYLQMSSLKSEDTAMYHCTRDNYGRNYDYGMDYWGQGTSVTVSSTRIQNPDPAVYQLRDSKSSDKSVCLFTDFDSQTNVSQSKDSDVYITDKCVLDMRSMDFKSNSAVAWSNKSDFACANAFNNSIIPEDTFFPSSDVPCGTQSFGLLDPKLCYLLDGILFIYGVILTALFLRVKFSRSADAPAYQQGQNQLYNELNLGRREEYDVLDKRRGRDPEMGGKPQRRKNPQEGLYNELQKDKMAEAYSEIGMKGERRRGKGHDGLYQGLSTATKDTYDALHMQALPPR

SEQ ID NO: 20813 - protein, 888 aa, Artificial Sequence
  Synthetic Polypeptide
MALPVTALLLPLALLLHAARPQIVLTQSPAIMSASPGEEVTLTCSATSSVSYIHWFQQRPGTSPKLWIYSTSNLASGVPVRFSGSGYGTSYSLTISRMEAEDAATYYCQQRSSSPFTFGSGTKLEIKLEGKPIPNPLLGLDSTGSGEDLKNVFPPEVAVFEPSEAEISHTQKATLVCLATGFYPDHVELSWWVNGKEVHSGVSTDPQPLKEQPALNDSRYCLSSRLRVSATFWQNPRNHFRCQVQFYGLSENDEWTQDRAKPVTQIVSAEAWGRADCGSQSFGLLDPKLCYLLDGILFIYGVILTALFLRVKFSRSADAPAYQQGQNQLYNELNLGRREEYDVLDKRRGRDPEMGGKPQRRKNPQEGLYNELQKDKMAEAYSEIGMKGERRRGKGHDGLYQGLSTATKDTYDALHMQALPPRRAKRSGSGATNFSLLKQAGDVEENPGPTSMDWIWRILFLVGAATGAHSFEEVKVVESGGDLVKPGGSLKLSCVVSGFTFSRYGMSWVRQTPGKRLEWVATISGGGTYIYYPDSVKGRFTISRDNAKNTLYLQMSSLKSEDTAMYHCTRDNYGRNYDYGMDYWGQGTSVTVSSTREQKLISEEDGSGIQNPDPAVYQLRDSKSSDKSVCLFTDFDSQTNVSQSKDSDVYITDKTVLDMRSMDFKSNSAVAWSNKSDFACANAFNNSIIPEDTFFPSPESSCGTQSFGLLDPKLCYLLDGILFIYGVILTALFLRSKRSRLLHSDYMNMTPRRPGPTRKHYQPYAPPRDFAAYRSRVKFSRSADAPAYQQGQNQLYNELNLGRREEYDVLDKRRGRDPEMGGKPQRRKNPQEGLYNELQKDKMAEAYSEIGMKGERRRGKGHDGLYQGLSTATKDTYDALHMQALPPR

SEQ ID NO: 20814 - protein, 929 aa, Artificial Sequence
  Synthetic Polypeptide
MALPVTALLLPLALLLHAARPQIVLTQSPAIMSASPGEEVTLTCSATSSVSYIHWFQQRPGTSPKLWIYSTSNLASGVPVRFSGSGYGTSYSLTISRMEAEDAATYYCQQRSSSPFTFGSGTKLEIKLEGKPIPNPLLGLDSTGSGEDLKNVFPPEVAVFEPSEAEISHTQKATLVCLATGFYPDHVELSWWVNGKEVHSGVSTDPQPLKEQPALNDSRYCLSSRLRVSATFWQNPRNHFRCQVQFYGLSENDEWTQDRAKPVTQIVSAEAWGRADCGSQSFGLLDPKLCYLLDGILFIYGVILTALFLRSKRSRLLHSDYMNMTPRRPGPTRKHYQPYAPPRDFAAYRSRVKFSRSADAPAYQQGQNQLYNELNLGRREEYDVLDKRRGRDPEMGGKPQRRKNPQEGLYNELQKDKMAEAYSEIGMKGERRRGKGHDGLYQGLSTATKDTYDALHMQALPPRRAKRSGSGATNFSLLKQAGDVEENPGPTSMDWIWRILFLVGAATGAHSFEEVKVVESGGDLVKPGGSLKLSCVVSGFTFSRYGMSWVRQTPGKRLEWVATISGGGTYIYYPDSVKGRFTISRDNAKNTLYLQMSSLKSEDTAMYHCTRDNYGRNYDYGMDYWGQGTSVTVSSTREQKLISEEDGSGIQNPDPAVYQLRDSKSSDKSVCLFTDFDSQTNVSQSKDSDVYITDKTVLDMRSMDFKSNSAVAWSNKSDFACANAFNNSIIPEDTFFPSPESSCGTQSFGLLDPKLCYLLDGILFIYGVILTALFLRSKRSRLLHSDYMNMTPRRPGPTRKHYQPYAPPRDFAAYRSRVKFSRSADAPAYQQGQNQLYNELNLGRREEYDVLDKRRGRDPEMGGKPQRRKNPQEGLYNELQKDKMAEAYSEIGMKGERRRGKGHDGLYQGLSTATKDTYDALHMQALPPR

SEQ ID NO: 20815 - protein, 890 aa, Artificial Sequence
  Synthetic Polypeptide
MALPVTALLLPLALLLHAARPQIVLTQSPAIMSASPGEEVTLTCSATSSVSYIHWFQQRPGTSPKLWIYSTSNLASGVPVRFSGSGYGTSYSLTISRMEAEDAATYYCQQRSSSPFTFGSGTKLEIKLEGKPIPNPLLGLDSTGSGEDLKNVFPPEVAVFEPSEAEISHTQKATLVCLATGFYPDHVELSWWVNGKEVHSGVSTDPQPLKEQPALNDSRYCLSSRLRVSATFWQNPRNHFRCQVQFYGLSENDEWTQDRAKPVTQIVSAEAWGRADCGSQSFGLLDPKLCYLLDGILFIYGVILTALFLRVKFSRSADAPAYQQGQNQLYNELNLGRREEYDVLDKRRGRDPEMGGKPQRRKNPQEGLYNELQKDKMAEAYSEIGMKGERRRGKGHDGLYQGLSTATKDTYDALHMQALPPRRAKRSGSGATNFSLLKQAGDVEENPGPTSMDWIWRILFLVGAATGAHSFEEVKVVESGGDLVKPGGSLKLSCVVSGFTFSRYGMSWVRQTPGKRLEWVATISGGGTYIYYPDSVKGRFTISRDNAKNTLYLQMSSLKSEDTAMYHCTRDNYGRNYDYGMDYWGQGTSVTVSSTREQKLISEEDLGSGIQNPDPAVYQLRDSKSSDKSVCLFTDFDSQTNVSQSKDSDVYITDKTVLDMRSMDFKSNSAVAWSNKSDFACANAFNNSIIPEDTFFPSPESSCGTQSFGLLDPKLCYLLDGILFIYGVILTALFLKRGRKKLLYIFKQPFMRPVQTTQEEDGCSCRFPEEEEGGCELRVKFSRSADAPAYQQGQNQLYNELNLGRREEYDVLDKRRGRDPEMGGKPQRRKNPQEGLYNELQKDKMAEAYSEIGMKGERRRGKGHDGLYQGLSTATKDTYDALHMQALPPR

SEQ ID NO: 20816 - protein, 932 aa, Artificial Sequence
  Synthetic Polypeptide
MALPVTALLLPLALLLHAARPQIVLTQSPAIMSASPGEEVTLTCSATSSVSYIHWFQQRPGTSPKLWIYSTSNLASGVPVRFSGSGYGTSYSLTISRMEAEDAATYYCQQRSSSPFTFGSGTKLEIKLEGKPIPNPLLGLDSTGSGEDLKNVFPPEVAVFEPSEAEISHTQKATLVCLATGFYPDHVELSWWVNGKEVHSGVSTDPQPLKEQPALNDSRYCLSSRLRVSATFWQNPRNHFRCQVQFYGLSENDEWTQDRAKPVTQIVSAEAWGRADCGSQSFGLLDPKLCYLLDGILFIYGVILTALFLKRGRKKLLYIFKQPFMRPVQTTQEEDGCSCRFPEEEEGGCELRVKFSRSADAPAYQQGQNQLYNELNLGRREEYDVLDKRRGRDPEMGGKPQRRKNPQEGLYNELQKDKMAEAYSEIGMKGERRRGKGHDGLYQGLSTATKDTYDALHMQALPPRRAKRSGSGATNFSLLKQAGDVEENPGPTSMDWIWRILFLVGAATGAHSFEEVKVVESGGDLVKPGGSLKLSCVVSGFTFSRYGMSWVRQTPGKRLEWVATISGGGTYIYYPDSVKGRFTISRDNAKNTLYLQMSSLKSEDTAMYHCTRDNYGRNYDYGMDYWGQGTSVTVSSTREQKLISEEDLGSGIQNPDPAVYQLRDSKSSDKSVCLFTDFDSQTNVSQSKDSDVYITDKTVLDMRSMDFKSNSAVAWSNKSDFACANAFNNSIIPEDTFFPSPESSCGTQSFGLLDPKLCYLLDGILFIYGVILTALFLKRGRKKLLYIFKQPFMRPVQTTQEEDGCSCRFPEEEEGGCELRVKFSRSADAPAYQQGQNQLYNELNLGRREEYDVLDKRRGRDPEMGGKPQRRKNPQEGLYNELQKDKMAEAYSEIGMKGERRRGKGHDGLYQGLSTATKDTYDALHMQALPPR

SEQ ID NO: 20817 - protein, 822 aa, Artificial Sequence
  Synthetic Polypeptide
MALPVTALLLPLALLLHAARPQIVLTQSPAIMSASPGEEVTLTCSATSSVSYIHWFQQRPGTSPKLWIYSTSNLASGVPVRFSGSGYGTSYSLTISRMEAEDAATYYCQQRSSSPFTFGSGTKLEIKLEQSFGLLDPKLCYLLDGILFIYGVILTALFLRVKFSRSADAPAYQQGQNQLYNELNLGRREEYDVLDKRRGRDPEMGGKPQRRKNPQEGLYNELQKDKMAEAYSEIGMKGERRRGKGHDGLYQGLSTATKDTYDALHMQALPPRRAKRSGSGATNFSLLKQAGDVEENPGPTSMDWIWRILFLVGAATGAHSFEEVKVVESGGDLVKPGGSLKLSCVVSGFTFSRYGMSWVRQTPGKRLEWVATISGGGTYIYYPDSVKGRFTISRDNAKNTLYLQMSSLKSEDTAMYHCTRDNYGRNYDYGMDYWGQGTSVTVSSTRQSFGLLDPKLCYLLDGILFIYGVILTALFLRVKFSRSADAPAYQQGQNQLYNELNLGRREEYDVLDKRRGRDPEMGGKPQRRKNPQEGLYNELQKDKMAEAYSEIGMKGERRRGKGHDGLYQGLSTATKDTYDALHMQALPPRRAKRSGSGVKQTLNFDLLKLAGDVESNPGPSRGHMTEYKPTVRLATRDDVPRAVRTLAAAFADYPATRHTVDPDRHIERVTELQELFLTRVGLDIGKVWVADDGAAVAVWTTPESVEAGAVFAEIGPRMAELSGSRLAAQQQMEGLLAPHRPKEPAWFLATVGVSPDHQGKGLGSAVVLPGVEAAERAGVPAFLETSAPRNLPFYERLGFTVTADVEVPEGPRTWCMTRKPGA

SEQ ID NO: 20818 - protein, 647 aa, Artificial Sequence
  Synthetic Polypeptide
MALPVTALLLPLALLLHAARPQIVLTQSPAIMSASPGEEVTLTCSATSSVSYIHWFQQRPGTSPKLWIYSTSNLASGVPVRFSGSGYGTSYSLTISRMEAEDAATYYCQQRSSSPFTFGSGTKLEIKLEGQPKANPTVTLFPPSSEELQANKATLVCLISDFYPGAVTVAWKADGSPVKAGVETTKPSKQSNNKYAASSYLSLTPEQWKSHRSYSCQVTHEGSTVEKTVAPTECSPIKTDVITMDPKDNCSKDANDTLLLQLTNTSAYYMYLLLLLKSVVYFAIITCCLLRRTAFCCNGEKSRAKRSGSGATNFSLLKQAGDVEENPGPTSMDWIWRILFLVGAATGAHSFEEVKVVESGGDLVKPGGSLKLSCVVSGFTFSRYGMSWVRQTPGKRLEWVATISGGGTYIYYPDSVKGRFTISRDNAKNTLYLQMSSLKSEDTAMYHCTRDNYGRNYDYGMDYWGQGTSVTVSSTRASTKGPSVFPLAPSSKSTSGGTAALGCLVKDYFPEPVTVSWNSGALTSGVHTFPAVLQSSGLYSLSSVVTVPSSSLGTQTYICNVNHKPSNTKVDKRVEPKSCEVKTDSTDHVKPKETENTKQPSKSCHKPKAIVHTEKVNMMSLTVLGLRMLFAKTVAVNFLLTAKLFFL

SEQ ID NO: 20819 - protein, 625 aa, Artificial Sequence
  Synthetic Polypeptide
MALPVTALLLPLALLLHAARPQIVLTQSPAIMSASPGEEVTLTCSATSSVSYIHWFQQRPGTSPKLWIYSTSNLASGVPVRFSGSGYGTSYSLTISRMEAEDAATYYCQQRSSSPFTFGSGTKLEIKLEGQPKANPTVTLFPPSSEELQANKATLVCLISDFYPGAVTVAWKADGSPVKAGVETTKPSKQSNNKYAASSYLSLTPEQWKSHRSYSCQVTHEGSTVEKTVAPTECSGRADCGITSASYHQGVLSATILYEILLGKATLYAVLVSALVLMAMVKRKDSRGRAKRSGSGATNFSLLKQAGDVEENPGPTSMDWIWRILFLVGAATGAHSFEEVKVVESGGDLVKPGGSLKLSCVVSGFTFSRYGMSWVRQTPGKRLEWVATISGGGTYIYYPDSVKGRFTISRDNAKNTLYLQMSSLKSEDTAMYHCTRDNYGRNYDYGMDYWGQGTSVTVSSTRASTKGPSVFPLAPSSKSTSGGTAALGCLVKDYFPEPVTVSWNSGALTSGVHTFPAVLQSSGLYSLSSVVTVPSSSLGTQTYICNVNHKPSNTKVDKRVEPKSCIPEDTFFPSSDVPCDVKLVEKSFETDTNLNFQNLSVIGFRILLLKVAGFNLLMTLRLWSS

SEQ ID NO: 20820 - protein, 625 aa, Artificial Sequence
  Synthetic Polypeptide
MALPVTALLLPLALLLHAARPQIVLTQSPAIMSASPGEEVTLTCSATSSVSYIHWFQQRPGTSPKLWIYSTSNLASGVPVRFSGSGYGTSYSLTISRMEAEDAATYYCQQRSSSPFTFGSGTKLEIKLEGQPKANPTVTLFPPSSEELQANKATLVCLISDFYPGAVTVAWKADGSPVKAGVETTKPSKQSNNKYAASSYLSLTPEQWKSHRSYSCQVTHEGSTVEKTVAPTECSGRADCGFTSESYQQGVLSATILYEILLGKATLYAVLVSALVLMAMVKRKDSRGRAKRSGSGATNFSLLKQAGDVEENPGPTSMDWIWRILFLVGAATGAHSFEEVKVVESGGDLVKPGGSLKLSCVVSGFTFSRYGMSWVRQTPGKRLEWVATISGGGTYIYYPDSVKGRFTISRDNAKNTLYLQMSSLKSEDTAMYHCTRDNYGRNYDYGMDYWGQGTSVTVSSTRASTKGPSVFPLAPSSKSTSGGTAALGCLVKDYFPEPVTVSWNSGALTSGVHTFPAVLQSSGLYSLSSVVTVPSSSLGTQTYICNVNHKPSNTKVDKRVEPKSCIPEDTFFPSPESSCDVKLVEKSFETDTNLNFQNLSVIGFRILLLKVAGFNLLMTLRLWSS

SEQ ID NO: 20821 - protein, 451 aa, Artificial Sequence
  Synthetic Polypeptide
MALPVTALLLPLALLLHAARPQIVLTQSPAIMSASPGEEVTLTCSATSSVSYIHWFQQRPGTSPKLWIYSTSNLASGVPVRFSGSGYGTSYSLTISRMEAEDAATYYCQQRSSSPFTFGSGTKLEIKGGGGSGGGGSGGGGSEVKVVESGGDLVKPGGSLKLSCVVSGFTFSRYGMSWVRQTPGKRLEWVATISGGGTYIYYPDSVKGRFTISRDNAKNTLYLQMSSLKSEDTAMYHCTRDNYGRNYDYGMDYWGQGTSVTVSSTRDGNEEMGGITQTPYKVSISGTTVILTCPQYPGSEILWQHNDKNIGGDEDDKNIGSDEDHLSLKEFSELEQSGYYVCYPRGSKPEDANFYLYLRARVCENCMEMDVMSVATIVIVDICITGGLLLLVYYWSKNRKAKAKPVTRGAGAGGRQRGQNKERPPPVPNPDYEPIRKGQRDLYSGLNQRRI

SEQ ID NO: 20822 - protein, 416 aa, Artificial Sequence
  Synthetic Polypeptide
MALPVTALLLPLALLLHAARPQIVLTQSPAIMSASPGEEVTLTCSATSSVSYIHWFQQRPGTSPKLWIYSTSNLASGVPVRFSGSGYGTSYSLTISRMEAEDAATYYCQQRSSSPFTFGSGTKLEIKGGGGSGGGGSGGGGSEVKVVESGGDLVKPGGSLKLSCVVSGFTFSRYGMSWVRQTPGKRLEWVATISGGGTYIYYPDSVKGRFTISRDNAKNTLYLQMSSLKSEDTAMYHCTRDNYGRNYDYGMDYWGQGTSVTVSSTRFKIPIEELEDRVFVNCNTSITWVEGTVGTLLSDITRLDLGKRILDPRGIYRCNGTDIYKDKESTVQVHYRMCQSCVELDPATVAGIIVTDVIATLLLALGVFCFAGHETGRLSGAADTQALLRNDQVYQPLRDRDDAQYSHLGGNWARNK

SEQ ID NO: 20823 - protein, 426 aa, Artificial Sequence
  Synthetic Polypeptide
MALPVTALLLPLALLLHAARPQIVLTQSPAIMSASPGEEVTLTCSATSSVSYIHWFQQRPGTSPKLWIYSTSNLASGVPVRFSGSGYGTSYSLTISRMEAEDAATYYCQQRSSSPFTFGSGTKLEIKGGGGSGGGGSGGGGSEVKVVESGGDLVKPGGSLKLSCVVSGFTFSRYGMSWVRQTPGKRLEWVATISGGGTYIYYPDSVKGRFTISRDNAKNTLYLQMSSLKSEDTAMYHCTRDNYGRNYDYGMDYWGQGTSVTVSSTRQSIKGNHLVKVYDYQEDGSVLLTCDAEAKNITWFKDGKMIGFLTEDKKKWNLGSNAKDPRGMYQCKGSQNKSKPLQVYYRMCQNCIELNAATISGFLFAEIVSIFVLAVGVYFIAGQDGVRQSRASDKQTLLPNDQLYQPLKDREDDQYSHLQGNQLRRN

SEQ ID NO: 20824 - protein, 409 aa, Artificial Sequence
  Synthetic Polypeptide
MALPVTALLLPLALLLHAARPQIVLTQSPAIMSASPGEEVTLTCSATSSVSYIHWFQQRPGTSPKLWIYSTSNLASGVPVRFSGSGYGTSYSLTISRMEAEDAATYYCQQRSSSPFTFGSGTKLEIKGGGGSGGGGSGGGGSEVKVVESGGDLVKPGGSLKLSCVVSGFTFSRYGMSWVRQTPGKRLEWVATISGGGTYIYYPDSVKGRFTISRDNAKNTLYLQMSSLKSEDTAMYHCTRDNYGRNYDYGMDYWGQGTSVTVSSTRQSFGLLDPKLCYLLDGILFIYGVILTALFLRVKFSRSADAPAYQQGQNQLYNELNLGRREEYDVLDKRRGRDPEMGGKPQRRKNPQEGLYNELQKDKMAEAYSEIGMKGERRRGKGHDGLYQGLSTATKDTYDALHMQALPPR

SEQ ID NO: 20825 - protein, 451 aa, Artificial Sequence
  Synthetic Polypeptide
MALPVTALLLPLALLLHAARPEVKVVESGGDLVKPGGSLKLSCVVSGFTFSRYGMSWVRQTPGKRLEWVATISGGGTYIYYPDSVKGRFTISRDNAKNTLYLQMSSLKSEDTAMYHCTRDNYGRNYDYGMDYWGQGTSVTVSSGGGGSGGGGSGGGGSQIVLTQSPAIMSASPGEEVTLTCSATSSVSYIHWFQQRPGTSPKLWIYSTSNLASGVPVRFSGSGYGTSYSLTISRMEAEDAATYYCQQRSSSPFTFGSGTKLEIKTRDGNEEMGGITQTPYKVSISGTTVILTCPQYPGSEILWQHNDKNIGGDEDDKNIGSDEDHLSLKEFSELEQSGYYVCYPRGSKPEDANFYLYLRARVCENCMEMDVMSVATIVIVDICITGGLLLLVYYWSKNRKAKAKPVTRGAGAGGRQRGQNKERPPPVPNPDYEPIRKGQRDLYSGLNQRRI

SEQ ID NO: 20826 - protein, 416 aa, Artificial Sequence
  Synthetic Polypeptide
MALPVTALLLPLALLLHAARPEVKVVESGGDLVKPGGSLKLSCVVSGFTFSRYGMSWVRQTPGKRLEWVATISGGGTYIYYPDSVKGRFTISRDNAKNTLYLQMSSLKSEDTAMYHCTRDNYGRNYDYGMDYWGQGTSVTVSSGGGGSGGGGSGGGGSQIVLTQSPAIMSASPGEEVTLTCSATSSVSYIHWFQQRPGTSPKLWIYSTSNLASGVPVRFSGSGYGTSYSLTISRMEAEDAATYYCQQRSSSPFTFGSGTKLEIKTRFKIPIEELEDRVFVNCNTSITWVEGTVGTLLSDITRLDLGKRILDPRGIYRCNGTDIYKDKESTVQVHYRMCQSCVELDPATVAGIIVTDVIATLLLALGVFCFAGHETGRLSGAADTQALLRNDQVYQPLRDRDDAQYSHLGGNWARNK

SEQ ID NO: 20827 - protein, 426 aa, Artificial Sequence
  Synthetic Polypeptide
MALPVTALLLPLALLLHAARPEVKVVESGGDLVKPGGSLKLSCVVSGFTFSRYGMSWVRQTPGKRLEWVATISGGGTYIYYPDSVKGRFTISRDNAKNTLYLQMSSLKSEDTAMYHCTRDNYGRNYDYGMDYWGQGTSVTVSSGGGGSGGGGSGGGGSQIVLTQSPAIMSASPGEEVTLTCSATSSVSYIHWFQQRPGTSPKLWIYSTSNLASGVPVRFSGSGYGTSYSLTISRMEAEDAATYYCQQRSSSPFTFGSGTKLEIKTRQSIKGNHLVKVYDYQEDGSVLLTCDAEAKNITWFKDGKMIGFLTEDKKKWNLGSNAKDPRGMYQCKGSQNKSKPLQVYYRMCQNCIELNAATISGFLFAEIVSIFVLAVGVYFIAGQDGVRQSRASDKQTLLPNDQLYQPLKDREDDQYSHLQGNQLRRN

SEQ ID NO: 20828 - protein, 409 aa, Artificial Sequence
  Synthetic Polypeptide
MALPVTALLLPLALLLHAARPEVKVVESGGDLVKPGGSLKLSCVVSGFTFSRYGMSWVRQTPGKRLEWVATISGGGTYIYYPDSVKGRFTISRDNAKNTLYLQMSSLKSEDTAMYHCTRDNYGRNYDYGMDYWGQGTSVTVSSGGGGSGGGGSGGGGSQIVLTQSPAIMSASPGEEVTLTCSATSSVSYIHWFQQRPGTSPKLWIYSTSNLASGVPVRFSGSGYGTSYSLTISRMEAEDAATYYCQQRSSSPFTFGSGTKLEIKTRQSFGLLDPKLCYLLDGILFIYGVILTALFLRVKFSRSADAPAYQQGQNQLYNELNLGRREEYDVLDKRRGRDPEMGGKPQRRKNPQEGLYNELQKDKMAEAYSEIGMKGERRRGKGHDGLYQGLSTATKDTYDALHMQALPPR

SEQ ID NO: 20829 - protein, 642 aa, Artificial Sequence
  Synthetic Polypeptide
MALPVTALLLPLALLLHAARPQIVLTQSPAIMSASPGEEVTLTCSATSSVSYIHWFQQRPGTSPKLWIYSTSNLASGVPVRFSGSGYGTSYSLTISRMEAEDAATYYCQQRSSSPFTFGSGTKLEIKGGGGSGGGGSGGGGSEVKVVESGGDLVKPGGSLKLSCVVSGFTFSRYGMSWVRQTPGKRLEWVATISGGGTYIYYPDSVKGRFTISRDNAKNTLYLQMSSLKSEDTAMYHCTRDNYGRNYDYGMDYWGQGTSVTVSSTRGSGIQNPDPAVYQLRDSKSSDKSVCLFTDFDSQTNVSQSKDSDVYITDKTVLDMRSMDFKSNSAVAWSNKSDFACANAFNNSIIPEDTFFPSPESSCDVKLVEKSFETDTNLNFQNLSVIGFRILLLKVAGFNLLMTLRLWSSRAKRSGSGVKQTLNFDLLKLAGDVESNPGPSRGHMTEYKPTVRLATRDDVPRAVRTLAAAFADYPATRHTVDPDRHIERVTELQELFLTRVGLDIGKVWVADDGAAVAVWTTPESVEAGAVFAEIGPRMAELSGSRLAAQQQMEGLLAPHRPKEPAWFLATVGVSPDHQGKGLGSAVVLPGVEAAERAGVPAFLETSAPRNLPFYERLGFTVTADVEVPEGPRTWCMTRKPGA

SEQ ID NO: 20830 - protein, 674 aa, Artificial Sequence
  Synthetic Polypeptide
MALPVTALLLPLALLLHAARPQIVLTQSPAIMSASPGEEVTLTCSATSSVSYIHWFQQRPGTSPKLWIYSTSNLASGVPVRFSGSGYGTSYSLTISRMEAEDAATYYCQQRSSSPFTFGSGTKLEIKGGGGSGGGGSGGGGSEVKVVESGGDLVKPGGSLKLSCVVSGFTFSRYGMSWVRQTPGKRLEWVATISGGGTYIYYPDSVKGRFTISRDNAKNTLYLQMSSLKSEDTAMYHCTRDNYGRNYDYGMDYWGQGTSVTVSSLEDLKNVFPPEVAVFEPSEAEISHTQKATLVCLATGFYPDHVELSWWVNGKEVHSGVSTDPQPLKEQPALNDSRYCLSSRLRVSATFWQNPRNHFRCQVQFYGLSENDEWTQDRAKPVTQIVSAEAWGRADCGFTSESYQQGVLSATILYEILLGKATLYAVLVSALVLMAMVKRKDSRGRAKRSGSGATNFSLLKQAGDVEENPGPTRGHMTEYKPTVRLATRDDVPRAVRTLAAAFADYPATRHTVDPDRHIERVTELQELFLTRVGLDIGKVWVADDGAAVAVWTTPESVEAGAVFAEIGPRMAELSGSRLAAQQQMEGLLAPHRPKEPAWFLATVGVSPDHQGKGLGSAVVLPGVEAAERAGVPAFLETSAPRNLPFYERLGFTVTADVEVPEGPRTWCMTRKPGA

SEQ ID NO: 20831 - protein, 724 aa, Artificial Sequence
  Synthetic Polypeptide
MALPVTALLLPLALLLHAARPQIVLTQSPAIMSASPGEEVTLTCSATSSVSYIHWFQQRPGTSPKLWIYSTSNLASGVPVRFSGSGYGTSYSLTISRMEAEDAATYYCQQRSSSPFTFGSGTKLEIKGGGGSGGGGSGGGGSEVKVVESGGDLVKPGGSLKLSCVVSGFTFSRYGMSWVRQTPGKRLEWVATISGGGTYIYYPDSVKGRFTISRDNAKNTLYLQMSSLKSEDTAMYHCTRDNYGRNYDYGMDYWGQGTSVTVSSTREQKLISEEDLGSGTPFPSLAPPIMLLVDGKQQMVVVCLVLDVAPPGLDSPIWFSAGNGSALDAFTYGPSPATDGTWTNLAHLSLPSEELASWEPLVCHTGPGAEGHSRSTQPMHLSGEASTARTCPQEPLRGTPGGALWLGVLRLLLFKLLLFDLLLTCSCLCDPAGPLPSPATTTRLRALGSHRLHPATETGGREATSSPRPQPRDRRWGDTPPGRKPGSPVRAKRSGSGVKQTLNFDLLKLAGDVESNPGPSRSRGHMTEYKPTVRLATRDDVPRAVRTLAAAFADYPATRHTVDPDRHIERVTELQELFLTRVGLDIGKVWVADDGAAVAVWTTPESVEAGAVFAEIGPRMAELSGSRLAAQQQMEGLLAPHRPKEPAWFLATVGVSPDHQGKGLGSAVVLPGVEAAERAGVPAFLETSAPRNLPFYERLGFTVTADVEVPEGPRTWCMTRKPGA

SEQ ID NO: 20832 - protein, 537 aa, Artificial Sequence
  Synthetic Polypeptide
MALPVTALLLPLALLLHAARPQIVLTQSPAIMSASPGEEVTLTCSATSSVSYIHWFQQRPGTSPKLWIYSTSNLASGVPVRFSGSGYGTSYSLTISRMEAEDAATYYCQQRSSSPFTFGSGTKLEIKLEDLKNVFPPEVAVFEPSEAEISHTQKATLVCLATGFYPDHVELSWWVNGKEVHSGVSTDPQPLKEQPALNDSRYCLSSRLRVSATFWQNPRNHFRCQVQFYGLSENDEWTQDRAKPVTQIVSAEAWGRADCGFTSESYQQGVLSATILYEILLGKATLYAVLVSALVLMAMVKRKDSRGRAKRSGSGATNFSLLKQAGDVEENPGPTRGHMTEYKPTVRLATRDDVPRAVRTLAAAFADYPATRHTVDPDRHIERVTELQELFLTRVGLDIGKVWVADDGAAVAVWTTPESVEAGAVFAEIGPRMAELSGSRLAAQQQMEGLLAPHRPKEPAWFLATVGVSPDHQGKGLGSAVVLPGVEAAERAGVPAFLETSAPRNLPFYERLGFTVTADVEVPEGPRTWCMTRKPGA

SEQ ID NO: 20833 - protein, 307 aa, Artificial Sequence
  Synthetic Polypeptide
MALPVTALLLPLALLLHAARPQIVLTQSPAIMSASPGEEVTLTCSATSSVSYIHWFQQRPGTSPKLWIYSTSNLASGVPVRFSGSGYGTSYSLTISRMEAEDAATYYCQQRSSSPFTFGSGTKLEIKLEDLKNVFPPEVAVFEPSEAEISHTQKATLVCLATGFYPDHVELSWWVNGKEVHSGVSTDPQPLKEQPALNDSRYCLSSRLRVSATFWQNPRNHFRCQVQFYGLSENDEWTQDRAKPVTQIVSAEAWGRADCGFTSESYQQGVLSATILYEILLGKATLYAVLVSALVLMAMVKRKDSRG

SEQ ID NO: 20834 - protein, 451 aa, Artificial Sequence
  Synthetic Polypeptide
MDWIWRILFLVGAATGAHSFEEVKVVESGGDLVKPGGSLKLSCVVSGFTFSRYGMSWVRQTPGKRLEWVATISGGGTYIYYPDSVKGRFTISRDNAKNTLYLQMSSLKSEDTAMYHCTRDNYGRNYDYGMDYWGQGTSVTVSSTRIQNPDPAVYQLRDSKSSDKSVCLFTDFDSQTNVSQSKDSDVYITDKTVLDMRSMDFKSNSAVAWSNKSDFACANAFNNSIIPEDTFFPSPESSCDVKLVEKSFETDTNLNFQNLSVIGFRILLLKVAGFNLLMTLRLWSSRAKRSGSGVKQTLNFDLLKLAGDVESNPGPSRGHMAKPLSQEESTLIERATATINSIPISEDYSVASAALSSDGRIFTGVNVYHFTGGPCAELVVLGTAAAAAAGNLTCIVAIGNENRGILSPCGRCRQVLLDLHPGIKAIVKDSDGQPTAVGIRELLPSGYVWEG

SEQ ID NO: 20835 - protein, 285 aa, Artificial Sequence
  Synthetic Polypeptide
MDWIWRILFLVGAATGAHSFEEVKVVESGGDLVKPGGSLKLSCVVSGFTFSRYGMSWVRQTPGKRLEWVATISGGGTYIYYPDSVKGRFTISRDNAKNTLYLQMSSLKSEDTAMYHCTRDNYGRNYDYGMDYWGQGTSVTVSSTRIQNPDPAVYQLRDSKSSDKSVCLFTDFDSQTNVSQSKDSDVYITDKTVLDMRSMDFKSNSAVAWSNKSDFACANAFNNSIIPEDTFFPSPESSCDVKLVEKSFETDTNLNFQNLSVIGFRILLLKVAGFNLLMTLRLWSS

SEQ ID NO: 20836 - protein, 555 aa, Artificial Sequence
  Synthetic Polypeptide
MALPVTALLLPLALLLHAARPQIVLTQSPAIMSASPGEEVTLTCSATSSVSYIHWFQQRPGTSPKLWIYSTSNLASGVPVRFSGSGYGTSYSLTISRMEAEDAATYYCQQRSSSPFTFGSGTKLEIKLEGKPIPNPLLGLDSTGSGEDLKNVFPPEVAVFEPSEAEISHTQKATLVCLATGFYPDHVELSWWVNGKEVHSGVCTDPQPLKEQPALNDSRYCLSSRLRVSATFWQNPRNHFRCQVQFYGLSENDEWTQDRAKPVTQIVSAEAWGRADCGFTSESYQQGVLSATILYEILLGKATLYAVLVSALVLMAMVKRKDSRGRAKRSGSGATNFSLLKQAGDVEENPGPTRGHMTEYKPTVRLATRDDVPRAVRTLAAAFADYPATRHTVDPDRHIERVTELQELFLTRVGLDIGKVWVADDGAAVAVWTTPESVEAGAVFAEIGPRMAELSGSRLAAQQQMEGLLAPHRPKEPAWFLATVGVSPDHQGKGLGSAVVLPGVEAAERAGVPAFLETSAPRNLPFYERLGFTVTADVEVPEGPRTWCMTRKPGA

SEQ ID NO: 20837 - protein, 325 aa, Artificial Sequence
  Synthetic Polypeptide
MALPVTALLLPLALLLHAARPQIVLTQSPAIMSASPGEEVTLTCSATSSVSYIHWFQQRPGTSPKLWIYSTSNLASGVPVRFSGSGYGTSYSLTISRMEAEDAATYYCQQRSSSPFTFGSGTKLEIKLEGKPIPNPLLGLDSTGSGEDLKNVFPPEVAVFEPSEAEISHTQKATLVCLATGFYPDHVELSWWVNGKEVHSGVCTDPQPLKEQPALNDSRYCLSSRLRVSATFWQNPRNHFRCQVQFYGLSENDEWTQDRAKPVTQIVSAEAWGRADCGFTSESYQQGVLSATILYEILLGKATLYAVLVSALVLMAMVKRKDSRG

SEQ ID NO: 20838 - protein, 463 aa, Artificial Sequence
  Synthetic Polypeptide
MDWIWRILFLVGAATGAHSFEEVKVVESGGDLVKPGGSLKLSCVVSGFTFSRYGMSWVRQTPGKRLEWVATISGGGTYIYYPDSVKGRFTISRDNAKNTLYLQMSSLKSEDTAMYHCTRDNYGRNYDYGMDYWGQGTSVTVSSTREQKLISEEDGSGIQNPDPAVYQLRDSKSSDKSVCLFTDFDSQTNVSQSKDSDVYITDKCVLDMRSMDFKSNSAVAWSNKSDFACANAFNNSIIPEDTFFPSPESSCDVKLVEKSFETDTNLNFQNLSVIGFRILLLKVAGFNLLMTLRLWSSRAKRSGSGVKQTLNFDLLKLAGDVESNPGPSRGHMAKPLSQEESTLIERATATINSIPISEDYSVASAALSSDGRIFTGVNVYHFTGGPCAELVVLGTAAAAAAGNLTCIVAIGNENRGILSPCGRCRQVLLDLHPGIKAIVKDSDGQPTAVGIRELLPSGYVWEG

SEQ ID NO: 20839 - protein, 297 aa, Artificial Sequence
  Synthetic Polypeptide
MDWIWRILFLVGAATGAHSFEEVKVVESGGDLVKPGGSLKLSCVVSGFTFSRYGMSWVRQTPGKRLEWVATISGGGTYIYYPDSVKGRFTISRDNAKNTLYLQMSSLKSEDTAMYHCTRDNYGRNYDYGMDYWGQGTSVTVSSTREQKLISEEDGSGIQNPDPAVYQLRDSKSSDKSVCLFTDFDSQTNVSQSKDSDVYITDKCVLDMRSMDFKSNSAVAWSNKSDFACANAFNNSIIPEDTFFPSPESSCDVKLVEKSFETDTNLNFQNLSVIGFRILLLKVAGFNLLMTLRLWSS

SEQ ID NO: 20840 - protein, 642 aa, Artificial Sequence
  Synthetic Polypeptide
MALPVTALLLPLALLLHAARPQIVLTQSPAIMSASPGEEVTLTCSATSSVSYIHWFQQRPGTSPKLWIYSTSNLASGVPVRFSGSGYGTSYSLTISRMEAEDAATYYCQQRSSSPFTFGSGTKLEIKGGGGSGGGGSGGGGSEVKVVESGGDLVKPGGSLKLSCVVSGFTFSRYGMSWVRQTPGKRLEWVATISGGGTYIYYPDSVKGRFTISRDNAKNTLYLQMSSLKSEDTAMYHCTRDNYGRNYDYGMDYWGQGTSVTVSSTRGSGIQNPDPAVYQLRDSKSSDKSVCLFTDFDSQTNVSQSKDSDVYITDKTVLDMRSMDFKSNSAVAWSNKSDFACANAFNNSIIPEDTFFPSSDVPCDVKLVEKSFETDTNLNFQNLSVIGFRILLLKVAGFNLLMTLRLWSSRAKRSGSGVKQTLNFDLLKLAGDVESNPGPSRGHMTEYKPTVRLATRDDVPRAVRTLAAAFADYPATRHTVDPDRHIERVTELQELFLTRVGLDIGKVWVADDGAAVAVWTTPESVEAGAVFAEIGPRMAELSGSRLAAQQQMEGLLAPHRPKEPAWFLATVGVSPDHQGKGLGSAVVLPGVEAAERAGVPAFLETSAPRNLPFYERLGFTVTADVEVPEGPRTWCMTRKPGA

SEQ ID NO: 20841 - protein, 674 aa, Artificial Sequence
  Synthetic Polypeptide
MALPVTALLLPLALLLHAARPQIVLTQSPAIMSASPGEEVTLTCSATSSVSYIHWFQQRPGTSPKLWIYSTSNLASGVPVRFSGSGYGTSYSLTISRMEAEDAATYYCQQRSSSPFTFGSGTKLEIKGGGGSGGGGSGGGGSEVKVVESGGDLVKPGGSLKLSCVVSGFTFSRYGMSWVRQTPGKRLEWVATISGGGTYIYYPDSVKGRFTISRDNAKNTLYLQMSSLKSEDTAMYHCTRDNYGRNYDYGMDYWGQGTSVTVSSLEDLKNVFPPEVAVFEPSKAEIAHTQKATLVCLATGFYPDHVELSWWVNGKEVHSGVSTDPQPLKEQPALNDSRYCLSSRLRVSATFWQNPRNHFRCQVQFYGLSENDEWTQDRAKPVTQIVSAEAWGRADCGITSASYHQGVLSATILYEILLGKATLYAVLVSALVLMAMVKRKDSRGRAKRSGSGATNFSLLKQAGDVEENPGPTRGHMTEYKPTVRLATRDDVPRAVRTLAAAFADYPATRHTVDPDRHIERVTELQELFLTRVGLDIGKVWVADDGAAVAVWTTPESVEAGAVFAEIGPRMAELSGSRLAAQQQMEGLLAPHRPKEPAWFLATVGVSPDHQGKGLGSAVVLPGVEAAERAGVPAFLETSAPRNLPFYERLGFTVTADVEVPEGPRTWCMTRKPGA

SEQ ID NO: 20842 - protein, 697 aa, Artificial Sequence
  Synthetic Polypeptide
MALPVTALLLPLALLLHAARPQIVLTQSPAIMSASPGEEVTLTCSATSSVSYIHWFQQRPGTSPKLWIYSTSNLASGVPVRFSGSGYGTSYSLTISRMEAEDAATYYCQQRSSSPFTFGSGTKLEIKGGGGSGGGGSGGGGSEVKVVESGGDLVKPGGSLKLSCVVSGFTFSRYGMSWVRQTPGKRLEWVATISGGGTYIYYPDSVKGRFTISRDNAKNTLYLQMSSLKSEDTAMYHCTRDNYGRNYDYGMDYWGQGTSVTVSSTRGSGGGGSGGGGSGDGNEEMGGITQTPYKVSISGTTVILTCPQYPGSEILWQHNDKNIGGDEDDKNIGSDEDHLSLKEFSELEQSGYYVCYPRGSKPEDANFYLYLRARVCENCMEMDVMSVATIVIVDICITGGLLLLVYYWSKNRKAKAKPVTRGAGAGGRQRGQNKERPPPVPNPDYEPIRKGQRDLYSGLNQRRIRAKRSGSGVKQTLNFDLLKLAGDVESNPGPSRGHMTEYKPTVRLATRDDVPRAVRTLAAAFADYPATRHTVDPDRHIERVTELQELFLTRVGLDIGKVWVADDGAAVAVWTTPESVEAGAVFAEIGPRMAELSGSRLAAQQQMEGLLAPHRPKEPAWFLATVGVSPDHQGKGLGSAVVLPGVEAAERAGVPAFLETSAPRNLPFYERLGFTVTADVEVPEGPRTWCMTRKPGA

SEQ ID NO: 20843 - protein, 662 aa, Artificial Sequence
  Synthetic Polypeptide
MALPVTALLLPLALLLHAARPQIVLTQSPAIMSASPGEEVTLTCSATSSVSYIHWFQQRPGTSPKLWIYSTSNLASGVPVRFSGSGYGTSYSLTISRMEAEDAATYYCQQRSSSPFTFGSGTKLEIKGGGGSGGGGSGGGGSEVKVVESGGDLVKPGGSLKLSCVVSGFTFSRYGMSWVRQTPGKRLEWVATISGGGTYIYYPDSVKGRFTISRDNAKNTLYLQMSSLKSEDTAMYHCTRDNYGRNYDYGMDYWGQGTSVTVSSTRGSGGGGSGGGGSGFKIPIEELEDRVFVNCNTSITWVEGTVGTLLSDITRLDLGKRILDPRGIYRCNGTDIYKDKESTVQVHYRMCQSCVELDPATVAGIIVTDVIATLLLALGVFCFAGHETGRLSGAADTQALLRNDQVYQPLRDRDDAQYSHLGGNWARNKRAKRSGSGVKQTLNFDLLKLAGDVESNPGPSRGHMTEYKPTVRLATRDDVPRAVRTLAAAFADYPATRHTVDPDRHIERVTELQELFLTRVGLDIGKVWVADDGAAVAVWTTPESVEAGAVFAEIGPRMAELSGSRLAAQQQMEGLLAPHRPKEPAWFLATVGVSPDHQGKGLGSAVVLPGVEAAERAGVPAFLETSAPRNLPFYERLGFTVTADVEVPEGPRTWCMTRKPGA

SEQ ID NO: 20844 - protein, 672 aa, Artificial Sequence
  Synthetic Polypeptide
MALPVTALLLPLALLLHAARPQIVLTQSPAIMSASPGEEVTLTCSATSSVSYIHWFQQRPGTSPKLWIYSTSNLASGVPVRFSGSGYGTSYSLTISRMEAEDAATYYCQQRSSSPFTFGSGTKLEIKGGGGSGGGGSGGGGSEVKVVESGGDLVKPGGSLKLSCVVSGFTFSRYGMSWVRQTPGKRLEWVATISGGGTYIYYPDSVKGRFTISRDNAKNTLYLQMSSLKSEDTAMYHCTRDNYGRNYDYGMDYWGQGTSVTVSSTRGSGGGGSGGGGSGQSIKGNHLVKVYDYQEDGSVLLTCDAEAKNITWFKDGKMIGFLTEDKKKWNLGSNAKDPRGMYQCKGSQNKSKPLQVYYRMCQNCIELNAATISGFLFAEIVSIFVLAVGVYFIAGQDGVRQSRASDKQTLLPNDQLYQPLKDREDDQYSHLQGNQLRRNRAKRSGSGVKQTLNFDLLKLAGDVESNPGPSRGHMTEYKPTVRLATRDDVPRAVRTLAAAFADYPATRHTVDPDRHIERVTELQELFLTRVGLDIGKVWVADDGAAVAVWTTPESVEAGAVFAEIGPRMAELSGSRLAAQQQMEGLLAPHRPKEPAWFLATVGVSPDHQGKGLGSAVVLPGVEAAERAGVPAFLETSAPRNLPFYERLGFTVTADVEVPEGPRTWCMTRKPGA

SEQ ID NO: 20845 - protein, 655 aa, Artificial Sequence
  Synthetic Polypeptide
MALPVTALLLPLALLLHAARPQIVLTQSPAIMSASPGEEVTLTCSATSSVSYIHWFQQRPGTSPKLWIYSTSNLASGVPVRFSGSGYGTSYSLTISRMEAEDAATYYCQQRSSSPFTFGSGTKLEIKGGGGSGGGGSGGGGSEVKVVESGGDLVKPGGSLKLSCVVSGFTFSRYGMSWVRQTPGKRLEWVATISGGGTYIYYPDSVKGRFTISRDNAKNTLYLQMSSLKSEDTAMYHCTRDNYGRNYDYGMDYWGQGTSVTVSSTRGSGGGGSGGGGSGQSFGLLDPKLCYLLDGILFIYGVILTALFLRVKFSRSADAPAYQQGQNQLYNELNLGRREEYDVLDKRRGRDPEMGGKPQRRKNPQEGLYNELQKDKMAEAYSEIGMKGERRRGKGHDGLYQGLSTATKDTYDALHMQALPPRRAKRSGSGVKQTLNFDLLKLAGDVESNPGPSRGHMTEYKPTVRLATRDDVPRAVRTLAAAFADYPATRHTVDPDRHIERVTELQELFLTRVGLDIGKVWVADDGAAVAVWTTPESVEAGAVFAEIGPRMAELSGSRLAAQQQMEGLLAPHRPKEPAWFLATVGVSPDHQGKGLGSAVVLPGVEAAERAGVPAFLETSAPRNLPFYERLGFTVTADVEVPEGPRTWCMTRKPGA

SEQ ID NO: 20846 - protein, 756 aa, Artificial Sequence
  Synthetic Polypeptide
MALPVTALLLPLALLLHAARPEVQLVESGGGLVQPGGSLRLSCAASGFSFSDFWMSWVRQAPGKGLEWVATISQAGSEKDYVDSVKGRFTISRDNAKKSLYLQMNSLRAEDTAVYYCASGVYSFDYRGQGTLVTVSSGTGGGGSGGGGSGGGGSEFQIVLTQSPAIMSASPGEEVTLTCSATSSVSYIHWFQQRPGTSPKLWIYSTSNLASGVPVRFSGSGYGTSYSLTISRMEAEDAATYYCQQRSSSPFTFGSGTKLEIKLEDLKNVFPPEVAVFEPSEAEISHTQKATLVCLATGFYPDHVELSWWVNGKEVHSGVCTDPQPLKEQPALNDSRYCLSSRLRVSATFWQNPRNHFRCQVQFYGLSENDEWTQDRAKPVTQIVSAEAWGRADCGFTSESYQQGVLSATILYEILLGKATLYAVLVSALVLMAMVKRKDSRGRAKRSGSGATNFSLLKQAGDVEENPGPTSMDWIWRILFLVGAATGAHSFEEVKVVESGGDLVKPGGSLKLSCVVSGFTFSRYGMSWVRQTPGKRLEWVATISGGGTYIYYPDSVKGRFTISRDNAKNTLYLQMSSLKSEDTAMYHCTRDNYGRNYDYGMDYWGQGTSVTVSSTRIQNPDPAVYQLRDSKSSDKSVCLFTDFDSQTNVSQSKDSDVYITDKCVLDMRSMDFKSNSAVAWSNKSDFACANAFNNSIIPEDTFFPSPESSCDVKLVEKSFETDTNLNFQNLSVIGFRILLLKVAGFNLLMTLRLWSS

SEQ ID NO: 20847 - protein, 760 aa, Artificial Sequence
  Synthetic Polypeptide
MALPVTALLLPLALLLHAARPEVQLVESGGGLVQPGGSLRLSCAASGFSFSDFWMSWVRQAPGKGLEWVATISQAGSEKDYVDSVKGRFTISRDNAKKSLYLQMNSLRAEDTAVYYCASGVYSFDYRGQGTLVTVSSGTGGGGSGGGGSGGGGSEFQIVLTQSPAIMSASPGEEVTLTCSATSSVSYIHWFQQRPGTSPKLWIYSTSNLASGVPVRFSGSGYGTSYSLTISRMEAEDAATYYCQQRSSSPFTFGSGTKLEIKLEIQNPDPAVYQLRDSKSSDKSVCLFTDFDSQTNVSQSKDSDVYITDKCVLDMRSMDFKSNSAVAWSNKSDFACANAFNNSIIPEDTFFPSPESSCDVKLVEKSFETDTNLNFQNLSVIGFRILLLKVAGFNLLMTLRLWSSRAKRSGSGVKQTLNFDLLKLAGDVESNPGPTSMDWIWRILFLVGAATGAHSFEEVKVVESGGDLVKPGGSLKLSCVVSGFTFSRYGMSWVRQTPGKRLEWVATISGGGTYIYYPDSVKGRFTISRDNAKNTLYLQMSSLKSEDTAMYHCTRDNYGRNYDYGMDYWGQGTSVTVSSTREDLKNVFPPEVAVFEPSEAEISHTQKATLVCLATGFYPDHVELSWWVNGKEVHSGVCTDPQPLKEQPALNDSRYCLSSRLRVSATFWQNPRNHFRCQVQFYGLSENDEWTQDRAKPVTQIVSAEAWGRADCGFTSESYQQGVLSATILYEILLGKATLYAVLVSALVLMAMVKRKDSRG

SEQ ID NO: 20848 - protein, 952 aa, Artificial Sequence
  Synthetic Polypeptide
MALPVTALLLPLALLLHAARPEVQLVESGGGLVQPGGSLRLSCAASGFSFSDFWMSWVRQAPGKGLEWVATISQAGSEKDYVDSVKGRFTISRDNAKKSLYLQMNSLRAEDTAVYYCASGVYSFDYRGQGTLVTVSSGTGGGGSGGGGSGGGGSEFQIVLTQSPAIMSASPGEEVTLTCSATSSVSYIHWFQQRPGTSPKLWIYSTSNLASGVPVRFSGSGYGTSYSLTISRMEAEDAATYYCQQRSSSPFTFGSGTKLEIKLEDLKNVFPPEVAVFEPSEAEISHTQKATLVCLATGFYPDHVELSWWVNGKEVHSGVSTDPQPLKEQPALNDSRYCLSSRLRVSATFWQNPRNHFRCQVQFYGLSENDEWTQDRAKPVTQIVSAEAWGRADCGSQSFGLLDPKLCYLLDGILFIYGVILTALFLRVKFSRSADAPAYQQGQNQLYNELNLGRREEYDVLDKRRGRDPEMGGKPQRRKNPQEGLYNELQKDKMAEAYSEIGMKGERRRGKGHDGLYQGLSTATKDTYDALHMQALPPRRAKRSGSGATNFSLLKQAGDVEENPGPTSMDWIWRILFLVGAATGAHSFEEVKVVESGGDLVKPGGSLKLSCVVSGFTFSRYGMSWVRQTPGKRLEWVATISGGGTYIYYPDSVKGRFTISRDNAKNTLYLQMSSLKSEDTAMYHCTRDNYGRNYDYGMDYWGQGTSVTVSSTRIQNPDPAVYQLRDSKSSDKSVCLFTDFDSQTNVSQSKDSDVYITDKTVLDMRSMDFKSNSAVAWSNKSDFACANAFNNSIIPEDTFFPSPESSCGTQSFGLLDPKLCYLLDGILFIYGVILTALFLRVKFSRSADAPAYQQGQNQLYNELNLGRREEYDVLDKRRGRDPEMGGKPQRRKNPQEGLYNELQKDKMAEAYSEIGMKGERRRGKGHDGLYQGLSTATKDTYDALHMQALPPR

SEQ ID NO: 20849 - protein, 782 aa, Artificial Sequence
  Synthetic Polypeptide
MALPVTALLLPLALLLHAARPEVQLVESGGGLVQPGGSLRLSCAASGFSFSDFWMSWVRQAPGKGLEWVATISQAGSEKDYVDSVKGRFTISRDNAKKSLYLQMNSLRAEDTAVYYCASGVYSFDYRGQGTLVTVSSGTGGGGSGGGGSGGGGSEFQIVLTQSPAIMSASPGEEVTLTCSATSSVSYIHWFQQRPGTSPKLWIYSTSNLASGVPVRFSGSGYGTSYSLTISRMEAEDAATYYCQQRSSSPFTFGSGTKLEIKLEGQPKANPTVTLFPPSSEELQANKATLVCLISDFYPGAVTVAWKADGSPVKAGVETTKPSKQSNNKYAASSYLSLTPEQWKSHRSYSCQVTHEGSTVEKTVAPTECSPIKTDVITMDPKDNCSKDANDTLLLQLTNTSAYYMYLLLLLKSVVYFAIITCCLLRRTAFCCNGEKSRAKRSGSGATNFSLLKQAGDVEENPGPTSMDWIWRILFLVGAATGAHSFEEVKVVESGGDLVKPGGSLKLSCVVSGFTFSRYGMSWVRQTPGKRLEWVATISGGGTYIYYPDSVKGRFTISRDNAKNTLYLQMSSLKSEDTAMYHCTRDNYGRNYDYGMDYWGQGTSVTVSSTRASTKGPSVFPLAPSSKSTSGGTAALGCLVKDYFPEPVTVSWNSGALTSGVHTFPAVLQSSGLYSLSSVVTVPSSSLGTQTYICNVNHKPSNTKVDKRVEPKSCEVKTDSTDHVKPKETENTKQPSKSCHKPKAIVHTEKVNMMSLTVLGLRMLFAKTVAVNFLLTAKLFFL

SEQ ID NO: 20850 - protein, 763 aa, Artificial Sequence
  Synthetic Polypeptide
MALPVTALLLPLALLLHAARPEVQLVESGGGLVQPGGSLRLSCAASGFSFSDFWMSWVRQAPGKGLEWVATISQAGSEKDYVDSVKGRFTISRDNAKKSLYLQMNSLRAEDTAVYYCASGVYSFDYRGQGTLVTVSSGTGGGGSGGGGSGGGGSEFQIVLTQSPAIMSASPGEEVTLTCSATSSVSYIHWFQQRPGTSPKLWIYSTSNLASGVPVRFSGSGYGTSYSLTISRMEAEDAATYYCQQRSSSPFTFGSGTKLEIKLEGQPKANPTVTLFPPSSEELQANKATLVCLISDFYPGAVTVAWKADGSPVKAGVETTKPSKQSNNKYAASSYLSLTPEQWKSHRSYSCQVTHEGSTVEKTVAPTECSGRADCGFTSESYQQGVLSATILYEILLGKATLYAVLVSALVLMAMVKRKDSRGRAKRSGSGVKQTLNFDLLKLAGDVESNPGPTSMDWIWRILFLVGAATGAHSFEEVKVVESGGDLVKPGGSLKLSCVVSGFTFSRYGMSWVRQTPGKRLEWVATISGGGTYIYYPDSVKGRFTISRDNAKNTLYLQMSSLKSEDTAMYHCTRDNYGRNYDYGMDYWGQGTSVTVSSTRASTKGPSVFPLAPSSKSTSGGTAALGCLVKDYFPEPVTVSWNSGALTSGVHTFPAVLQSSGLYSLSSVVTVPSSSLGTQTYICNVNHKPSNTKVDKRVEPKSCIPEDTFFPSPESSCDVKLVEKSFETDTNLNFQNLSVIGFRILLLKVAGFNLLMTLRLWSS

SEQ ID NO: 20851 - protein, 897 aa, Artificial Sequence
  Synthetic Polypeptide
MALPVTALLLPLALLLHAARPEVQLVESGGGLVQPGGSLRLSCAASGFSFSDFWMSWVRQAPGKGLEWVATISQAGSEKDYVDSVKGRFTISRDNAKKSLYLQMNSLRAEDTAVYYCASGVYSFDYRGQGTLVTVSSGTGGGGSGGGGSGGGGSEFQIVLTQSPAIMSASPGEEVTLTCSATSSVSYIHWFQQRPGTSPKLWIYSTSNLASGVPVRFSGSGYGTSYSLTISRMEAEDAATYYCQQRSSSPFTFGSGTKLEIKLEIQNPDPAVYQLRDSKSSDKSVCLFTDFDSQTNVSQSKDSDVYITDKCVLDMRSMDFKSNSAVAWSNKSDFACANAFNNSIIPEDTFFPSPESSCDVKLVEKSFETDTNLNFQNLSVIGFRILLLKVAGFNLLMTLRLWSSRAKRSGSGVKQTLNFDLLKLAGDVESNPGPTSMDWIWRILFLVGAATGAHSGPQLQLQESGPGLVKPSETLSLTCTVSGDSISSGDYYWGWIRQPPGKGLEWIGHIYYSGVTYYNPSLKSRVTISVDTSRNQFSLKLSSVTAADTAVYYCTREDSSNWRSRGQGTLVTVSSGSGGGGSGGGGSGGGGSFEEVKVVESGGDLVKPGGSLKLSCVVSGFTFSRYGMSWVRQTPGKRLEWVATISGGGTYIYYPDSVKGRFTISRDNAKNTLYLQMSSLKSEDTAMYHCTRDNYGRNYDYGMDYWGQGTSVTVSSTREDLKNVFPPEVAVFEPSEAEISHTQKATLVCLATGFYPDHVELSWWVNGKEVHSGVCTDPQPLKEQPALNDSRYCLSSRLRVSATFWQNPRNHFRCQVQFYGLSENDEWTQDRAKPVTQIVSAEAWGRADCGFTSESYQQGVLSATILYEILLGKATLYAVLVSALVLMAMVKRKDSRG

SEQ ID NO: 20852 - protein, 1089 aa, Artificial Sequence
  Synthetic Polypeptide
MALPVTALLLPLALLLHAARPEVQLVESGGGLVQPGGSLRLSCAASGFSFSDFWMSWVRQAPGKGLEWVATISQAGSEKDYVDSVKGRFTISRDNAKKSLYLQMNSLRAEDTAVYYCASGVYSFDYRGQGTLVTVSSGTGGGGSGGGGSGGGGSEFQIVLTQSPAIMSASPGEEVTLTCSATSSVSYIHWFQQRPGTSPKLWIYSTSNLASGVPVRFSGSGYGTSYSLTISRMEAEDAATYYCQQRSSSPFTFGSGTKLEIKLEDLKNVFPPEVAVFEPSEAEISHTQKATLVCLATGFYPDHVELSWWVNGKEVHSGVSTDPQPLKEQPALNDSRYCLSSRLRVSATFWQNPRNHFRCQVQFYGLSENDEWTQDRAKPVTQIVSAEAWGRADCGSQSFGLLDPKLCYLLDGILFIYGVILTALFLRVKFSRSADAPAYQQGQNQLYNELNLGRREEYDVLDKRRGRDPEMGGKPQRRKNPQEGLYNELQKDKMAEAYSEIGMKGERRRGKGHDGLYQGLSTATKDTYDALHMQALPPRRAKRSGSGATNFSLLKQAGDVEENPGPTSMDWIWRILFLVGAATGAHSGPQLQLQESGPGLVKPSETLSLTCTVSGDSISSGDYYWGWIRQPPGKGLEWIGHIYYSGVTYYNPSLKSRVTISVDTSRNQFSLKLSSVTAADTAVYYCTREDSSNWRSRGQGTLVTVSSGSGGGGSGGGGSGGGGSFEEVKVVESGGDLVKPGGSLKLSCVVSGFTFSRYGMSWVRQTPGKRLEWVATISGGGTYIYYPDSVKGRFTISRDNAKNTLYLQMSSLKSEDTAMYHCTRDNYGRNYDYGMDYWGQGTSVTVSSTRIQNPDPAVYQLRDSKSSDKSVCLFTDFDSQTNVSQSKDSDVYITDKTVLDMRSMDFKSNSAVAWSNKSDFACANAFNNSIIPEDTFFPSPESSCGTQSFGLLDPKLCYLLDGILFIYGVILTALFLRVKFSRSADAPAYQQGQNQLYNELNLGRREEYDVLDKRRGRDPEMGGKPQRRKNPQEGLYNELQKDKMAEAYSEIGMKGERRRGKGHDGLYQGLSTATKDTYDALHMQALPPR

SEQ ID NO: 20853 - protein, 919 aa, Artificial Sequence
  Synthetic Polypeptide
MALPVTALLLPLALLLHAARPEVQLVESGGGLVQPGGSLRLSCAASGFSFSDFWMSWVRQAPGKGLEWVATISQAGSEKDYVDSVKGRFTISRDNAKKSLYLQMNSLRAEDTAVYYCASGVYSFDYRGQGTLVTVSSGTGGGGSGGGGSGGGGSEFQIVLTQSPAIMSASPGEEVTLTCSATSSVSYIHWFQQRPGTSPKLWIYSTSNLASGVPVRFSGSGYGTSYSLTISRMEAEDAATYYCQQRSSSPFTFGSGTKLEIKLEGQPKANPTVTLFPPSSEELQANKATLVCLISDFYPGAVTVAWKADGSPVKAGVETTKPSKQSNNKYAASSYLSLTPEQWKSHRSYSCQVTHEGSTVEKTVAPTECSPIKTDVITMDPKDNCSKDANDTLLLQLTNTSAYYMYLLLLLKSVVYFAIITCCLLRRTAFCCNGEKSRAKRSGSGATNFSLLKQAGDVEENPGPTSMDWIWRILFLVGAATGAHSGPQLQLQESGPGLVKPSETLSLTCTVSGDSISSGDYYWGWIRQPPGKGLEWIGHIYYSGVTYYNPSLKSRVTISVDTSRNQFSLKLSSVTAADTAVYYCTREDSSNWRSRGQGTLVTVSSGSGGGGSGGGGSGGGGSFEEVKVVESGGDLVKPGGSLKLSCVVSGFTFSRYGMSWVRQTPGKRLEWVATISGGGTYIYYPDSVKGRFTISRDNAKNTLYLQMSSLKSEDTAMYHCTRDNYGRNYDYGMDYWGQGTSVTVSSTRASTKGPSVFPLAPSSKSTSGGTAALGCLVKDYFPEPVTVSWNSGALTSGVHTFPAVLQSSGLYSLSSVVTVPSSSLGTQTYICNVNHKPSNTKVDKRVEPKSCEVKTDSTDHVKPKETENTKQPSKSCHKPKAIVHTEKVNMMSLTVLGLRMLFAKTVAVNFLLTAKLFFL

SEQ ID NO: 20854 - protein, 900 aa, Artificial Sequence
  Synthetic Polypeptide
MALPVTALLLPLALLLHAARPEVQLVESGGGLVQPGGSLRLSCAASGFSFSDFWMSWVRQAPGKGLEWVATISQAGSEKDYVDSVKGRFTISRDNAKKSLYLQMNSLRAEDTAVYYCASGVYSFDYRGQGTLVTVSSGTGGGGSGGGGSGGGGSEFQIVLTQSPAIMSASPGEEVTLTCSATSSVSYIHWFQQRPGTSPKLWIYSTSNLASGVPVRFSGSGYGTSYSLTISRMEAEDAATYYCQQRSSSPFTFGSGTKLEIKLEGQPKANPTVTLFPPSSEELQANKATLVCLISDFYPGAVTVAWKADGSPVKAGVETTKPSKQSNNKYAASSYLSLTPEQWKSHRSYSCQVTHEGSTVEKTVAPTECSGRADCGFTSESYQQGVLSATILYEILLGKATLYAVLVSALVLMAMVKRKDSRGRAKRSGSGVKQTLNFDLLKLAGDVESNPGPTSMDWIWRILFLVGAATGAHSGPQLQLQESGPGLVKPSETLSLTCTVSGDSISSGDYYWGWIRQPPGKGLEWIGHIYYSGVTYYNPSLKSRVTISVDTSRNQFSLKLSSVTAADTAVYYCTREDSSNWRSRGQGTLVTVSSGSGGGGSGGGGSGGGGSFEEVKVVESGGDLVKPGGSLKLSCVVSGFTFSRYGMSWVRQTPGKRLEWVATISGGGTYIYYPDSVKGRFTISRDNAKNTLYLQMSSLKSEDTAMYHCTRDNYGRNYDYGMDYWGQGTSVTVSSTRASTKGPSVFPLAPSSKSTSGGTAALGCLVKDYFPEPVTVSWNSGALTSGVHTFPAVLQSSGLYSLSSVVTVPSSSLGTQTYICNVNHKPSNTKVDKRVEPKSCIPEDTFFPSPESSCDVKLVEKSFETDTNLNFQNLSVIGFRILLLKVAGFNLLMTLRLWSS

SEQ ID NO: 20855 - protein, 757 aa, Artificial Sequence
  Synthetic Polypeptide
MALPVTALLLPLALLLHAARPEVQVLESGGGLVQPGGSLRLSCAASGFTFSNFAMSWVRQAPGKGLEWVSTISGSAGTTDYADSVKGRFTISRDNSKKTLYLQMNSLRVEDTAVYYCADGRGPFFDYRGQGTLVTVSSGTGGGGSGGGGSGGGGSEFQIVLTQSPAIMSASPGEEVTLTCSATSSVSYIHWFQQRPGTSPKLWIYSTSNLASGVPVRFSGSGYGTSYSLTISRMEAEDAATYYCQQRSSSPFTFGSGTKLEIKLEDLKNVFPPEVAVFEPSEAEISHTQKATLVCLATGFYPDHVELSWWVNGKEVHSGVCTDPQPLKEQPALNDSRYCLSSRLRVSATFWQNPRNHFRCQVQFYGLSENDEWTQDRAKPVTQIVSAEAWGRADCGFTSESYQQGVLSATILYEILLGKATLYAVLVSALVLMAMVKRKDSRGRAKRSGSGATNFSLLKQAGDVEENPGPTSMDWIWRILFLVGAATGAHSFEEVKVVESGGDLVKPGGSLKLSCVVSGFTFSRYGMSWVRQTPGKRLEWVATISGGGTYIYYPDSVKGRFTISRDNAKNTLYLQMSSLKSEDTAMYHCTRDNYGRNYDYGMDYWGQGTSVTVSSTRIQNPDPAVYQLRDSKSSDKSVCLFTDFDSQTNVSQSKDSDVYITDKCVLDMRSMDFKSNSAVAWSNKSDFACANAFNNSIIPEDTFFPSPESSCDVKLVEKSFETDTNLNFQNLSVIGFRILLLKVAGFNLLMTLRLWSS

SEQ ID NO: 20856 - protein, 758 aa, Artificial Sequence
  Synthetic Polypeptide
MALPVTALLLPLALLLHAARPQIVLTQSPAIMSASPGEEVTLTCSATSSVSYIHWFQQRPGTSPKLWIYSTSNLASGVPVRFSGSGYGTSYSLTISRMEAEDAATYYCQQRSSSPFTFGSGTKLEIKLEDLKNVFPPEVAVFEPSEAEISHTQKATLVCLATGFYPDHVELSWWVNGKEVHSGVCTDPQPLKEQPALNDSRYCLSSRLRVSATFWQNPRNHFRCQVQFYGLSENDEWTQDRAKPVTQIVSAEAWGRADCGFTSESYQQGVLSATILYEILLGKATLYAVLVSALVLMAMVKRKDSRGRAKRSGSGATNFSLLKQAGDVEENPGPTSMDWIWRILFLVGAATGAHSGPEVQLVESGGGLVQAGGSLRLSCAASGRTFSMGWFRQAPGKEREFVAAITYSGGSPYYADSVKGRFTISRDNAKNTVYLQMNSLKPEDTAVYYCAANPTYGSDWNAENWGQGTQVTVSSGSGGGGSGGGGSGGGGSFEEVKVVESGGDLVKPGGSLKLSCVVSGFTFSRYGMSWVRQTPGKRLEWVATISGGGTYIYYPDSVKGRFTISRDNAKNTLYLQMSSLKSEDTAMYHCTRDNYGRNYDYGMDYWGQGTSVTVSSTRIQNPDPAVYQLRDSKSSDKSVCLFTDFDSQTNVSQSKDSDVYITDKCVLDMRSMDFKSNSAVAWSNKSDFACANAFNNSIIPEDTFFPSPESSCDVKLVEKSFETDTNLNFQNLSVIGFRILLLKVAGFNLLMTLRLWSS

SEQ ID NO: 20857 - protein, 885 aa, Artificial Sequence
  Synthetic Polypeptide
MALPVTALLLPLALLLHAARPQIVLTQSPAIMSASPGEEVTLTCSATSSVSYIHWFQQRPGTSPKLWIYSTSNLASGVPVRFSGSGYGTSYSLTISRMEAEDAATYYCQQRSSSPFTFGSGTKLEIKLEDLKNVFPPEVAVFEPSEAEISHTQKATLVCLATGFYPDHVELSWWVNGKEVHSGVCTDPQPLKEQPALNDSRYCLSSRLRVSATFWQNPRNHFRCQVQFYGLSENDEWTQDRAKPVTQIVSAEAWGRADCGFTSESYQQGVLSATILYEILLGKATLYAVLVSALVLMAMVKRKDSRGRAKRSGSGATNFSLLKQAGDVEENPGPTSMDWIWRILFLVGAATGAHSQLQLQESGPGLVKPSETLSLTCTVSGGSISSGDYYWGWIRQPPGKGLEWIGSISYSGSTYYNPSLKSRVTISVDTSRNQFSLKLSSVTAADTAVYYCTREDSSNWRSRGQGTLVTVSSSGGGGSGGGGSEVQLVESGGGLVQAGGSLRLSCAASGRTFSMGWFRQAPGKEREFVAAITYSGGSPYYADSVKGRFTISRDNAKNTVYLQMNSLKPEDTAVYYCAANPTYGSDWNAENWGQGTQVTVSSGSGGGGSGGGGSGGGGSFEEVKVVESGGDLVKPGGSLKLSCVVSGFTFSRYGMSWVRQTPGKRLEWVATISGGGTYIYYPDSVKGRFTISRDNAKNTLYLQMSSLKSEDTAMYHCTRDNYGRNYDYGMDYWGQGTSVTVSSTRIQNPDPAVYQLRDSKSSDKSVCLFTDFDSQTNVSQSKDSDVYITDKCVLDMRSMDFKSNSAVAWSNKSDFACANAFNNSIIPEDTFFPSPESSCDVKLVEKSFETDTNLNFQNLSVIGFRILLLKVAGFNLLMTLRLWSS

SEQ ID NO: 20858 - protein, 894 aa, Artificial Sequence
  Synthetic Polypeptide
MALPVTALLLPLALLLHAARPEVQVLESGGGLVQPGGSLRLSCAASGFTFSNFAMSWVRQAPGKGLEWVSTISGSAGTTDYADSVKGRFTISRDNSKKTLYLQMNSLRVEDTAVYYCADGRGPFFDYRGQGTLVTVSSGTGGGGSGGGGSGGGGSEFQIVLTQSPAIMSASPGEEVTLTCSATSSVSYIHWFQQRPGTSPKLWIYSTSNLASGVPVRFSGSGYGTSYSLTISRMEAEDAATYYCQQRSSSPFTFGSGTKLEIKLEDLKNVFPPEVAVFEPSEAEISHTQKATLVCLATGFYPDHVELSWWVNGKEVHSGVCTDPQPLKEQPALNDSRYCLSSRLRVSATFWQNPRNHFRCQVQFYGLSENDEWTQDRAKPVTQIVSAEAWGRADCGFTSESYQQGVLSATILYEILLGKATLYAVLVSALVLMAMVKRKDSRGRAKRSGSGATNFSLLKQAGDVEENPGPTSMDWIWRILFLVGAATGAHSGPEVQLVESGGGLVQAGGSLRLSCAASGRTFSMGWFRQAPGKEREFVAAITYSGGSPYYASSVRGRFTISRDNAKNTVYLQMNSLKPEDTAVYYCAANPTYGSDWNAENWGQGTQVTVSSGSGGGGSGGGGSGGGGSFEEVKVVESGGDLVKPGGSLKLSCVVSGFTFSRYGMSWVRQTPGKRLEWVATISGGGTYIYYPDSVKGRFTISRDNAKNTLYLQMSSLKSEDTAMYHCTRDNYGRNYDYGMDYWGQGTSVTVSSTRIQNPDPAVYQLRDSKSSDKSVCLFTDFDSQTNVSQSKDSDVYITDKCVLDMRSMDFKSNSAVAWSNKSDFACANAFNNSIIPEDTFFPSPESSCDVKLVEKSFETDTNLNFQNLSVIGFRILLLKVAGFNLLMTLRLWSS

SEQ ID NO: 20859 - protein, 731 aa, Artificial Sequence
  Synthetic Polypeptide
MALPVTALLLPLALLLHAARPDIVLTQSPASLAVSPGQRATITCRASKSVSTSGYSYMHWYQQKPGQPPKLLIYLASNLESGVPARFSGSGSGTDFTLTINPVEANDTANYYCQHSRELPFTFGGGTKVEIKRTGGGGSGGGGSGGGGSEVQLVESGGGLVKPGGSLRLSCAASGFTFSGYAMSWVRQAPGKGLEWVSTISSGGTYIYYPDSVKGRFTISRDNAKNSLYLQMNSLRAEDTAVYYCARLGGDNYYEYFDVWGKGTTVTVSSTREQKLISEEDLAKPTTTPAPRPPTPAPTIASQPLSLRPEACRPAAGGAVHTRGLDFACDIYIWAPLAGTCGVLLLSLVITLYCKRGRKKLLYIFKQPFMRPVQTTQEEDGCSCRFPEEEEGGCELRVKFSRSADAPAYQQGQNQLYNELNLGRREEYDVLDKRRGRDPEMGGKPRRKNPQEGLYNELQKDKMAEAYSEIGMKGERRRGKGHDGLYQGLSTATKDTYDALHMQALPPRSSGSGEGRGSLLTCGDVEENPGPHMTEYKPTVRLATRDDVPRAVRTLAAAFADYPATRHTVDPDRHIERVTELQELFLTRVGLDIGKVWVADDGAAVAVWTTPESVEAGAVFAEIGPRMAELSGSRLAAQQQMEGLLAPHRPKEPAWFLATVGVSPDHQGKGLGSAVVLPGVEAAERAGVPAFLETSAPRNLPFYERLGFTVTADVEVPEGPRTWCMTRKPGA

SEQ ID NO: 20860 - protein, 725 aa, Artificial Sequence
  Synthetic Polypeptide
MALPVTALLLPLALLLHAARPDIVLTQSPASLAVSPGQRATITCRASKSVSTSGYSYMHWYQQKPGQPPKLLIYLASNLESGVPARFSGSGSGTDFTLTINPVEANDTANYYCQHSRELPFTFGGGTKVEIKRTGGGGSGGGGSGGGGSEVQLVESGGGLVKPGGSLRLSCAASGFTFSGYAMSWVRQAPGKGLEWVSTISSGGTYIYYPDSVKGRFTISRDNAKNSLYLQMNSLRAEDTAVYYCARLGGDNYYEYFDVWGKGTTVTVSSTREQKLISEEDLKIEVMYPPPYLDNEKSNGTIIHVKGKHLCPSPLFPGPSKPFWVLVVVGGVLACYSLLVTVAFIIFWVRSKRSRLLHSDYMNMTPRRPGPTRKHYQPYAPPRDFAAYRSRVKFSRSADAPAYQQGQNQLYNELNLGRREEYDVLDKRRGRDPEMGGKPRRKNPQEGLYNELQKDKMAEAYSEIGMKGERRRGKGHDGLYQGLSTATKDTYDALHMQALPPRSSGSGEGRGSLLTCGDVEENPGPHMTEYKPTVRLATRDDVPRAVRTLAAAFADYPATRHTVDPDRHIERVTELQELFLTRVGLDIGKVWVADDGAAVAVWTTPESVEAGAVFAEIGPRMAELSGSRLAAQQQMEGLLAPHRPKEPAWFLATVGVSPDHQGKGLGSAVVLPGVEAAERAGVPAFLETSAPRNLPFYERLGFTVTADVEVPEGPRTWCMTRKPGA

SEQ ID NO: 20861 - protein, 502 aa, Artificial Sequence
  Synthetic Polypeptide
MALPVTALLLPLALLLHAARPDIVLTQSPASLAVSPGQRATITCRASKSVSTSGYSYMHWYQQKPGQPPKLLIYLASNLESGVPARFSGSGSGTDFTLTINPVEANDTANYYCQHSRELPFTFGGGTKVEIKRTGGGGSGGGGSGGGGSEVQLVESGGGLVKPGGSLRLSCAASGFTFSGYAMSWVRQAPGKGLEWVSTISSGGTYIYYPDSVKGRFTISRDNAKNSLYLQMNSLRAEDTAVYYCARLGGDNYYEYFDVWGKGTTVTVSSTREQKLISEEDLKIEVMYPPPYLDNEKSNGTIIHVKGKHLCPSPLFPGPSKPFWVLVVVGGVLACYSLLVTVAFIIFWVRSKRSRLLHSDYMNMTPRRPGPTRKHYQPYAPPRDFAAYRSRVKFSRSADAPAYQQGQNQLYNELNLGRREEYDVLDKRRGRDPEMGGKPRRKNPQEGLYNELQKDKMAEAYSEIGMKGERRRGKGHDGLYQGLSTATKDTYDALHMQALPPR

SEQ ID NO: 20862 - protein, 508 aa, Artificial Sequence
  Synthetic Polypeptide
MALPVTALLLPLALLLHAARPDIVLTQSPASLAVSPGQRATITCRASKSVSTSGYSYMHWYQQKPGQPPKLLIYLASNLESGVPARFSGSGSGTDFTLTINPVEANDTANYYCQHSRELPFTFGGGTKVEIKRTGGGGSGGGGSGGGGSEVQLVESGGGLVKPGGSLRLSCAASGFTFSGYAMSWVRQAPGKGLEWVSTISSGGTYIYYPDSVKGRFTISRDNAKNSLYLQMNSLRAEDTAVYYCARLGGDNYYEYFDVWGKGTTVTVSSTREQKLISEEDLAKPTTTPAPRPPTPAPTIASQPLSLRPEACRPAAGGAVHTRGLDFACDIYIWAPLAGTCGVLLLSLVITLYCKRGRKKLLYIFKQPFMRPVQTTQEEDGCSCRFPEEEEGGCELRVKFSRSADAPAYQQGQNQLYNELNLGRREEYDVLDKRRGRDPEMGGKPRRKNPQEGLYNELQKDKMAEAYSEIGMKGERRRGKGHDGLYQGLSTATKDTYDALHMQALPPR

SEQ ID NO: 20863 - protein, 508 aa, Artificial Sequence
  Synthetic Polypeptide
MALPVTALLLPLALLLHAARPEVQLVESGGGLVKPGGSLRLSCAASGFTFSGYAMSWVRQAPGKGLEWVSTISSGGTYIYYPDSVKGRFTISRDNAKNSLYLQMNSLRAEDTAVYYCARLGGDNYYEYFDVWGKGTTVTVSSGGGGSGGGGSGGGGSDIVLTQSPASLAVSPGQRATITCRASKSVSTSGYSYMHWYQQKPGQPPKLLIYLASNLESGVPARFSGSGSGTDFTLTINPVEANDTANYYCQHSRELPFTFGGGTKVEIKRTTREQKLISEEDLAKPTTTPAPRPPTPAPTIASQPLSLRPEACRPAAGGAVHTRGLDFACDIYIWAPLAGTCGVLLLSLVITLYCKRGRKKLLYIFKQPFMRPVQTTQEEDGCSCRFPEEEEGGCELRVKFSRSADAPAYQQGQNQLYNELNLGRREEYDVLDKRRGRDPEMGGKPRRKNPQEGLYNELQKDKMAEAYSEIGMKGERRRGKGHDGLYQGLSTATKDTYDALHMQALPPR

SEQ ID NO: 20864 - protein, 921 aa, Artificial Sequence
  Synthetic Polypeptide
MALPVTALLLPLALLLHAARPDIVLTQSPASLAVSPGQRATITCRASKSVSTSGYSYMHWYQQKPGQPPKLLIYLASNLESGVPARFSGSGSGTDFTLTINPVEANDTANYYCQHSRELPFTFGGGTKVEIKRTGGGGSGGGGSGGGGSEVQLVESGGGLVKPGGSLRLSCAASGFTFSGYAMSWVRQAPGKGLEWVSTISSGGTYIYYPDSVKGRFTISRDNAKNSLYLQMNSLRAEDTAVYYCARLGGDNYYEYFDVWGKGTTVTVSSTREQKLISEEDLAKPTTTPAPRPPTPAPTIASQPLSLRPEACRPAAGGAVHTRGLDFACDIYIWAPLAGTCGVLLLSLVITLYCGRARVKFSRSADAPAYQQGQNQLYNELNLGRREEYDVLDKRRGRDPEMGGKPRRKNPQEGLYNELQKDKMAEAYSEIGMKGERRRGKGHDGLYQGLSTATKDTYDALHMQALPPRSRGSGATNFSLLKQAGDVEENPGPGIHMATYEVLCEVARKLGTDDREVVLFLLNVFIPQPTLAQLIGALRALKEEGRLTFPLLAECLFRAGRRDLLRDLLHLDPRFLERHLAGTMSYFSPYQLTVLHVDGELCARDIRSLIFLSKDTIGSRSTPQTFLHWVYCMENLDLLGPTDVDALMSMLRSLSRVDLQRQVQTLMGLHLSGPSHSQHYRHTPLETDFYDYKDDDDKTSGSGEGRGSLLTCGDVEENPGPHMTEYKPTVRLATRDDVPRAVRTLAAAFADYPATRHTVDPDRHIERVTELQELFLTRVGLDIGKVWVADDGAAVAVWTTPESVEAGAVFAEIGPRMAELSGSRLAAQQQMEGLLAPHRPKEPAWFLATVGVSPDHQGKGLGSAVVLPGVEAAERAGVPAFLETSAPRNLPFYERLGFTVTADVEVPEGPRTWCMTRKPGA

SEQ ID NO: 20865 - protein, 861 aa, Artificial Sequence
  Synthetic Polypeptide
MALPVTALLLPLALLLHAARPDIVLTQSPASLAVSPGQRATITCRASKSVSTSGYSYMHWYQQKPGQPPKLLIYLASNLESGVPARFSGSGSGTDFTLTINPVEANDTANYYCQHSRELPFTFGGGTKVEIKRTLEIQNPDPAVYQLRDSKSSDKSVCLFTDFDSQTNVSQSKDSDVYITDKCVLDMRSMDFKSNSAVAWSNKSDFACANAFNNSIIPEDTFFPSSDVPCDVKLVEKSFETDTNLNFQNLSVIGFRILLLKVAGFNLLMTLRLWSSRAKRSGSGVKQTLNFDLLKLAGDVESNPGPTSMDWIWRILFLVGAATGAHSFEEVQLVESGGGLVKPGGSLRLSCAASGFTFSGYAMSWVRQAPGKGLEWVSTISSGGTYIYYPDSVKGRFTISRDNAKNSLYLQMNSLRAEDTAVYYCARLGGDNYYEYFDVWGKGTTVTVSSTREDLKNVFPPEVAVFEPSKAEIAHTQKATLVCLATGFYPDHVELSWWVNGKEVHSGVCTDPQPLKEQPALNDSRYCLSSRLRVSATFWQNPRNHFRCQVQFYGLSENDEWTQDRAKPVTQIVSAEAWGRADCGITSASYHQGVLSATILYEILLGKATLYAVLVSALVLMAMVKRKDSRGRAKRSGSGATNFSLLKQAGDVEENPGPSRGHMTEYKPTVRLATRDDVPRAVRTLAAAFADYPATRHTVDPDRHIERVTELQELFLTRVGLDIGKVWVADDGAAVAVWTTPESVEAGAVFAEIGPRMAELSGSRLAAQQQMEGLLAPHRPKEPAWFLATVGVSPDHQGKGLGSAVVLPGVEAAERAGVPAFLETSAPRNLPFYERLGFTVTADVEVPEGPRTWCMTRKPGA

SEQ ID NO: 20866 - protein, 860 aa, Artificial Sequence
  Synthetic Polypeptide
MALPVTALLLPLALLLHAARPDIVLTQSPASLAVSPGQRATITCRASKSVSTSGYSYMHWYQQKPGQPPKLLIYLASNLESGVPARFSGSGSGTDFTLTINPVEANDTANYYCQHSRELPFTFGGGTKVEIKRTLEDLKNVFPPEVAVFEPSKAEIAHTQKATLVCLATGFYPDHVELSWWVNGKEVHSGVCTDPQPLKEQPALNDSRYCLSSRLRVSATFWQNPRNHFRCQVQFYGLSENDEWTQDRAKPVTQIVSAEAWGRADCGITSASYHQGVLSATILYEILLGKATLYAVLVSALVLMAMVKRKDSRGRAKRSGSGATNFSLLKQAGDVEENPGPTSMDWIWRILFLVGAATGAHSFEEVQLVESGGGLVKPGGSLRLSCAASGFTFSGYAMSWVRQAPGKGLEWVSTISSGGTYIYYPDSVKGRFTISRDNAKNSLYLQMNSLRAEDTAVYYCARLGGDNYYEYFDVWGKGTTVTVSSTRIQNPDPAVYQLRDSKSSDKSVCLFTDFDSQTNVSQSKDSDVYITDKCVLDMRSMDFKSNSAVAWSNKSDFACANAFNNSIIPEDTFFPSSDVPCDVKLVEKSFETDTNLNFQNLSVIGFRILLLKVAGFNLLMTLRLWSSRAKRSGSGVKQTLNFDLLKLAGDVESNPGPSRGHMTEYKPTVRLATRDDVPRAVRTLAAAFADYPATRHTVDPDRHIERVTELQELFLTRVGLDIGKVWVADDGAAVAVWTTPESVEAGAVFAEIGPRMAELSGSRLAAQQQMEGLLAPHRPKEPAWFLATVGVSPDHQGKGLGSAVVLPGVEAAERAGVPAFLETSAPRNLPFYERLGFTVTADVEVPEGPRTWCMTRKPGA

SEQ ID NO: 20867 - protein, 627 aa, Artificial Sequence
  Synthetic Polypeptide
MALPVTALLLPLALLLHAARPDIVLTQSPASLAVSPGQRATITCRASKSVSTSGYSYMHWYQQKPGQPPKLLIYLASNLESGVPARFSGSGSGTDFTLTINPVEANDTANYYCQHSRELPFTFGGGTKVEIKRTLEDLKNVFPPEVAVFEPSEAEISHTQKATLVCLATGFYPDHVELSWWVNGKEVHSGVCTDPQPLKEQPALNDSRYCLSSRLRVSATFWQNPRNHFRCQVQFYGLSENDEWTQDRAKPVTQIVSAEAWGRADCGFTSESYQQGVLSATILYEILLGKATLYAVLVSALVLMAMVKRKDSRGRAKRSGSGATNFSLLKQAGDVEENPGPTSMDWIWRILFLVGAATGAHSFEEVQLVESGGGLVKPGGSLRLSCAASGFTFSGYAMSWVRQAPGKGLEWVSTISSGGTYIYYPDSVKGRFTISRDNAKNSLYLQMNSLRAEDTAVYYCARLGGDNYYEYFDVWGKGTTVTVSSTRIQNPDPAVYQLRDSKSSDKSVCLFTDFDSQTNVSQSKDSDVYITDKCVLDMRSMDFKSNSAVAWSNKSDFACANAFNNSIIPEDTFFPSPESSCDVKLVEKSFETDTNLNFQNLSVIGFRILLLKVAGFNLLMTLRLWSS

SEQ ID NO: 20868 - protein, 852 aa, Artificial Sequence
  Synthetic Polypeptide
MALPVTALLLPLALLLHAARPDIVLTQSPASLAVSPGQRATITCRASKSVSTSGYSYMHWYQQKPGQPPKLLIYLASNLESGVPARFSGSGSGTDFTLTINPVEANDTANYYCQHSRELPFTFGGGTKVEIKRTLEDLKNVFPPEVAVFEPSEAEISHTQKATLVCLATGFYPDHVELSWWVNGKEVHSGVCTDPQPLKEQPALNDSRYCLSSRLRVSATFWQNPRNHFRCQVQFYGLSENDEWTQDRAKPVTQIVSAEAWGRADCGFTSESYQQGVLSATILYEILLGKATLYAVLVSALVLMAMVKRKDSRGRAKRSGSGATNFSLLKQAGDVEENPGPTSMDWIWRILFLVGAATGAHSFEEVQLVESGGGLVKPGGSLRLSCAASGFTFSGYAMSWVRQAPGKGLEWVSTISSGGTYIYYPDSVKGRFTISRDNAKNSLYLQMNSLRAEDTAVYYCARLGGDNYYEYFDVWGKGTTVTVSSTRIQNPDPAVYQLRDSKSSDKSVCLFTDFDSQTNVSQSKDSDVYITDKCVLDMRSMDFKSNSAVAWSNKSDFACANAFNNSIIPEDTFFPSPESSCDVKLVEKSFETDTNLNFQNLSVIGFRILLLKVAGFNLLMTLRLWSSRAKRSGSGVKQTLNFDLLKLAGDVESNPGPSRGGIHTMATYEVLCEVARKLGTDDREVVLFLLNVFIPQPTLAQLIGALRALKEEGRLTFPLLAECLFRAGRRDLLRDLLHLDPRFLERHLAGTMSYFSPYQLTVLHVDGELCARDIRSLIFLSKDTIGSRSTPQTFLHWVYCMENLDLLGPTDVDALMSMLRSLSRVDLQRQVQTLMGLHLSGPSHSQHYRHTP

SEQ ID NO: 20869 - protein, 631 aa, Artificial Sequence
  Synthetic Polypeptide
MALPVTALLLPLALLLHAARPDIVLTQSPASLAVSPGQRATITCRASKSVSTSGYSYMHWYQQKPGQPPKLLIYLASNLESGVPARFSGSGSGTDFTLTINPVEANDTANYYCQHSRELPFTFGGGTKVEIKRTLEIQNPDPAVYQLRDSKSSDKSVCLFTDFDSQTNVSQSKDSDVYITDKCVLDMRSMDFKSNSAVAWSNKSDFACANAFNNSIIPEDTFFPSPESSCDVKLVEKSFETDTNLNFQNLSVIGFRILLLKVAGFNLLMTLRLWSSRAKRSGSGVKQTLNFDLLKLAGDVESNPGPTSMDWIWRILFLVGAATGAHSFEEVQLVESGGGLVKPGGSLRLSCAASGFTFSGYAMSWVRQAPGKGLEWVSTISSGGTYIYYPDSVKGRFTISRDNAKNSLYLQMNSLRAEDTAVYYCARLGGDNYYEYFDVWGKGTTVTVSSTREDLKNVFPPEVAVFEPSEAEISHTQKATLVCLATGFYPDHVELSWWVNGKEVHSGVCTDPQPLKEQPALNDSRYCLSSRLRVSATFWQNPRNHFRCQVQFYGLSENDEWTQDRAKPVTQIVSAEAWGRADCGFTSESYQQGVLSATILYEILLGKATLYAVLVSALVLMAMVKRKDSRG

SEQ ID NO: 20870 - protein, 853 aa, Artificial Sequence
  Synthetic Polypeptide
MALPVTALLLPLALLLHAARPDIVLTQSPASLAVSPGQRATITCRASKSVSTSGYSYMHWYQQKPGQPPKLLIYLASNLESGVPARFSGSGSGTDFTLTINPVEANDTANYYCQHSRELPFTFGGGTKVEIKRTLEIQNPDPAVYQLRDSKSSDKSVCLFTDFDSQTNVSQSKDSDVYITDKCVLDMRSMDFKSNSAVAWSNKSDFACANAFNNSIIPEDTFFPSPESSCDVKLVEKSFETDTNLNFQNLSVIGFRILLLKVAGFNLLMTLRLWSSRAKRSGSGVKQTLNFDLLKLAGDVESNPGPTSMDWIWRILFLVGAATGAHSFEEVQLVESGGGLVKPGGSLRLSCAASGFTFSGYAMSWVRQAPGKGLEWVSTISSGGTYIYYPDSVKGRFTISRDNAKNSLYLQMNSLRAEDTAVYYCARLGGDNYYEYFDVWGKGTTVTVSSTREDLKNVFPPEVAVFEPSEAEISHTQKATLVCLATGFYPDHVELSWWVNGKEVHSGVCTDPQPLKEQPALNDSRYCLSSRLRVSATFWQNPRNHFRCQVQFYGLSENDEWTQDRAKPVTQIVSAEAWGRADCGFTSESYQQGVLSATILYEILLGKATLYAVLVSALVLMAMVKRKDSRGRAKRSGSGATNFSLLKQAGDVEENPGPSRGGIHTMATYEVLCEVARKLGTDDREVVLFLLNVFIPQPTLAQLIGALRALKEEGRLTFPLLAECLFRAGRRDLLRDLLHLDPRFLERHLAGTMSYFSPYQLTVLHVDGELCARDIRSLIFLSKDTIGSRSTPQTFLHWVYCMENLDLLGPTDVDALMSMLRSLSRVDLQRQVQTLMGLHLSGPSHSQHYRHTP

SEQ ID NO: 20871 - protein, 905 aa, Artificial Sequence
  Synthetic Polypeptide
MALPVTALLLPLALLLHAARPLEGKPIPNPLLGLDSTGSGEDLKNVFPPEVAVFEPSKAEIAHTQKATLVCLATGFYPDHVELSWWVNGKEVHSGVCTDPQPLKEQPALNDSRYCLSSRLRVSATFWQNPRNHFRCQVQFYGLSENDEWTQDRAKPVTQIVSAEAWGRADCGITSASYHQGVLSATILYEILLGKATLYAVLVSALVLMAMVKRKDSRGRAKRSGSGATNFSLLKQAGDVEENPGPTSMALPVTALLLPLALLLHAARPDIVLTQSPASLAVSPGQRATITCRASKSVSTSGYSYMHWYQQKPGQPPKLLIYLASNLESGVPARFSGSGSGTDFTLTINPVEANDTANYYCQHSRELPFTFGGGTKVEIKRTGGGGSGGGGSGGGGSEVQLVESGGGLVKPGGSLRLSCAASGFTFSGYAMSWVRQAPGKGLEWVSTISSGGTYIYYPDSVKGRFTISRDNAKNSLYLQMNSLRAEDTAVYYCARLGGDNYYEYFDVWGKGTTVTVSSTREQKLISEEDGSGIQNPDPAVYQLRDSKSSDKSVCLFTDFDSQTNVSQSKDSDVYITDKCVLDMRSMDFKSNSAVAWSNKSDFACANAFNNSIIPEDTFFPSSDVPCDVKLVEKSFETDTNLNFQNLSVIGFRILLLKVAGFNLLMTLRLWSSRAKRSGSGVKQTLNFDLLKLAGDVESNPGPSRGHMTEYKPTVRLATRDDVPRAVRTLAAAFADYPATRHTVDPDRHIERVTELQELFLTRVGLDIGKVWVADDGAAVAVWTTPESVEAGAVFAEIGPRMAELSGSRLAAQQQMEGLLAPHRPKEPAWFLATVGVSPDHQGKGLGSAVVLPGVEAAERAGVPAFLETSAPRNLPFYERLGFTVTADVEVPEGPRTWCMTRKPGA

SEQ ID NO: 20872 - protein, 906 aa, Artificial Sequence
  Synthetic Polypeptide
MALPVTALLLPLALLLHAARPLEQKLISEEDLGSGDRPDPAVYQLRDSKSSDKSVCLFTDFDSQTNVSQSKDSDVYITDKCVLDMRSMDFKSNSAVAWSNKSDFACANAFNNSIIPEDTFFPSPESSCDVKLVEKSFETDTNLNFQNLSVIGFRILLLKVAGFNLLMTLRLWSSSSRAKRSGSGVKQTLNFDLLKLAGDVESNPGPTSMALPVTALLLPLALLLHAARPDIVLTQSPASLAVSPGQRATITCRASKSVSTSGYSYMHWYQQKPGQPPKLLIYLASNLESGVPARFSGSGSGTDFTLTINPVEANDTANYYCQHSRELPFTFGGGTKVEIKRTGGGGSGGGGSGGGGSEVQLVESGGGLVKPGGSLRLSCAASGFTFSGYAMSWVRQAPGKGLEWVSTISSGGTYIYYPDSVKGRFTISRDNAKNSLYLQMNSLRAEDTAVYYCARLGGDNYYEYFDVWGKGTTVTVSSTRGKPIPNPLLGLDSTGSGEDLKNVFPPEVAVFEPSEAEISHTQKATLVCLATGFYPDHVELSWWVNGKEVHSGVCTDPQPLKEQPALNDSRYCLSSRLRVSATFWQNPRNHFRCQVQFYGLSENDEWTQDRAKPVTQIVSAEAWGRADCGFTSESYQQGVLSATILYEILLGKATLYAVLVSALVLMAMVKRKDSRGRAKRSGSGATNFSLLKQAGDVEENPGPSRGHMTEYKPTVRLATRDDVPRAVRTLAAAFADYPATRHTVDPDRHIERVTELQELFLTRVGLDIGKVWVADDGAAVAVWTTPESVEAGAVFAEIGPRMAELSGSRLAAQQQMEGLLAPHRPKEPAWFLATVGVSPDHQGKGLGSAVVLPGVEAAERAGVPAFLETSAPRNLPFYERLGFTVTADVEVPEGPRTWCMTRKPGA

SEQ ID NO: 20873 - protein, 860 aa, Artificial Sequence
  Synthetic Polypeptide
MALPVTALLLPLALLLHAARPDIVLTQSPASLAVSPGQRATITCRASKSVSTSGYSYMHWYQQKPGQPPKLLIYLASNLESGVPARFSGSGSGTDFTLTINPVEANDTANYYCQHSRELPFTFGGGTKVEIKRTLEDLKNVFPPEVAVFEPSEAEISHTQKATLVCLATGFYPDHVELSWWVNGKEVHSGVSTDPQPLKEQPALNDSRYCLSSRLRVSATFWQNPRNHFRCQVQFYGLSENDEWTQDRAKPVTQIVSAEAWGRADCGFTSESYQQGVLSATILYEILLGKATLYAVLVSALVLMAMVKRKDSRGRAKRSGSGATNFSLLKQAGDVEENPGPTSMDWIWRILFLVGAATGAHSFEEVQLVESGGGLVKPGGSLRLSCAASGFTFSGYAMSWVRQAPGKGLEWVSTISSGGTYIYYPDSVKGRFTISRDNAKNSLYLQMNSLRAEDTAVYYCARLGGDNYYEYFDVWGKGTTVTVSSTRIQNPDPAVYQLRDSKSSDKSVCLFTDFDSQTNVSQSKDSDVYITDKTVLDMRSMDFKSNSAVAWSNKSDFACANAFNNSIIPEDTFFPSPESSCDVKLVEKSFETDTNLNFQNLSVIGFRILLLKVAGFNLLMTLRLWSSRAKRSGSGVKQTLNFDLLKLAGDVESNPGPSRGHMTEYKPTVRLATRDDVPRAVRTLAAAFADYPATRHTVDPDRHIERVTELQELFLTRVGLDIGKVWVADDGAAVAVWTTPESVEAGAVFAEIGPRMAELSGSRLAAQQQMEGLLAPHRPKEPAWFLATVGVSPDHQGKGLGSAVVLPGVEAAERAGVPAFLETSAPRNLPFYERLGFTVTADVEVPEGPRTWCMTRKPGA

SEQ ID NO: 20874 - protein, 942 aa, Artificial Sequence
  Synthetic Polypeptide
MALPVTALLLPLALLLHAARPDIVLTQSPASLAVSPGQRATITCRASKSVSTSGYSYMHWYQQKPGQPPKLLIYLASNLESGVPARFSGSGSGTDFTLTINPVEANDTANYYCQHSRELPFTFGGGTKVEIKRTLEDLKNVFPPEVAVFEPSEAEISHTQKATLVCLATGFYPDHVELSWWVNGKEVHSGVSTDPQPLKEQPALNDSRYCLSSRLRVSATFWQNPRNHFRCQVQFYGLSENDEWTQDRAKPVTQIVSAEAWGRADCGFTSESYQQGVLSATILYEILLGKATLYAVLVSALVLMAMVKRKDSRGRAKRSGSGATNFSLLKQAGDVEENPGPTSMDWIWRILFLVGAATGAHSFEEVQLVESGGGLVKPGGSLRLSCAASGFTFSGYAMSWVRQAPGKGLEWVSTISSGGTYIYYPDSVKGRFTISRDNAKNSLYLQMNSLRAEDTAVYYCARLGGDNYYEYFDVWGKGTTVTVSSTREQKLISEEDGSGTPFPSLAPPIMLLVDGKQQMVVVCLVLDVAPPGLDSPIWFSAGNGSALDAFTYGPSPATDGTWTNLAHLSLPSEELASWEPLVCHTGPGAEGHSRSTQPMHLSGEASTARTCPQEPLRGTPGGALWLGVLRLLLFKLLLFDLLLTCSCLCDPAGPLPSPATTTRLRALGSHRLHPATETGGREATSSPRPQPRDRRWGDTPPGRKPGSPVRAKRSGSGVKQTLNFDLLKLAGDVESNPGPSRGHMTEYKPTVRLATRDDVPRAVRTLAAAFADYPATRHTVDPDRHIERVTELQELFLTRVGLDIGKVWVADDGAAVAVWTTPESVEAGAVFAEIGPRMAELSGSRLAAQQQMEGLLAPHRPKEPAWFLATVGVSPDHQGKGLGSAVVLPGVEAAERAGVPAFLETSAPRNLPFYERLGFTVTADVEVPEGPRTWCMTRKPGA

SEQ ID NO: 20875 - protein, 960 aa, Artificial Sequence
  Synthetic Polypeptide
MALPVTALLLPLALLLHAARPLEDLKNVFPPEVAVFEPSEAEISHTQKATLVCLATGFYPDHVELSWWVNGKEVHSGVSTDPQPLKEQPALNDSRYCLSSRLRVSATFWQNPRNHFRCQVQFYGLSENDEWTQDRAKPVTQIVSAEAWGRADCGFTSESYQQGVLSATILYEILLGKATLYAVLVSALVLMAMVKRKDSRGRAKRSGSGATNFSLLKQAGDVEENPGPTSMALPVTALLLPLALLLHAARPDIVLTQSPASLAVSPGQRATITCRASKSVSTSGYSYMHWYQQKPGQPPKLLIYLASNLESGVPARFSGSGSGTDFTLTINPVEANDTANYYCQHSRELPFTFGGGTKVEIKRTGGGGSGGGGSGGGGSEVQLVESGGGLVKPGGSLRLSCAASGFTFSGYAMSWVRQAPGKGLEWVSTISSGGTYIYYPDSVKGRFTISRDNAKNSLYLQMNSLRAEDTAVYYCARLGGDNYYEYFDVWGKGTTVTVSSTREQKLISEEDLGSGTPFPSLAPPIMLLVDGKQQMVVVCLVLDVAPPGLDSPIWFSAGNGSALDAFTYGPSPATDGTWTNLAHLSLPSEELASWEPLVCHTGPGAEGHSRSTQPMHLSGEASTARTCPQEPLRGTPGGALWLGVLRLLLFKLLLFDLLLTCSCLCDPAGPLPSPATTTRLRALGSHRLHPATETGGREATSSPRPQPRDRRWGDTPPGRKPGSPVRAKRSGSGVKQTLNFDLLKLAGDVESNPGPSRSRGHMTEYKPTVRLATRDDVPRAVRTLAAAFADYPATRHTVDPDRHIERVTELQELFLTRVGLDIGKVWVADDGAAVAVWTTPESVEAGAVFAEIGPRMAELSGSRLAAQQQMEGLLAPHRPKEPAWFLATVGVSPDHQGKGLGSAVVLPGVEAAERAGVPAFLETSAPRNLPFYERLGFTVTADVEVPEGPRTWCMTRKPGA

SEQ ID NO: 20876 - protein, 897 aa, Artificial Sequence
  Synthetic Polypeptide
MALPVTALLLPLALLLHAARPDIVLTQSPASLAVSPGQRATITCRASKSVSTSGYSYMHWYQQKPGQPPKLLIYLASNLESGVPARFSGSGSGTDFTLTINPVEANDTANYYCQHSRELPFTFGGGTKVEIKRTLEGKPIPNPLLGLDSTGSGDKQLDADVSPKPTIFLPSIAETKLQKAGTYLCLLEKFFPDVIKIHWQEKKSNTILGSQEGNTMKTNDTYMKFSWLTVPEKSLDKEHRCIVRHENNKNGVDQEIIFPPIKTDVITMDPKDNCSKDANDTLLLQLTNTSAYYMYLLLLLKSVVYFAIITCCLLRRTAFCCNGEKSRAKRSGSGATNFSLLKQAGDVEENPGPTSMDWIWRILFLVGAATGAHSFEEVQLVESGGGLVKPGGSLRLSCAASGFTFSGYAMSWVRQAPGKGLEWVSTISSGGTYIYYPDSVKGRFTISRDNAKNSLYLQMNSLRAEDTAVYYCARLGGDNYYEYFDVWGKGTTVTVSSTREQKLISEEDGSGSQPHTKPSVFVMKNGTNVACLVKEFYPKDIRINLVSSKKITEFDPAIVISPSGKYNAVKLGKYEDSNSVTCSVQHDNKTVHSTDFEVKTDSTDHVKPKETENTKQPSKSCHKPKAIVHTEKVNMMSLTVLGLRMLFAKTVAVNFLLTAKLFFLRAKRSGSGVKQTLNFDLLKLAGDVESNPGPSRGHMTEYKPTVRLATRDDVPRAVRTLAAAFADYPATRHTVDPDRHIERVTELQELFLTRVGLDIGKVWVADDGAAVAVWTTPESVEAGAVFAEIGPRMAELSGSRLAAQQQMEGLLAPHRPKEPAWFLATVGVSPDHQGKGLGSAVVLPGVEAAERAGVPAFLETSAPRNLPFYERLGFTVTADVEVPEGPRTWCMTRKPGA

SEQ ID NO: 20877 - protein, 635 aa, Artificial Sequence
  Synthetic Polypeptide
MALPVTALLLPLALLLHAARPDIVLTQSPASLAVSPGQRATITCRASKSVSTSGYSYMHWYQQKPGQPPKLLIYLASNLESGVPARFSGSGSGTDFTLTINPVEANDTANYYCQHSRELPFTFGGGTKVEIKRTLESQPHTKPSVFVMKNGTNVACLVKEFYPKDIRINLVSSKKITEFDPAIVISPSGKYNAVKLGKYEDSNSVTCSVQHDNKTVHSTDFEVKTDSTDHVKPKETENTKQPSKSCHKPKAIVHTEKVNMMSLTVLGLRMLFAKTVAVNFLLTAKLFFLRAKRSGSGATNFSLLKQAGDVEENPGPTSMDWIWRILFLVGAATGAHSFEEVQLVESGGGLVKPGGSLRLSCAASGFTFSGYAMSWVRQAPGKGLEWVSTISSGGTYIYYPDSVKGRFTISRDNAKNSLYLQMNSLRAEDTAVYYCARLGGDNYYEYFDVWGKGTTVTVSSTRDKQLDADVSPKPTIFLPSIAETKLQKAGTYLCLLEKFFPDVIKIHWQEKKSNTILGSQEGNTMKTNDTYMKFSWLTVPEKSLDKEHRCIVRHENNKNGVDQEIIFPPIKTDVITMDPKDNCSKDANDTLLLQLTNTSAYYMYLLLLLKSVVYFAIITCCLLRRTAFCCNGEKS

SEQ ID NO: 20878 - protein, 912 aa, Artificial Sequence
  Synthetic Polypeptide
MALPVTALLLPLALLLHAARPLEGKPIPNPLLGLDSTGSGDKQLDADVSPKPTIFLPSIAETKLQKAGTYLCLLEKFFPDVIKIHWQEKKSNTILGSQEGNTMKTNDTYMKFSWLTVPEKSLDKEHRCIVRHENNKNGVDQEIIFPPIKTDVITMDPKDNCSKDANDTLLLQLTNTSAYYMYLLLLLKSVVYFAIITCCLLRRTAFCCNGEKSRAKRSGSGATNFSLLKQAGDVEENPGPTSMALPVTALLLPLALLLHAARPDIVLTQSPASLAVSPGQRATITCRASKSVSTSGYSYMHWYQQKPGQPPKLLIYLASNLESGVPARFSGSGSGTDFTLTINPVEANDTANYYCQHSRELPFTFGGGTKVEIKRTGGGGSGGGGSGGGGSEVQLVESGGGLVKPGGSLRLSCAASGFTFSGYAMSWVRQAPGKGLEWVSTISSGGTYIYYPDSVKGRFTISRDNAKNSLYLQMNSLRAEDTAVYYCARLGGDNYYEYFDVWGKGTTVTVSSTREQKLISEEDGSGSQPHTKPSVFVMKNGTNVACLVKEFYPKDIRINLVSSKKITEFDPAIVISPSGKYNAVKLGKYEDSNSVTCSVQHDNKTVHSTDFEVKTDSTDHVKPKETENTKQPSKSCHKPKAIVHTEKVNMMSLTVLGLRMLFAKTVAVNFLLTAKLFFLRAKRSGSGVKQTLNFDLLKLAGDVESNPGPSRGHMTEYKPTVRLATRDDVPRAVRTLAAAFADYPATRHTVDPDRHIERVTELQELFLTRVGLDIGKVWVADDGAAVAVWTTPESVEAGAVFAEIGPRMAELSGSRLAAQQQMEGLLAPHRPKEPAWFLATVGVSPDHQGKGLGSAVVLPGVEAAERAGVPAFLETSAPRNLPFYERLGFTVTADVEVPEGPRTWCMTRKPGA

SEQ ID NO: 20879 - protein, 1037 aa, Artificial Sequence
  Synthetic Polypeptide
MALPVTALLLPLALLLHAARPDIVLTQSPASLAVSPGQRATITCRASKSVSTSGYSYMHWYQQKPGQPPKLLIYLASNLESGVPARFSGSGSGTDFTLTINPVEANDTANYYCQHSRELPFTFGGGTKVEIKRTGQPKANPTVTLFPPSSEELQANKATLVCLISDFYPGAVTVAWKADGSPVKAGVETTKPSKQSNNKYAASSYLSLTPEQWKSHRSYSCQVTHEGSTVEKTVAPTECSGSQSFGLLDPKLCYLLDGILFIYGVILTALFLRVKFSRSADAPAYQQGQNQLYNELNLGRREEYDVLDKRRGRDPEMGGKPQRRKNPQEGLYNELQKDKMAEAYSEIGMKGERRRGKGHDGLYQGLSTATKDTYDALHMQALPPRRAKRSGSGATNFSLLKQAGDVEENPGPTSMDWIWRILFLVGAATGAHSFEEVQLVESGGGLVKPGGSLRLSCAASGFTFSGYAMSWVRQAPGKGLEWVSTISSGGTYIYYPDSVKGRFTISRDNAKNSLYLQMNSLRAEDTAVYYCARLGGDNYYEYFDVWGKGTTVTVSSASTKGPSVFPLAPSSKSTSGGTAALGCLVKDYFPEPVTVSWNSGALTSGVHTFPAVLQSSGLYSLSSVVTVPSSSLGTQTYICNVNHKPSNTKVDKRVEPKSCGTQSFGLLDPKLCYLLDGILFIYGVILTALFLRVKFSRSADAPAYQQGQNQLYNELNLGRREEYDVLDKRRGRDPEMGGKPQRRKNPQEGLYNELQKDKMAEAYSEIGMKGERRRGKGHDGLYQGLSTATKDTYDALHMQALPPRRAKRSGSGVKQTLNFDLLKLAGDVESNPGPSRGHMTEYKPTVRLATRDDVPRAVRTLAAAFADYPATRHTVDPDRHIERVTELQELFLTRVGLDIGKVWVADDGAAVAVWTTPESVEAGAVFAEIGPRMAELSGSRLAAQQQMEGLLAPHRPKEPAWFLATVGVSPDHQGKGLGSAVVLPGVEAAERAGVPAFLETSAPRNLPFYERLGFTVTADVEVPEGPRTWCMTRKPGA

SEQ ID NO: 20880 - protein, 823 aa, Artificial Sequence
  Synthetic Polypeptide
MALPVTALLLPLALLLHAARPDIVLTQSPASLAVSPGQRATITCRASKSVSTSGYSYMHWYQQKPGQPPKLLIYLASNLESGVPARFSGSGSGTDFTLTINPVEANDTANYYCQHSRELPFTFGGGTKVEIKRTLEDLKNVFPPEVAVFEPSEAEISHTQKATLVCLATGFYPDHVELSWWVNGKEVHSGVSTDPQPLKEQPALNDSRYCLSSRLRVSATFWQNPRNHFRCQVQFYGLSENDEWTQDRAKPVTQIVSAEAWGRADCGSQSFGLLDPKLCYLLDGILFIYGVILTALFLRVKFSRSADAPAYQQGQNQLYNELNLGRREEYDVLDKRRGRDPEMGGKPQRRKNPQEGLYNELQKDKMAEAYSEIGMKGERRRGKGHDGLYQGLSTATKDTYDALHMQALPPRRAKRSGSGATNFSLLKQAGDVEENPGPTSMDWIWRILFLVGAATGAHSFEEVQLVESGGGLVKPGGSLRLSCAASGFTFSGYAMSWVRQAPGKGLEWVSTISSGGTYIYYPDSVKGRFTISRDNAKNSLYLQMNSLRAEDTAVYYCARLGGDNYYEYFDVWGKGTTVTVSSTRIQNPDPAVYQLRDSKSSDKSVCLFTDFDSQTNVSQSKDSDVYITDKTVLDMRSMDFKSNSAVAWSNKSDFACANAFNNSIIPEDTFFPSPESSCGTQSFGLLDPKLCYLLDGILFIYGVILTALFLRVKFSRSADAPAYQQGQNQLYNELNLGRREEYDVLDKRRGRDPEMGGKPQRRKNPQEGLYNELQKDKMAEAYSEIGMKGERRRGKGHDGLYQGLSTATKDTYDALHMQALPPR

SEQ ID NO: 20881 - protein, 823 aa, Artificial Sequence
  Synthetic Polypeptide
MALPVTALLLPLALLLHAARPDIVLTQSPASLAVSPGQRATITCRASKSVSTSGYSYMHWYQQKPGQPPKLLIYLASNLESGVPARFSGSGSGTDFTLTINPVEANDTANYYCQHSRELPFTFGGGTKVEIKRTLEDLKNVFPPEVAVFEPSKAEIAHTQKATLVCLATGFYPDHVELSWWVNGKEVHSGVCTDPQPLKEQPALNDSRYCLSSRLRVSATFWQNPRNHFRCQVQFYGLSENDEWTQDRAKPVTQIVSAEAWGRADCGSQSFGLLDPKLCYLLDGILFIYGVILTALFLRVKFSRSADAPAYQQGQNQLYNELNLGRREEYDVLDKRRGRDPEMGGKPQRRKNPQEGLYNELQKDKMAEAYSEIGMKGERRRGKGHDGLYQGLSTATKDTYDALHMQALPPRRAKRSGSGATNFSLLKQAGDVEENPGPTSMDWIWRILFLVGAATGAHSFEEVQLVESGGGLVKPGGSLRLSCAASGFTFSGYAMSWVRQAPGKGLEWVSTISSGGTYIYYPDSVKGRFTISRDNAKNSLYLQMNSLRAEDTAVYYCARLGGDNYYEYFDVWGKGTTVTVSSTRIQNPDPAVYQLRDSKSSDKSVCLFTDFDSQTNVSQSKDSDVYITDKCVLDMRSMDFKSNSAVAWSNKSDFACANAFNNSIIPEDTFFPSSDVPCGTQSFGLLDPKLCYLLDGILFIYGVILTALFLRVKFSRSADAPAYQQGQNQLYNELNLGRREEYDVLDKRRGRDPEMGGKPQRRKNPQEGLYNELQKDKMAEAYSEIGMKGERRRGKGHDGLYQGLSTATKDTYDALHMQALPPR

SEQ ID NO: 20882 - protein, 894 aa, Artificial Sequence
  Synthetic Polypeptide
MALPVTALLLPLALLLHAARPDIVLTQSPASLAVSPGQRATITCRASKSVSTSGYSYMHWYQQKPGQPPKLLIYLASNLESGVPARFSGSGSGTDFTLTINPVEANDTANYYCQHSRELPFTFGGGTKVEIKRTLEGKPIPNPLLGLDSTGSGEDLKNVFPPEVAVFEPSEAEISHTQKATLVCLATGFYPDHVELSWWVNGKEVHSGVSTDPQPLKEQPALNDSRYCLSSRLRVSATFWQNPRNHFRCQVQFYGLSENDEWTQDRAKPVTQIVSAEAWGRADCGSQSFGLLDPKLCYLLDGILFIYGVILTALFLRVKFSRSADAPAYQQGQNQLYNELNLGRREEYDVLDKRRGRDPEMGGKPQRRKNPQEGLYNELQKDKMAEAYSEIGMKGERRRGKGHDGLYQGLSTATKDTYDALHMQALPPRRAKRSGSGATNFSLLKQAGDVEENPGPTSMDWIWRILFLVGAATGAHSFEEVQLVESGGGLVKPGGSLRLSCAASGFTFSGYAMSWVRQAPGKGLEWVSTISSGGTYIYYPDSVKGRFTISRDNAKNSLYLQMNSLRAEDTAVYYCARLGGDNYYEYFDVWGKGTTVTVSSTREQKLISEEDGSGIQNPDPAVYQLRDSKSSDKSVCLFTDFDSQTNVSQSKDSDVYITDKTVLDMRSMDFKSNSAVAWSNKSDFACANAFNNSIIPEDTFFPSPESSCGTQSFGLLDPKLCYLLDGILFIYGVILTALFLRSKRSRLLHSDYMNMTPRRPGPTRKHYQPYAPPRDFAAYRSRVKFSRSADAPAYQQGQNQLYNELNLGRREEYDVLDKRRGRDPEMGGKPQRRKNPQEGLYNELQKDKMAEAYSEIGMKGERRRGKGHDGLYQGLSTATKDTYDALHMQALPPR

SEQ ID NO: 20883 - protein, 935 aa, Artificial Sequence
  Synthetic Polypeptide
MALPVTALLLPLALLLHAARPDIVLTQSPASLAVSPGQRATITCRASKSVSTSGYSYMHWYQQKPGQPPKLLIYLASNLESGVPARFSGSGSGTDFTLTINPVEANDTANYYCQHSRELPFTFGGGTKVEIKRTLEGKPIPNPLLGLDSTGSGEDLKNVFPPEVAVFEPSEAEISHTQKATLVCLATGFYPDHVELSWWVNGKEVHSGVSTDPQPLKEQPALNDSRYCLSSRLRVSATFWQNPRNHFRCQVQFYGLSENDEWTQDRAKPVTQIVSAEAWGRADCGSQSFGLLDPKLCYLLDGILFIYGVILTALFLRSKRSRLLHSDYMNMTPRRPGPTRKHYQPYAPPRDFAAYRSRVKFSRSADAPAYQQGQNQLYNELNLGRREEYDVLDKRRGRDPEMGGKPQRRKNPQEGLYNELQKDKMAEAYSEIGMKGERRRGKGHDGLYQGLSTATKDTYDALHMQALPPRRAKRSGSGATNFSLLKQAGDVEENPGPTSMDWIWRILFLVGAATGAHSFEEVQLVESGGGLVKPGGSLRLSCAASGFTFSGYAMSWVRQAPGKGLEWVSTISSGGTYIYYPDSVKGRFTISRDNAKNSLYLQMNSLRAEDTAVYYCARLGGDNYYEYFDVWGKGTTVTVSSTREQKLISEEDGSGIQNPDPAVYQLRDSKSSDKSVCLFTDFDSQTNVSQSKDSDVYITDKTVLDMRSMDFKSNSAVAWSNKSDFACANAFNNSIIPEDTFFPSPESSCGTQSFGLLDPKLCYLLDGILFIYGVILTALFLRSKRSRLLHSDYMNMTPRRPGPTRKHYQPYAPPRDFAAYRSRVKFSRSADAPAYQQGQNQLYNELNLGRREEYDVLDKRRGRDPEMGGKPQRRKNPQEGLYNELQKDKMAEAYSEIGMKGERRRGKGHDGLYQGLSTATKDTYDALHMQALPPR

SEQ ID NO: 20884 - protein, 896 aa, Artificial Sequence
  Synthetic Polypeptide
MALPVTALLLPLALLLHAARPDIVLTQSPASLAVSPGQRATITCRASKSVSTSGYSYMHWYQQKPGQPPKLLIYLASNLESGVPARFSGSGSGTDFTLTINPVEANDTANYYCQHSRELPFTFGGGTKVEIKRTLEGKPIPNPLLGLDSTGSGEDLKNVFPPEVAVFEPSEAEISHTQKATLVCLATGFYPDHVELSWWVNGKEVHSGVSTDPQPLKEQPALNDSRYCLSSRLRVSATFWQNPRNHFRCQVQFYGLSENDEWTQDRAKPVTQIVSAEAWGRADCGSQSFGLLDPKLCYLLDGILFIYGVILTALFLRVKFSRSADAPAYQQGQNQLYNELNLGRREEYDVLDKRRGRDPEMGGKPQRRKNPQEGLYNELQKDKMAEAYSEIGMKGERRRGKGHDGLYQGLSTATKDTYDALHMQALPPRRAKRSGSGATNFSLLKQAGDVEENPGPTSMDWIWRILFLVGAATGAHSFEEVQLVESGGGLVKPGGSLRLSCAASGFTFSGYAMSWVRQAPGKGLEWVSTISSGGTYIYYPDSVKGRFTISRDNAKNSLYLQMNSLRAEDTAVYYCARLGGDNYYEYFDVWGKGTTVTVSSTREQKLISEEDLGSGIQNPDPAVYQLRDSKSSDKSVCLFTDFDSQTNVSQSKDSDVYITDKTVLDMRSMDFKSNSAVAWSNKSDFACANAFNNSIIPEDTFFPSPESSCGTQSFGLLDPKLCYLLDGILFIYGVILTALFLKRGRKKLLYIFKQPFMRPVQTTQEEDGCSCRFPEEEEGGCELRVKFSRSADAPAYQQGQNQLYNELNLGRREEYDVLDKRRGRDPEMGGKPQRRKNPQEGLYNELQKDKMAEAYSEIGMKGERRRGKGHDGLYQGLSTATKDTYDALHMQALPPR

SEQ ID NO: 20885 - protein, 938 aa, Artificial Sequence
  Synthetic Polypeptide
MALPVTALLLPLALLLHAARPDIVLTQSPASLAVSPGQRATITCRASKSVSTSGYSYMHWYQQKPGQPPKLLIYLASNLESGVPARFSGSGSGTDFTLTINPVEANDTANYYCQHSRELPFTFGGGTKVEIKRTLEGKPIPNPLLGLDSTGSGEDLKNVFPPEVAVFEPSEAEISHTQKATLVCLATGFYPDHVELSWWVNGKEVHSGVSTDPQPLKEQPALNDSRYCLSSRLRVSATFWQNPRNHFRCQVQFYGLSENDEWTQDRAKPVTQIVSAEAWGRADCGSQSFGLLDPKLCYLLDGILFIYGVILTALFLKRGRKKLLYIFKQPFMRPVQTTQEEDGCSCRFPEEEEGGCELRVKFSRSADAPAYQQGQNQLYNELNLGRREEYDVLDKRRGRDPEMGGKPQRRKNPQEGLYNELQKDKMAEAYSEIGMKGERRRGKGHDGLYQGLSTATKDTYDALHMQALPPRRAKRSGSGATNFSLLKQAGDVEENPGPTSMDWIWRILFLVGAATGAHSFEEVQLVESGGGLVKPGGSLRLSCAASGFTFSGYAMSWVRQAPGKGLEWVSTISSGGTYIYYPDSVKGRFTISRDNAKNSLYLQMNSLRAEDTAVYYCARLGGDNYYEYFDVWGKGTTVTVSSTREQKLISEEDLGSGIQNPDPAVYQLRDSKSSDKSVCLFTDFDSQTNVSQSKDSDVYITDKTVLDMRSMDFKSNSAVAWSNKSDFACANAFNNSIIPEDTFFPSPESSCGTQSFGLLDPKLCYLLDGILFIYGVILTALFLKRGRKKLLYIFKQPFMRPVQTTQEEDGCSCRFPEEEEGGCELRVKFSRSADAPAYQQGQNQLYNELNLGRREEYDVLDKRRGRDPEMGGKPQRRKNPQEGLYNELQKDKMAEAYSEIGMKGERRRGKGHDGLYQGLSTATKDTYDALHMQALPPR

SEQ ID NO: 20886 - protein, 828 aa, Artificial Sequence
  Synthetic Polypeptide
MALPVTALLLPLALLLHAARPDIVLTQSPASLAVSPGQRATITCRASKSVSTSGYSYMHWYQQKPGQPPKLLIYLASNLESGVPARFSGSGSGTDFTLTINPVEANDTANYYCQHSRELPFTFGGGTKVEIKRTLEQSFGLLDPKLCYLLDGILFIYGVILTALFLRVKFSRSADAPAYQQGQNQLYNELNLGRREEYDVLDKRRGRDPEMGGKPQRRKNPQEGLYNELQKDKMAEAYSEIGMKGERRRGKGHDGLYQGLSTATKDTYDALHMQALPPRRAKRSGSGATNFSLLKQAGDVEENPGPTSMDWIWRILFLVGAATGAHSFEEVQLVESGGGLVKPGGSLRLSCAASGFTFSGYAMSWVRQAPGKGLEWVSTISSGGTYIYYPDSVKGRFTISRDNAKNSLYLQMNSLRAEDTAVYYCARLGGDNYYEYFDVWGKGTTVTVSSTRQSFGLLDPKLCYLLDGILFIYGVILTALFLRVKFSRSADAPAYQQGQNQLYNELNLGRREEYDVLDKRRGRDPEMGGKPQRRKNPQEGLYNELQKDKMAEAYSEIGMKGERRRGKGHDGLYQGLSTATKDTYDALHMQALPPRRAKRSGSGVKQTLNFDLLKLAGDVESNPGPSRGHMTEYKPTVRLATRDDVPRAVRTLAAAFADYPATRHTVDPDRHIERVTELQELFLTRVGLDIGKVWVADDGAAVAVWTTPESVEAGAVFAEIGPRMAELSGSRLAAQQQMEGLLAPHRPKEPAWFLATVGVSPDHQGKGLGSAVVLPGVEAAERAGVPAFLETSAPRNLPFYERLGFTVTADVEVPEGPRTWCMTRKPGA

SEQ ID NO: 20887 - protein, 653 aa, Artificial Sequence
  Synthetic Polypeptide
MALPVTALLLPLALLLHAARPDIVLTQSPASLAVSPGQRATITCRASKSVSTSGYSYMHWYQQKPGQPPKLLIYLASNLESGVPARFSGSGSGTDFTLTINPVEANDTANYYCQHSRELPFTFGGGTKVEIKRTLEGQPKANPTVTLFPPSSEELQANKATLVCLISDFYPGAVTVAWKADGSPVKAGVETTKPSKQSNNKYAASSYLSLTPEQWKSHRSYSCQVTHEGSTVEKTVAPTECSPIKTDVITMDPKDNCSKDANDTLLLQLTNTSAYYMYLLLLLKSVVYFAIITCCLLRRTAFCCNGEKSRAKRSGSGATNFSLLKQAGDVEENPGPTSMDWIWRILFLVGAATGAHSFEEVQLVESGGGLVKPGGSLRLSCAASGFTFSGYAMSWVRQAPGKGLEWVSTISSGGTYIYYPDSVKGRFTISRDNAKNSLYLQMNSLRAEDTAVYYCARLGGDNYYEYFDVWGKGTTVTVSSTRASTKGPSVFPLAPSSKSTSGGTAALGCLVKDYFPEPVTVSWNSGALTSGVHTFPAVLQSSGLYSLSSVVTVPSSSLGTQTYICNVNHKPSNTKVDKRVEPKSCEVKTDSTDHVKPKETENTKQPSKSCHKPKAIVHTEKVNMMSLTVLGLRMLFAKTVAVNFLLTAKLFFL

SEQ ID NO: 20888 - protein, 631 aa, Artificial Sequence
  Synthetic Polypeptide
MALPVTALLLPLALLLHAARPDIVLTQSPASLAVSPGQRATITCRASKSVSTSGYSYMHWYQQKPGQPPKLLIYLASNLESGVPARFSGSGSGTDFTLTINPVEANDTANYYCQHSRELPFTFGGGTKVEIKRTLEGQPKANPTVTLFPPSSEELQANKATLVCLISDFYPGAVTVAWKADGSPVKAGVETTKPSKQSNNKYAASSYLSLTPEQWKSHRSYSCQVTHEGSTVEKTVAPTECSGRADCGITSASYHQGVLSATILYEILLGKATLYAVLVSALVLMAMVKRKDSRGRAKRSGSGATNFSLLKQAGDVEENPGPTSMDWIWRILFLVGAATGAHSFEEVQLVESGGGLVKPGGSLRLSCAASGFTFSGYAMSWVRQAPGKGLEWVSTISSGGTYIYYPDSVKGRFTISRDNAKNSLYLQMNSLRAEDTAVYYCARLGGDNYYEYFDVWGKGTTVTVSSTRASTKGPSVFPLAPSSKSTSGGTAALGCLVKDYFPEPVTVSWNSGALTSGVHTFPAVLQSSGLYSLSSVVTVPSSSLGTQTYICNVNHKPSNTKVDKRVEPKSCIPEDTFFPSSDVPCDVKLVEKSFETDTNLNFQNLSVIGFRILLLKVAGFNLLMTLRLWSS

SEQ ID NO: 20889 - protein, 631 aa, Artificial Sequence
  Synthetic Polypeptide
MALPVTALLLPLALLLHAARPDIVLTQSPASLAVSPGQRATITCRASKSVSTSGYSYMHWYQQKPGQPPKLLIYLASNLESGVPARFSGSGSGTDFTLTINPVEANDTANYYCQHSRELPFTFGGGTKVEIKRTLEGQPKANPTVTLFPPSSEELQANKATLVCLISDFYPGAVTVAWKADGSPVKAGVETTKPSKQSNNKYAASSYLSLTPEQWKSHRSYSCQVTHEGSTVEKTVAPTECSGRADCGFTSESYQQGVLSATILYEILLGKATLYAVLVSALVLMAMVKRKDSRGRAKRSGSGATNFSLLKQAGDVEENPGPTSMDWIWRILFLVGAATGAHSFEEVQLVESGGGLVKPGGSLRLSCAASGFTFSGYAMSWVRQAPGKGLEWVSTISSGGTYIYYPDSVKGRFTISRDNAKNSLYLQMNSLRAEDTAVYYCARLGGDNYYEYFDVWGKGTTVTVSSTRASTKGPSVFPLAPSSKSTSGGTAALGCLVKDYFPEPVTVSWNSGALTSGVHTFPAVLQSSGLYSLSSVVTVPSSSLGTQTYICNVNHKPSNTKVDKRVEPKSCIPEDTFFPSPESSCDVKLVEKSFETDTNLNFQNLSVIGFRILLLKVAGFNLLMTLRLWSS

SEQ ID NO: 20890 - protein, 457 aa, Artificial Sequence
  Synthetic Polypeptide
MALPVTALLLPLALLLHAARPDIVLTQSPASLAVSPGQRATITCRASKSVSTSGYSYMHWYQQKPGQPPKLLIYLASNLESGVPARFSGSGSGTDFTLTINPVEANDTANYYCQHSRELPFTFGGGTKVEIKRTGGGGSGGGGSGGGGSEVQLVESGGGLVKPGGSLRLSCAASGFTFSGYAMSWVRQAPGKGLEWVSTISSGGTYIYYPDSVKGRFTISRDNAKNSLYLQMNSLRAEDTAVYYCARLGGDNYYEYFDVWGKGTTVTVSSTRDGNEEMGGITQTPYKVSISGTTVILTCPQYPGSEILWQHNDKNIGGDEDDKNIGSDEDHLSLKEFSELEQSGYYVCYPRGSKPEDANFYLYLRARVCENCMEMDVMSVATIVIVDICITGGLLLLVYYWSKNRKAKAKPVTRGAGAGGRQRGQNKERPPPVPNPDYEPIRKGQRDLYSGLNQRRI

SEQ ID NO: 20891 - protein, 422 aa, Artificial Sequence
  Synthetic Polypeptide
MALPVTALLLPLALLLHAARPDIVLTQSPASLAVSPGQRATITCRASKSVSTSGYSYMHWYQQKPGQPPKLLIYLASNLESGVPARFSGSGSGTDFTLTINPVEANDTANYYCQHSRELPFTFGGGTKVEIKRTGGGGSGGGGSGGGGSEVQLVESGGGLVKPGGSLRLSCAASGFTFSGYAMSWVRQAPGKGLEWVSTISSGGTYIYYPDSVKGRFTISRDNAKNSLYLQMNSLRAEDTAVYYCARLGGDNYYEYFDVWGKGTTVTVSSTRFKIPIEELEDRVFVNCNTSITWVEGTVGTLLSDITRLDLGKRILDPRGIYRCNGTDIYKDKESTVQVHYRMCQSCVELDPATVAGIIVTDVIATLLLALGVFCFAGHETGRLSGAADTQALLRNDQVYQPLRDRDDAQYSHLGGNWARNK

SEQ ID NO: 20892 - protein, 432 aa, Artificial Sequence
  Synthetic Polypeptide
MALPVTALLLPLALLLHAARPDIVLTQSPASLAVSPGQRATITCRASKSVSTSGYSYMHWYQQKPGQPPKLLIYLASNLESGVPARFSGSGSGTDFTLTINPVEANDTANYYCQHSRELPFTFGGGTKVEIKRTGGGGSGGGGSGGGGSEVQLVESGGGLVKPGGSLRLSCAASGFTFSGYAMSWVRQAPGKGLEWVSTISSGGTYIYYPDSVKGRFTISRDNAKNSLYLQMNSLRAEDTAVYYCARLGGDNYYEYFDVWGKGTTVTVSSTRQSIKGNHLVKVYDYQEDGSVLLTCDAEAKNITWFKDGKMIGFLTEDKKKWNLGSNAKDPRGMYQCKGSQNKSKPLQVYYRMCQNCIELNAATISGFLFAEIVSIFVLAVGVYFIAGQDGVRQSRASDKQTLLPNDQLYQPLKDREDDQYSHLQGNQLRRN

SEQ ID NO: 20893 - protein, 415 aa, Artificial Sequence
  Synthetic Polypeptide
MALPVTALLLPLALLLHAARPDIVLTQSPASLAVSPGQRATITCRASKSVSTSGYSYMHWYQQKPGQPPKLLIYLASNLESGVPARFSGSGSGTDFTLTINPVEANDTANYYCQHSRELPFTFGGGTKVEIKRTGGGGSGGGGSGGGGSEVQLVESGGGLVKPGGSLRLSCAASGFTFSGYAMSWVRQAPGKGLEWVSTISSGGTYIYYPDSVKGRFTISRDNAKNSLYLQMNSLRAEDTAVYYCARLGGDNYYEYFDVWGKGTTVTVSSTRQSFGLLDPKLCYLLDGILFIYGVILTALFLRVKFSRSADAPAYQQGQNQLYNELNLGRREEYDVLDKRRGRDPEMGGKPQRRKNPQEGLYNELQKDKMAEAYSEIGMKGERRRGKGHDGLYQGLSTATKDTYDALHMQALPPR

SEQ ID NO: 20894 - protein, 457 aa, Artificial Sequence
  Synthetic Polypeptide
MALPVTALLLPLALLLHAARPEVQLVESGGGLVKPGGSLRLSCAASGFTFSGYAMSWVRQAPGKGLEWVSTISSGGTYIYYPDSVKGRFTISRDNAKNSLYLQMNSLRAEDTAVYYCARLGGDNYYEYFDVWGKGTTVTVSSGGGGSGGGGSGGGGSDIVLTQSPASLAVSPGQRATITCRASKSVSTSGYSYMHWYQQKPGQPPKLLIYLASNLESGVPARFSGSGSGTDFTLTINPVEANDTANYYCQHSRELPFTFGGGTKVEIKRTTRDGNEEMGGITQTPYKVSISGTTVILTCPQYPGSEILWQHNDKNIGGDEDDKNIGSDEDHLSLKEFSELEQSGYYVCYPRGSKPEDANFYLYLRARVCENCMEMDVMSVATIVIVDICITGGLLLLVYYWSKNRKAKAKPVTRGAGAGGRQRGQNKERPPPVPNPDYEPIRKGQRDLYSGLNQRRI

SEQ ID NO: 20895 - protein, 422 aa, Artificial Sequence
  Synthetic Polypeptide
MALPVTALLLPLALLLHAARPEVQLVESGGGLVKPGGSLRLSCAASGFTFSGYAMSWVRQAPGKGLEWVSTISSGGTYIYYPDSVKGRFTISRDNAKNSLYLQMNSLRAEDTAVYYCARLGGDNYYEYFDVWGKGTTVTVSSGGGGSGGGGSGGGGSDIVLTQSPASLAVSPGQRATITCRASKSVSTSGYSYMHWYQQKPGQPPKLLIYLASNLESGVPARFSGSGSGTDFTLTINPVEANDTANYYCQHSRELPFTFGGGTKVEIKRTTRFKIPIEELEDRVFVNCNTSITWVEGTVGTLLSDITRLDLGKRILDPRGIYRCNGTDIYKDKESTVQVHYRMCQSCVELDPATVAGIIVTDVIATLLLALGVFCFAGHETGRLSGAADTQALLRNDQVYQPLRDRDDAQYSHLGGNWARNK

SEQ ID NO: 20896 - protein, 432 aa, Artificial Sequence
  Synthetic Polypeptide
MALPVTALLLPLALLLHAARPEVQLVESGGGLVKPGGSLRLSCAASGFTFSGYAMSWVRQAPGKGLEWVSTISSGGTYIYYPDSVKGRFTISRDNAKNSLYLQMNSLRAEDTAVYYCARLGGDNYYEYFDVWGKGTTVTVSSGGGGSGGGGSGGGGSDIVLTQSPASLAVSPGQRATITCRASKSVSTSGYSYMHWYQQKPGQPPKLLIYLASNLESGVPARFSGSGSGTDFTLTINPVEANDTANYYCQHSRELPFTFGGGTKVEIKRTTRQSIKGNHLVKVYDYQEDGSVLLTCDAEAKNITWFKDGKMIGFLTEDKKKWNLGSNAKDPRGMYQCKGSQNKSKPLQVYYRMCQNCIELNAATISGFLFAEIVSIFVLAVGVYFIAGQDGVRQSRASDKQTLLPNDQLYQPLKDREDDQYSHLQGNQLRRN

SEQ ID NO: 20897 - protein, 415 aa, Artificial Sequence
  Synthetic Polypeptide
MALPVTALLLPLALLLHAARPEVQLVESGGGLVKPGGSLRLSCAASGFTFSGYAMSWVRQAPGKGLEWVSTISSGGTYIYYPDSVKGRFTISRDNAKNSLYLQMNSLRAEDTAVYYCARLGGDNYYEYFDVWGKGTTVTVSSGGGGSGGGGSGGGGSDIVLTQSPASLAVSPGQRATITCRASKSVSTSGYSYMHWYQQKPGQPPKLLIYLASNLESGVPARFSGSGSGTDFTLTINPVEANDTANYYCQHSRELPFTFGGGTKVEIKRTTRQSFGLLDPKLCYLLDGILFIYGVILTALFLRVKFSRSADAPAYQQGQNQLYNELNLGRREEYDVLDKRRGRDPEMGGKPQRRKNPQEGLYNELQKDKMAEAYSEIGMKGERRRGKGHDGLYQGLSTATKDTYDALHMQALPPR

SEQ ID NO: 20898 - protein, 648 aa, Artificial Sequence
  Synthetic Polypeptide
MALPVTALLLPLALLLHAARPDIVLTQSPASLAVSPGQRATITCRASKSVSTSGYSYMHWYQQKPGQPPKLLIYLASNLESGVPARFSGSGSGTDFTLTINPVEANDTANYYCQHSRELPFTFGGGTKVEIKRTGGGGSGGGGSGGGGSEVQLVESGGGLVKPGGSLRLSCAASGFTFSGYAMSWVRQAPGKGLEWVSTISSGGTYIYYPDSVKGRFTISRDNAKNSLYLQMNSLRAEDTAVYYCARLGGDNYYEYFDVWGKGTTVTVSSTRGSGIQNPDPAVYQLRDSKSSDKSVCLFTDFDSQTNVSQSKDSDVYITDKTVLDMRSMDFKSNSAVAWSNKSDFACANAFNNSIIPEDTFFPSPESSCDVKLVEKSFETDTNLNFQNLSVIGFRILLLKVAGFNLLMTLRLWSSRAKRSGSGVKQTLNFDLLKLAGDVESNPGPSRGHMTEYKPTVRLATRDDVPRAVRTLAAAFADYPATRHTVDPDRHIERVTELQELFLTRVGLDIGKVWVADDGAAVAVWTTPESVEAGAVFAEIGPRMAELSGSRLAAQQQMEGLLAPHRPKEPAWFLATVGVSPDHQGKGLGSAVVLPGVEAAERAGVPAFLETSAPRNLPFYERLGFTVTADVEVPEGPRTWCMTRKPGA

SEQ ID NO: 20899 - protein, 680 aa, Artificial Sequence
  Synthetic Polypeptide
MALPVTALLLPLALLLHAARPDIVLTQSPASLAVSPGQRATITCRASKSVSTSGYSYMHWYQQKPGQPPKLLIYLASNLESGVPARFSGSGSGTDFTLTINPVEANDTANYYCQHSRELPFTFGGGTKVEIKRTGGGGSGGGGSGGGGSEVQLVESGGGLVKPGGSLRLSCAASGFTFSGYAMSWVRQAPGKGLEWVSTISSGGTYIYYPDSVKGRFTISRDNAKNSLYLQMNSLRAEDTAVYYCARLGGDNYYEYFDVWGKGTTVTVSSLEDLKNVFPPEVAVFEPSEAEISHTQKATLVCLATGFYPDHVELSWWVNGKEVHSGVSTDPQPLKEQPALNDSRYCLSSRLRVSATFWQNPRNHFRCQVQFYGLSENDEWTQDRAKPVTQIVSAEAWGRADCGFTSESYQQGVLSATILYEILLGKATLYAVLVSALVLMAMVKRKDSRGRAKRSGSGATNFSLLKQAGDVEENPGPTRGHMTEYKPTVRLATRDDVPRAVRTLAAAFADYPATRHTVDPDRHIERVTELQELFLTRVGLDIGKVWVADDGAAVAVWTTPESVEAGAVFAEIGPRMAELSGSRLAAQQQMEGLLAPHRPKEPAWFLATVGVSPDHQGKGLGSAVVLPGVEAAERAGVPAFLETSAPRNLPFYERLGFTVTADVEVPEGPRTWCMTRKPGA

SEQ ID NO: 20900 - protein, 730 aa, Artificial Sequence
  Synthetic Polypeptide
MALPVTALLLPLALLLHAARPDIVLTQSPASLAVSPGQRATITCRASKSVSTSGYSYMHWYQQKPGQPPKLLIYLASNLESGVPARFSGSGSGTDFTLTINPVEANDTANYYCQHSRELPFTFGGGTKVEIKRTGGGGSGGGGSGGGGSEVQLVESGGGLVKPGGSLRLSCAASGFTFSGYAMSWVRQAPGKGLEWVSTISSGGTYIYYPDSVKGRFTISRDNAKNSLYLQMNSLRAEDTAVYYCARLGGDNYYEYFDVWGKGTTVTVSSTREQKLISEEDLGSGTPFPSLAPPIMLLVDGKQQMVVVCLVLDVAPPGLDSPIWFSAGNGSALDAFTYGPSPATDGTWTNLAHLSLPSEELASWEPLVCHTGPGAEGHSRSTQPMHLSGEASTARTCPQEPLRGTPGGALWLGVLRLLLFKLLLFDLLLTCSCLCDPAGPLPSPATTTRLRALGSHRLHPATETGGREATSSPRPQPRDRRWGDTPPGRKPGSPVRAKRSGSGVKQTLNFDLLKLAGDVESNPGPSRSRGHMTEYKPTVRLATRDDVPRAVRTLAAAFADYPATRHTVDPDRHIERVTELQELFLTRVGLDIGKVWVADDGAAVAVWTTPESVEAGAVFAEIGPRMAELSGSRLAAQQQMEGLLAPHRPKEPAWFLATVGVSPDHQGKGLGSAVVLPGVEAAERAGVPAFLETSAPRNLPFYERLGFTVTADVEVPEGPRTWCMTRKPGA

SEQ ID NO: 20901 - protein, 544 aa, Artificial Sequence
  Synthetic Polypeptide
MALPVTALLLPLALLLHAARPDIVLTQSPASLAVSPGQRATITCRASKSVSTSGYSYMHWYQQKPGQPPKLLIYLASNLESGVPARFSGSGSGTDFTLTINPVEANDTANYYCQHSRELPFTFGGGTKVEIKRTLEDLKNVFPPEVAVFEPSEAEISHTQKATLVCLATGFYPDHVELSWWVNGKEVHSGVSTDPQPLKEQPALNDSRYCLSSRLRVSATFWQNPRNHFRCQVQFYGLSENDEWTQDRAKPVTQIVSAEAWGRADCGFTSESYQQGVLSATILYEILLGKATLYAVLVSALVLMAMVKRKDSRGRAKRSGSGATNFSLLKQAGDVEENPGPTRGHMTEYKPTVRLATRDDVPRAVRTLAAAFADYPATRHTVDPDRHIERVTELQELFLTRVGLDIGKVWVADDGAAVAVWTTPESVEAGAVFAEIGPRMAELSGSRLAAQQQMEGLLAPHRPKEPAWFLATVGVSPDHQGKGLGSAVVLPGVEAAERAGVPAFLETSAPRNLPFYERLGFTVTADVEVPEGPRTWCMTRKPGA

SEQ ID NO: 20902 - protein, 314 aa, Artificial Sequence
  Synthetic Polypeptide
MALPVTALLLPLALLLHAARPDIVLTQSPASLAVSPGQRATITCRASKSVSTSGYSYMHWYQQKPGQPPKLLIYLASNLESGVPARFSGSGSGTDFTLTINPVEANDTANYYCQHSRELPFTFGGGTKVEIKRTLEDLKNVFPPEVAVFEPSEAEISHTQKATLVCLATGFYPDHVELSWWVNGKEVHSGVSTDPQPLKEQPALNDSRYCLSSRLRVSATFWQNPRNHFRCQVQFYGLSENDEWTQDRAKPVTQIVSAEAWGRADCGFTSESYQQGVLSATILYEILLGKATLYAVLVSALVLMAMVKRKDSRG

SEQ ID NO: 20903 - protein, 450 aa, Artificial Sequence
  Synthetic Polypeptide
MDWIWRILFLVGAATGAHSFEEVQLVESGGGLVKPGGSLRLSCAASGFTFSGYAMSWVRQAPGKGLEWVSTISSGGTYIYYPDSVKGRFTISRDNAKNSLYLQMNSLRAEDTAVYYCARLGGDNYYEYFDVWGKGTTVTVSSTRIQNPDPAVYQLRDSKSSDKSVCLFTDFDSQTNVSQSKDSDVYITDKTVLDMRSMDFKSNSAVAWSNKSDFACANAFNNSIIPEDTFFPSPESSCDVKLVEKSFETDTNLNFQNLSVIGFRILLLKVAGFNLLMTLRLWSSRAKRSGSGVKQTLNFDLLKLAGDVESNPGPSRGHMAKPLSQEESTLIERATATINSIPISEDYSVASAALSSDGRIFTGVNVYHFTGGPCAELVVLGTAAAAAAGNLTCIVAIGNENRGILSPCGRCRQVLLDLHPGIKAIVKDSDGQPTAVGIRELLPSGYVWEG

SEQ ID NO: 20904 - protein, 284 aa, Artificial Sequence
  Synthetic Polypeptide
MDWIWRILFLVGAATGAHSFEEVQLVESGGGLVKPGGSLRLSCAASGFTFSGYAMSWVRQAPGKGLEWVSTISSGGTYIYYPDSVKGRFTISRDNAKNSLYLQMNSLRAEDTAVYYCARLGGDNYYEYFDVWGKGTTVTVSSTRIQNPDPAVYQLRDSKSSDKSVCLFTDFDSQTNVSQSKDSDVYITDKTVLDMRSMDFKSNSAVAWSNKSDFACANAFNNSIIPEDTFFPSPESSCDVKLVEKSFETDTNLNFQNLSVIGFRILLLKVAGFNLLMTLRLWSS

SEQ ID NO: 20905 - protein, 562 aa, Artificial Sequence
  Synthetic Polypeptide
MALPVTALLLPLALLLHAARPDIVLTQSPASLAVSPGQRATITCRASKSVSTSGYSYMHWYQQKPGQPPKLLIYLASNLESGVPARFSGSGSGTDFTLTINPVEANDTANYYCQHSRELPFTFGGGTKVEIKRTLEGKPIPNPLLGLDSTGSGEDLKNVFPPEVAVFEPSEAEISHTQKATLVCLATGFYPDHVELSWWVNGKEVHSGVCTDPQPLKEQPALNDSRYCLSSRLRVSATFWQNPRNHFRCQVQFYGLSENDEWTQDRAKPVTQIVSAEAWGRADCGFTSESYQQGVLSATILYEILLGKATLYAVLVSALVLMAMVKRKDSRGRAKRSGSGATNFSLLKQAGDVEENPGPTRGHMTEYKPTVRLATRDDVPRAVRTLAAAFADYPATRHTVDPDRHIERVTELQELFLTRVGLDIGKVWVADDGAAVAVWTTPESVEAGAVFAEIGPRMAELSGSRLAAQQQMEGLLAPHRPKEPAWFLATVGVSPDHQGKGLGSAVVLPGVEAAERAGVPAFLETSAPRNLPFYERLGFTVTADVEVPEGPRTWCMTRKPGA

SEQ ID NO: 20906 - protein, 332 aa, Artificial Sequence
  Synthetic Polypeptide
MALPVTALLLPLALLLHAARPDIVLTQSPASLAVSPGQRATITCRASKSVSTSGYSYMHWYQQKPGQPPKLLIYLASNLESGVPARFSGSGSGTDFTLTINPVEANDTANYYCQHSRELPFTFGGGTKVEIKRTLEGKPIPNPLLGLDSTGSGEDLKNVFPPEVAVFEPSEAEISHTQKATLVCLATGFYPDHVELSWWVNGKEVHSGVCTDPQPLKEQPALNDSRYCLSSRLRVSATFWQNPRNHFRCQVQFYGLSENDEWTQDRAKPVTQIVSAEAWGRADCGFTSESYQQGVLSATILYEILLGKATLYAVLVSALVLMAMVKRKDSRG

SEQ ID NO: 20907 - protein, 462 aa, Artificial Sequence
  Synthetic Polypeptide
MDWIWRILFLVGAATGAHSFEEVQLVESGGGLVKPGGSLRLSCAASGFTFSGYAMSWVRQAPGKGLEWVSTISSGGTYIYYPDSVKGRFTISRDNAKNSLYLQMNSLRAEDTAVYYCARLGGDNYYEYFDVWGKGTTVTVSSTREQKLISEEDGSGIQNPDPAVYQLRDSKSSDKSVCLFTDFDSQTNVSQSKDSDVYITDKCVLDMRSMDFKSNSAVAWSNKSDFACANAFNNSIIPEDTFFPSPESSCDVKLVEKSFETDTNLNFQNLSVIGFRILLLKVAGFNLLMTLRLWSSRAKRSGSGVKQTLNFDLLKLAGDVESNPGPSRGHMAKPLSQEESTLIERATATINSIPISEDYSVASAALSSDGRIFTGVNVYHFTGGPCAELVVLGTAAAAAAGNLTCIVAIGNENRGILSPCGRCRQVLLDLHPGIKAIVKDSDGQPTAVGIRELLPSGYVWEG

SEQ ID NO: 20908 - protein, 296 aa, Artificial Sequence
  Synthetic Polypeptide
MDWIWRILFLVGAATGAHSFEEVQLVESGGGLVKPGGSLRLSCAASGFTFSGYAMSWVRQAPGKGLEWVSTISSGGTYIYYPDSVKGRFTISRDNAKNSLYLQMNSLRAEDTAVYYCARLGGDNYYEYFDVWGKGTTVTVSSTREQKLISEEDGSGIQNPDPAVYQLRDSKSSDKSVCLFTDFDSQTNVSQSKDSDVYITDKCVLDMRSMDFKSNSAVAWSNKSDFACANAFNNSIIPEDTFFPSPESSCDVKLVEKSFETDTNLNFQNLSVIGFRILLLKVAGFNLLMTLRLWSS

SEQ ID NO: 20909 - protein, 648 aa, Artificial Sequence
  Synthetic Polypeptide
MALPVTALLLPLALLLHAARPDIVLTQSPASLAVSPGQRATITCRASKSVSTSGYSYMHWYQQKPGQPPKLLIYLASNLESGVPARFSGSGSGTDFTLTINPVEANDTANYYCQHSRELPFTFGGGTKVEIKRTGGGGSGGGGSGGGGSEVQLVESGGGLVKPGGSLRLSCAASGFTFSGYAMSWVRQAPGKGLEWVSTISSGGTYIYYPDSVKGRFTISRDNAKNSLYLQMNSLRAEDTAVYYCARLGGDNYYEYFDVWGKGTTVTVSSTRGSGIQNPDPAVYQLRDSKSSDKSVCLFTDFDSQTNVSQSKDSDVYITDKTVLDMRSMDFKSNSAVAWSNKSDFACANAFNNSIIPEDTFFPSSDVPCDVKLVEKSFETDTNLNFQNLSVIGFRILLLKVAGFNLLMTLRLWSSRAKRSGSGVKQTLNFDLLKLAGDVESNPGPSRGHMTEYKPTVRLATRDDVPRAVRTLAAAFADYPATRHTVDPDRHIERVTELQELFLTRVGLDIGKVWVADDGAAVAVWTTPESVEAGAVFAEIGPRMAELSGSRLAAQQQMEGLLAPHRPKEPAWFLATVGVSPDHQGKGLGSAVVLPGVEAAERAGVPAFLETSAPRNLPFYERLGFTVTADVEVPEGPRTWCMTRKPGA

SEQ ID NO: 20910 - protein, 680 aa, Artificial Sequence
  Synthetic Polypeptide
MALPVTALLLPLALLLHAARPDIVLTQSPASLAVSPGQRATITCRASKSVSTSGYSYMHWYQQKPGQPPKLLIYLASNLESGVPARFSGSGSGTDFTLTINPVEANDTANYYCQHSRELPFTFGGGTKVEIKRTGGGGSGGGGSGGGGSEVQLVESGGGLVKPGGSLRLSCAASGFTFSGYAMSWVRQAPGKGLEWVSTISSGGTYIYYPDSVKGRFTISRDNAKNSLYLQMNSLRAEDTAVYYCARLGGDNYYEYFDVWGKGTTVTVSSLEDLKNVFPPEVAVFEPSKAEIAHTQKATLVCLATGFYPDHVELSWWVNGKEVHSGVSTDPQPLKEQPALNDSRYCLSSRLRVSATFWQNPRNHFRCQVQFYGLSENDEWTQDRAKPVTQIVSAEAWGRADCGITSASYHQGVLSATILYEILLGKATLYAVLVSALVLMAMVKRKDSRGRAKRSGSGATNFSLLKQAGDVEENPGPTRGHMTEYKPTVRLATRDDVPRAVRTLAAAFADYPATRHTVDPDRHIERVTELQELFLTRVGLDIGKVWVADDGAAVAVWTTPESVEAGAVFAEIGPRMAELSGSRLAAQQQMEGLLAPHRPKEPAWFLATVGVSPDHQGKGLGSAVVLPGVEAAERAGVPAFLETSAPRNLPFYERLGFTVTADVEVPEGPRTWCMTRKPGA

SEQ ID NO: 20911 - protein, 703 aa, Artificial Sequence
  Synthetic Polypeptide
MALPVTALLLPLALLLHAARPDIVLTQSPASLAVSPGQRATITCRASKSVSTSGYSYMHWYQQKPGQPPKLLIYLASNLESGVPARFSGSGSGTDFTLTINPVEANDTANYYCQHSRELPFTFGGGTKVEIKRTGGGGSGGGGSGGGGSEVQLVESGGGLVKPGGSLRLSCAASGFTFSGYAMSWVRQAPGKGLEWVSTISSGGTYIYYPDSVKGRFTISRDNAKNSLYLQMNSLRAEDTAVYYCARLGGDNYYEYFDVWGKGTTVTVSSTRGSGGGGSGGGGSGDGNEEMGGITQTPYKVSISGTTVILTCPQYPGSEILWQHNDKNIGGDEDDKNIGSDEDHLSLKEFSELEQSGYYVCYPRGSKPEDANFYLYLRARVCENCMEMDVMSVATIVIVDICITGGLLLLVYYWSKNRKAKAKPVTRGAGAGGRQRGQNKERPPPVPNPDYEPIRKGQRDLYSGLNQRRIRAKRSGSGVKQTLNFDLLKLAGDVESNPGPSRGHMTEYKPTVRLATRDDVPRAVRTLAAAFADYPATRHTVDPDRHIERVTELQELFLTRVGLDIGKVWVADDGAAVAVWTTPESVEAGAVFAEIGPRMAELSGSRLAAQQQMEGLLAPHRPKEPAWFLATVGVSPDHQGKGLGSAVVLPGVEAAERAGVPAFLETSAPRNLPFYERLGFTVTADVEVPEGPRTWCMTRKPGA

SEQ ID NO: 20912 - protein, 668 aa, Artificial Sequence
  Synthetic Polypeptide
MALPVTALLLPLALLLHAARPDIVLTQSPASLAVSPGQRATITCRASKSVSTSGYSYMHWYQQKPGQPPKLLIYLASNLESGVPARFSGSGSGTDFTLTINPVEANDTANYYCQHSRELPFTFGGGTKVEIKRTGGGGSGGGGSGGGGSEVQLVESGGGLVKPGGSLRLSCAASGFTFSGYAMSWVRQAPGKGLEWVSTISSGGTYIYYPDSVKGRFTISRDNAKNSLYLQMNSLRAEDTAVYYCARLGGDNYYEYFDVWGKGTTVTVSSTRGSGGGGSGGGGSGFKIPIEELEDRVFVNCNTSITWVEGTVGTLLSDITRLDLGKRILDPRGIYRCNGTDIYKDKESTVQVHYRMCQSCVELDPATVAGIIVTDVIATLLLALGVFCFAGHETGRLSGAADTQALLRNDQVYQPLRDRDDAQYSHLGGNWARNKRAKRSGSGVKQTLNFDLLKLAGDVESNPGPSRGHMTEYKPTVRLATRDDVPRAVRTLAAAFADYPATRHTVDPDRHIERVTELQELFLTRVGLDIGKVWVADDGAAVAVWTTPESVEAGAVFAEIGPRMAELSGSRLAAQQQMEGLLAPHRPKEPAWFLATVGVSPDHQGKGLGSAVVLPGVEAAERAGVPAFLETSAPRNLPFYERLGFTVTADVEVPEGPRTWCMTRKPGA

SEQ ID NO: 20913 - protein, 678 aa, Artificial Sequence
  Synthetic Polypeptide
MALPVTALLLPLALLLHAARPDIVLTQSPASLAVSPGQRATITCRASKSVSTSGYSYMHWYQQKPGQPPKLLIYLASNLESGVPARFSGSGSGTDFTLTINPVEANDTANYYCQHSRELPFTFGGGTKVEIKRTGGGGSGGGGSGGGGSEVQLVESGGGLVKPGGSLRLSCAASGFTFSGYAMSWVRQAPGKGLEWVSTISSGGTYIYYPDSVKGRFTISRDNAKNSLYLQMNSLRAEDTAVYYCARLGGDNYYEYFDVWGKGTTVTVSSTRGSGGGGSGGGGSGQSIKGNHLVKVYDYQEDGSVLLTCDAEAKNITWFKDGKMIGFLTEDKKKWNLGSNAKDPRGMYQCKGSQNKSKPLQVYYRMCQNCIELNAATISGFLFAEIVSIFVLAVGVYFIAGQDGVRQSRASDKQTLLPNDQLYQPLKDREDDQYSHLQGNQLRRNRAKRSGSGVKQTLNFDLLKLAGDVESNPGPSRGHMTEYKPTVRLATRDDVPRAVRTLAAAFADYPATRHTVDPDRHIERVTELQELFLTRVGLDIGKVWVADDGAAVAVWTTPESVEAGAVFAEIGPRMAELSGSRLAAQQQMEGLLAPHRPKEPAWFLATVGVSPDHQGKGLGSAVVLPGVEAAERAGVPAFLETSAPRNLPFYERLGFTVTADVEVPEGPRTWCMTRKPGA

SEQ ID NO: 20914 - protein, 661 aa, Artificial Sequence
  Synthetic Polypeptide
MALPVTALLLPLALLLHAARPDIVLTQSPASLAVSPGQRATITCRASKSVSTSGYSYMHWYQQKPGQPPKLLIYLASNLESGVPARFSGSGSGTDFTLTINPVEANDTANYYCQHSRELPFTFGGGTKVEIKRTGGGGSGGGGSGGGGSEVQLVESGGGLVKPGGSLRLSCAASGFTFSGYAMSWVRQAPGKGLEWVSTISSGGTYIYYPDSVKGRFTISRDNAKNSLYLQMNSLRAEDTAVYYCARLGGDNYYEYFDVWGKGTTVTVSSTRGSGGGGSGGGGSGQSFGLLDPKLCYLLDGILFIYGVILTALFLRVKFSRSADAPAYQQGQNQLYNELNLGRREEYDVLDKRRGRDPEMGGKPQRRKNPQEGLYNELQKDKMAEAYSEIGMKGERRRGKGHDGLYQGLSTATKDTYDALHMQALPPRRAKRSGSGVKQTLNFDLLKLAGDVESNPGPSRGHMTEYKPTVRLATRDDVPRAVRTLAAAFADYPATRHTVDPDRHIERVTELQELFLTRVGLDIGKVWVADDGAAVAVWTTPESVEAGAVFAEIGPRMAELSGSRLAAQQQMEGLLAPHRPKEPAWFLATVGVSPDHQGKGLGSAVVLPGVEAAERAGVPAFLETSAPRNLPFYERLGFTVTADVEVPEGPRTWCMTRKPGA

SEQ ID NO: 20915 - protein, 762 aa, Artificial Sequence
  Synthetic Polypeptide
MALPVTALLLPLALLLHAARPEVQLVESGGGLVQPGGSLRLSCAASGFSFSDFWMSWVRQAPGKGLEWVATISQAGSEKDYVDSVKGRFTISRDNAKKSLYLQMNSLRAEDTAVYYCASGVYSFDYRGQGTLVTVSSGTGGGGSGGGGSGGGGSEFDIVLTQSPASLAVSPGQRATITCRASKSVSTSGYSYMHWYQQKPGQPPKLLIYLASNLESGVPARFSGSGSGTDFTLTINPVEANDTANYYCQHSRELPFTFGGGTKVEIKRTLEDLKNVFPPEVAVFEPSEAEISHTQKATLVCLATGFYPDHVELSWWVNGKEVHSGVCTDPQPLKEQPALNDSRYCLSSRLRVSATFWQNPRNHFRCQVQFYGLSENDEWTQDRAKPVTQIVSAEAWGRADCGFTSESYQQGVLSATILYEILLGKATLYAVLVSALVLMAMVKRKDSRGRAKRSGSGATNFSLLKQAGDVEENPGPTSMDWIWRILFLVGAATGAHSFEEVQLVESGGGLVKPGGSLRLSCAASGFTFSGYAMSWVRQAPGKGLEWVSTISSGGTYIYYPDSVKGRFTISRDNAKNSLYLQMNSLRAEDTAVYYCARLGGDNYYEYFDVWGKGTTVTVSSTRIQNPDPAVYQLRDSKSSDKSVCLFTDFDSQTNVSQSKDSDVYITDKCVLDMRSMDFKSNSAVAWSNKSDFACANAFNNSIIPEDTFFPSPESSCDVKLVEKSFETDTNLNFQNLSVIGFRILLLKVAGFNLLMTLRLWSS

SEQ ID NO: 20916 - protein, 766 aa, Artificial Sequence
  Synthetic Polypeptide
MALPVTALLLPLALLLHAARPEVQLVESGGGLVQPGGSLRLSCAASGFSFSDFWMSWVRQAPGKGLEWVATISQAGSEKDYVDSVKGRFTISRDNAKKSLYLQMNSLRAEDTAVYYCASGVYSFDYRGQGTLVTVSSGTGGGGSGGGGSGGGGSEFDIVLTQSPASLAVSPGQRATITCRASKSVSTSGYSYMHWYQQKPGQPPKLLIYLASNLESGVPARFSGSGSGTDFTLTINPVEANDTANYYCQHSRELPFTFGGGTKVEIKRTLEIQNPDPAVYQLRDSKSSDKSVCLFTDFDSQTNVSQSKDSDVYITDKCVLDMRSMDFKSNSAVAWSNKSDFACANAFNNSIIPEDTFFPSPESSCDVKLVEKSFETDTNLNFQNLSVIGFRILLLKVAGFNLLMTLRLWSSRAKRSGSGVKQTLNFDLLKLAGDVESNPGPTSMDWIWRILFLVGAATGAHSFEEVQLVESGGGLVKPGGSLRLSCAASGFTFSGYAMSWVRQAPGKGLEWVSTISSGGTYIYYPDSVKGRFTISRDNAKNSLYLQMNSLRAEDTAVYYCARLGGDNYYEYFDVWGKGTTVTVSSTREDLKNVFPPEVAVFEPSEAEISHTQKATLVCLATGFYPDHVELSWWVNGKEVHSGVCTDPQPLKEQPALNDSRYCLSSRLRVSATFWQNPRNHFRCQVQFYGLSENDEWTQDRAKPVTQIVSAEAWGRADCGFTSESYQQGVLSATILYEILLGKATLYAVLVSALVLMAMVKRKDSRG

SEQ ID NO: 20917 - protein, 958 aa, Artificial Sequence
  Synthetic Polypeptide
MALPVTALLLPLALLLHAARPEVQLVESGGGLVQPGGSLRLSCAASGFSFSDFWMSWVRQAPGKGLEWVATISQAGSEKDYVDSVKGRFTISRDNAKKSLYLQMNSLRAEDTAVYYCASGVYSFDYRGQGTLVTVSSGTGGGGSGGGGSGGGGSEFDIVLTQSPASLAVSPGQRATITCRASKSVSTSGYSYMHWYQQKPGQPPKLLIYLASNLESGVPARFSGSGSGTDFTLTINPVEANDTANYYCQHSRELPFTFGGGTKVEIKRTLEDLKNVFPPEVAVFEPSEAEISHTQKATLVCLATGFYPDHVELSWWVNGKEVHSGVSTDPQPLKEQPALNDSRYCLSSRLRVSATFWQNPRNHFRCQVQFYGLSENDEWTQDRAKPVTQIVSAEAWGRADCGSQSFGLLDPKLCYLLDGILFIYGVILTALFLRVKFSRSADAPAYQQGQNQLYNELNLGRREEYDVLDKRRGRDPEMGGKPQRRKNPQEGLYNELQKDKMAEAYSEIGMKGERRRGKGHDGLYQGLSTATKDTYDALHMQALPPRRAKRSGSGATNFSLLKQAGDVEENPGPTSMDWIWRILFLVGAATGAHSFEEVQLVESGGGLVKPGGSLRLSCAASGFTFSGYAMSWVRQAPGKGLEWVSTISSGGTYIYYPDSVKGRFTISRDNAKNSLYLQMNSLRAEDTAVYYCARLGGDNYYEYFDVWGKGTTVTVSSTRIQNPDPAVYQLRDSKSSDKSVCLFTDFDSQTNVSQSKDSDVYITDKTVLDMRSMDFKSNSAVAWSNKSDFACANAFNNSIIPEDTFFPSPESSCGTQSFGLLDPKLCYLLDGILFIYGVILTALFLRVKFSRSADAPAYQQGQNQLYNELNLGRREEYDVLDKRRGRDPEMGGKPQRRKNPQEGLYNELQKDKMAEAYSEIGMKGERRRGKGHDGLYQGLSTATKDTYDALHMQALPPR

SEQ ID NO: 20918 - protein, 788 aa, Artificial Sequence
  Synthetic Polypeptide
MALPVTALLLPLALLLHAARPEVQLVESGGGLVQPGGSLRLSCAASGFSFSDFWMSWVRQAPGKGLEWVATISQAGSEKDYVDSVKGRFTISRDNAKKSLYLQMNSLRAEDTAVYYCASGVYSFDYRGQGTLVTVSSGTGGGGSGGGGSGGGGSEFDIVLTQSPASLAVSPGQRATITCRASKSVSTSGYSYMHWYQQKPGQPPKLLIYLASNLESGVPARFSGSGSGTDFTLTINPVEANDTANYYCQHSRELPFTFGGGTKVEIKRTLEGQPKANPTVTLFPPSSEELQANKATLVCLISDFYPGAVTVAWKADGSPVKAGVETTKPSKQSNNKYAASSYLSLTPEQWKSHRSYSCQVTHEGSTVEKTVAPTECSPIKTDVITMDPKDNCSKDANDTLLLQLTNTSAYYMYLLLLLKSVVYFAIITCCLLRRTAFCCNGEKSRAKRSGSGATNFSLLKQAGDVEENPGPTSMDWIWRILFLVGAATGAHSFEEVQLVESGGGLVKPGGSLRLSCAASGFTFSGYAMSWVRQAPGKGLEWVSTISSGGTYIYYPDSVKGRFTISRDNAKNSLYLQMNSLRAEDTAVYYCARLGGDNYYEYFDVWGKGTTVTVSSTRASTKGPSVFPLAPSSKSTSGGTAALGCLVKDYFPEPVTVSWNSGALTSGVHTFPAVLQSSGLYSLSSVVTVPSSSLGTQTYICNVNHKPSNTKVDKRVEPKSCEVKTDSTDHVKPKETENTKQPSKSCHKPKAIVHTEKVNMMSLTVLGLRMLFAKTVAVNFLLTAKLFFL

SEQ ID NO: 20919 - protein, 769 aa, Artificial Sequence
  Synthetic Polypeptide
MALPVTALLLPLALLLHAARPEVQLVESGGGLVQPGGSLRLSCAASGFSFSDFWMSWVRQAPGKGLEWVATISQAGSEKDYVDSVKGRFTISRDNAKKSLYLQMNSLRAEDTAVYYCASGVYSFDYRGQGTLVTVSSGTGGGGSGGGGSGGGGSEFDIVLTQSPASLAVSPGQRATITCRASKSVSTSGYSYMHWYQQKPGQPPKLLIYLASNLESGVPARFSGSGSGTDFTLTINPVEANDTANYYCQHSRELPFTFGGGTKVEIKRTLEGQPKANPTVTLFPPSSEELQANKATLVCLISDFYPGAVTVAWKADGSPVKAGVETTKPSKQSNNKYAASSYLSLTPEQWKSHRSYSCQVTHEGSTVEKTVAPTECSGRADCGFTSESYQQGVLSATILYEILLGKATLYAVLVSALVLMAMVKRKDSRGRAKRSGSGVKQTLNFDLLKLAGDVESNPGPTSMDWIWRILFLVGAATGAHSFEEVQLVESGGGLVKPGGSLRLSCAASGFTFSGYAMSWVRQAPGKGLEWVSTISSGGTYIYYPDSVKGRFTISRDNAKNSLYLQMNSLRAEDTAVYYCARLGGDNYYEYFDVWGKGTTVTVSSTRASTKGPSVFPLAPSSKSTSGGTAALGCLVKDYFPEPVTVSWNSGALTSGVHTFPAVLQSSGLYSLSSVVTVPSSSLGTQTYICNVNHKPSNTKVDKRVEPKSCIPEDTFFPSPESSCDVKLVEKSFETDTNLNFQNLSVIGFRILLLKVAGFNLLMTLRLWSS

SEQ ID NO: 20920 - protein, 903 aa, Artificial Sequence
  Synthetic Polypeptide
MALPVTALLLPLALLLHAARPEVQLVESGGGLVQPGGSLRLSCAASGFSFSDFWMSWVRQAPGKGLEWVATISQAGSEKDYVDSVKGRFTISRDNAKKSLYLQMNSLRAEDTAVYYCASGVYSFDYRGQGTLVTVSSGTGGGGSGGGGSGGGGSEFDIVLTQSPASLAVSPGQRATITCRASKSVSTSGYSYMHWYQQKPGQPPKLLIYLASNLESGVPARFSGSGSGTDFTLTINPVEANDTANYYCQHSRELPFTFGGGTKVEIKRTLEIQNPDPAVYQLRDSKSSDKSVCLFTDFDSQTNVSQSKDSDVYITDKCVLDMRSMDFKSNSAVAWSNKSDFACANAFNNSIIPEDTFFPSPESSCDVKLVEKSFETDTNLNFQNLSVIGFRILLLKVAGFNLLMTLRLWSSRAKRSGSGVKQTLNFDLLKLAGDVESNPGPTSMDWIWRILFLVGAATGAHSGPQLQLQESGPGLVKPSETLSLTCTVSGDSISSGDYYWGWIRQPPGKGLEWIGHIYYSGVTYYNPSLKSRVTISVDTSRNQFSLKLSSVTAADTAVYYCTREDSSNWRSRGQGTLVTVSSGSGGGGSGGGGSGGGGSFEEVQLVESGGGLVKPGGSLRLSCAASGFTFSGYAMSWVRQAPGKGLEWVSTISSGGTYIYYPDSVKGRFTISRDNAKNSLYLQMNSLRAEDTAVYYCARLGGDNYYEYFDVWGKGTTVTVSSTREDLKNVFPPEVAVFEPSEAEISHTQKATLVCLATGFYPDHVELSWWVNGKEVHSGVCTDPQPLKEQPALNDSRYCLSSRLRVSATFWQNPRNHFRCQVQFYGLSENDEWTQDRAKPVTQIVSAEAWGRADCGFTSESYQQGVLSATILYEILLGKATLYAVLVSALVLMAMVKRKDSRG

SEQ ID NO: 20921 - protein, 1095 aa, Artificial Sequence
  Synthetic Polypeptide
MALPVTALLLPLALLLHAARPEVQLVESGGGLVQPGGSLRLSCAASGFSFSDFWMSWVRQAPGKGLEWVATISQAGSEKDYVDSVKGRFTISRDNAKKSLYLQMNSLRAEDTAVYYCASGVYSFDYRGQGTLVTVSSGTGGGGSGGGGSGGGGSEFDIVLTQSPASLAVSPGQRATITCRASKSVSTSGYSYMHWYQQKPGQPPKLLIYLASNLESGVPARFSGSGSGTDFTLTINPVEANDTANYYCQHSRELPFTFGGGTKVEIKRTLEDLKNVFPPEVAVFEPSEAEISHTQKATLVCLATGFYPDHVELSWWVNGKEVHSGVSTDPQPLKEQPALNDSRYCLSSRLRVSATFWQNPRNHFRCQVQFYGLSENDEWTQDRAKPVTQIVSAEAWGRADCGSQSFGLLDPKLCYLLDGILFIYGVILTALFLRVKFSRSADAPAYQQGQNQLYNELNLGRREEYDVLDKRRGRDPEMGGKPQRRKNPQEGLYNELQKDKMAEAYSEIGMKGERRRGKGHDGLYQGLSTATKDTYDALHMQALPPRRAKRSGSGATNFSLLKQAGDVEENPGPTSMDWIWRILFLVGAATGAHSGPQLQLQESGPGLVKPSETLSLTCTVSGDSISSGDYYWGWIRQPPGKGLEWIGHIYYSGVTYYNPSLKSRVTISVDTSRNQFSLKLSSVTAADTAVYYCTREDSSNWRSRGQGTLVTVSSGSGGGGSGGGGSGGGGSFEEVQLVESGGGLVKPGGSLRLSCAASGFTFSGYAMSWVRQAPGKGLEWVSTISSGGTYIYYPDSVKGRFTISRDNAKNSLYLQMNSLRAEDTAVYYCARLGGDNYYEYFDVWGKGTTVTVSSTRIQNPDPAVYQLRDSKSSDKSVCLFTDFDSQTNVSQSKDSDVYITDKTVLDMRSMDFKSNSAVAWSNKSDFACANAFNNSIIPEDTFFPSPESSCGTQSFGLLDPKLCYLLDGILFIYGVILTALFLRVKFSRSADAPAYQQGQNQLYNELNLGRREEYDVLDKRRGRDPEMGGKPQRRKNPQEGLYNELQKDKMAEAYSEIGMKGERRRGKGHDGLYQGLSTATKDTYDALHMQALPPR

SEQ ID NO: 20922 - protein, 925 aa, Artificial Sequence
  Synthetic Polypeptide
MALPVTALLLPLALLLHAARPEVQLVESGGGLVQPGGSLRLSCAASGFSFSDFWMSWVRQAPGKGLEWVATISQAGSEKDYVDSVKGRFTISRDNAKKSLYLQMNSLRAEDTAVYYCASGVYSFDYRGQGTLVTVSSGTGGGGSGGGGSGGGGSEFDIVLTQSPASLAVSPGQRATITCRASKSVSTSGYSYMHWYQQKPGQPPKLLIYLASNLESGVPARFSGSGSGTDFTLTINPVEANDTANYYCQHSRELPFTFGGGTKVEIKRTLEGQPKANPTVTLFPPSSEELQANKATLVCLISDFYPGAVTVAWKADGSPVKAGVETTKPSKQSNNKYAASSYLSLTPEQWKSHRSYSCQVTHEGSTVEKTVAPTECSPIKTDVITMDPKDNCSKDANDTLLLQLTNTSAYYMYLLLLLKSVVYFAIITCCLLRRTAFCCNGEKSRAKRSGSGATNFSLLKQAGDVEENPGPTSMDWIWRILFLVGAATGAHSGPQLQLQESGPGLVKPSETLSLTCTVSGDSISSGDYYWGWIRQPPGKGLEWIGHIYYSGVTYYNPSLKSRVTISVDTSRNQFSLKLSSVTAADTAVYYCTREDSSNWRSRGQGTLVTVSSGSGGGGSGGGGSGGGGSFEEVQLVESGGGLVKPGGSLRLSCAASGFTFSGYAMSWVRQAPGKGLEWVSTISSGGTYIYYPDSVKGRFTISRDNAKNSLYLQMNSLRAEDTAVYYCARLGGDNYYEYFDVWGKGTTVTVSSTRASTKGPSVFPLAPSSKSTSGGTAALGCLVKDYFPEPVTVSWNSGALTSGVHTFPAVLQSSGLYSLSSVVTVPSSSLGTQTYICNVNHKPSNTKVDKRVEPKSCEVKTDSTDHVKPKETENTKQPSKSCHKPKAIVHTEKVNMMSLTVLGLRMLFAKTVAVNFLLTAKLFFL

SEQ ID NO: 20923 - protein, 906 aa, Artificial Sequence
  Synthetic Polypeptide
MALPVTALLLPLALLLHAARPEVQLVESGGGLVQPGGSLRLSCAASGFSFSDFWMSWVRQAPGKGLEWVATISQAGSEKDYVDSVKGRFTISRDNAKKSLYLQMNSLRAEDTAVYYCASGVYSFDYRGQGTLVTVSSGTGGGGSGGGGSGGGGSEFDIVLTQSPASLAVSPGQRATITCRASKSVSTSGYSYMHWYQQKPGQPPKLLIYLASNLESGVPARFSGSGSGTDFTLTINPVEANDTANYYCQHSRELPFTFGGGTKVEIKRTLEGQPKANPTVTLFPPSSEELQANKATLVCLISDFYPGAVTVAWKADGSPVKAGVETTKPSKQSNNKYAASSYLSLTPEQWKSHRSYSCQVTHEGSTVEKTVAPTECSGRADCGFTSESYQQGVLSATILYEILLGKATLYAVLVSALVLMAMVKRKDSRGRAKRSGSGVKQTLNFDLLKLAGDVESNPGPTSMDWIWRILFLVGAATGAHSGPQLQLQESGPGLVKPSETLSLTCTVSGDSISSGDYYWGWIRQPPGKGLEWIGHIYYSGVTYYNPSLKSRVTISVDTSRNQFSLKLSSVTAADTAVYYCTREDSSNWRSRGQGTLVTVSSGSGGGGSGGGGSGGGGSFEEVQLVESGGGLVKPGGSLRLSCAASGFTFSGYAMSWVRQAPGKGLEWVSTISSGGTYIYYPDSVKGRFTISRDNAKNSLYLQMNSLRAEDTAVYYCARLGGDNYYEYFDVWGKGTTVTVSSTRASTKGPSVFPLAPSSKSTSGGTAALGCLVKDYFPEPVTVSWNSGALTSGVHTFPAVLQSSGLYSLSSVVTVPSSSLGTQTYICNVNHKPSNTKVDKRVEPKSCIPEDTFFPSPESSCDVKLVEKSFETDTNLNFQNLSVIGFRILLLKVAGFNLLMTLRLWSS

SEQ ID NO: 20924 - protein, 763 aa, Artificial Sequence
  Synthetic Polypeptide
MALPVTALLLPLALLLHAARPEVQVLESGGGLVQPGGSLRLSCAASGFTFSNFAMSWVRQAPGKGLEWVSTISGSAGTTDYADSVKGRFTISRDNSKKTLYLQMNSLRVEDTAVYYCADGRGPFFDYRGQGTLVTVSSGTGGGGSGGGGSGGGGSEFDIVLTQSPASLAVSPGQRATITCRASKSVSTSGYSYMHWYQQKPGQPPKLLIYLASNLESGVPARFSGSGSGTDFTLTINPVEANDTANYYCQHSRELPFTFGGGTKVEIKRTLEDLKNVFPPEVAVFEPSEAEISHTQKATLVCLATGFYPDHVELSWWVNGKEVHSGVCTDPQPLKEQPALNDSRYCLSSRLRVSATFWQNPRNHFRCQVQFYGLSENDEWTQDRAKPVTQIVSAEAWGRADCGFTSESYQQGVLSATILYEILLGKATLYAVLVSALVLMAMVKRKDSRGRAKRSGSGATNFSLLKQAGDVEENPGPTSMDWIWRILFLVGAATGAHSFEEVQLVESGGGLVKPGGSLRLSCAASGFTFSGYAMSWVRQAPGKGLEWVSTISSGGTYIYYPDSVKGRFTISRDNAKNSLYLQMNSLRAEDTAVYYCARLGGDNYYEYFDVWGKGTTVTVSSTRIQNPDPAVYQLRDSKSSDKSVCLFTDFDSQTNVSQSKDSDVYITDKCVLDMRSMDFKSNSAVAWSNKSDFACANAFNNSIIPEDTFFPSPESSCDVKLVEKSFETDTNLNFQNLSVIGFRILLLKVAGFNLLMTLRLWSS

SEQ ID NO: 20925 - protein, 764 aa, Artificial Sequence
  Synthetic Polypeptide
MALPVTALLLPLALLLHAARPDIVLTQSPASLAVSPGQRATITCRASKSVSTSGYSYMHWYQQKPGQPPKLLIYLASNLESGVPARFSGSGSGTDFTLTINPVEANDTANYYCQHSRELPFTFGGGTKVEIKRTLEDLKNVFPPEVAVFEPSEAEISHTQKATLVCLATGFYPDHVELSWWVNGKEVHSGVCTDPQPLKEQPALNDSRYCLSSRLRVSATFWQNPRNHFRCQVQFYGLSENDEWTQDRAKPVTQIVSAEAWGRADCGFTSESYQQGVLSATILYEILLGKATLYAVLVSALVLMAMVKRKDSRGRAKRSGSGATNFSLLKQAGDVEENPGPTSMDWIWRILFLVGAATGAHSGPEVQLVESGGGLVQAGGSLRLSCAASGRTFSMGWFRQAPGKEREFVAAITYSGGSPYYADSVKGRFTISRDNAKNTVYLQMNSLKPEDTAVYYCAANPTYGSDWNAENWGQGTQVTVSSGSGGGGSGGGGSGGGGSFEEVQLVESGGGLVKPGGSLRLSCAASGFTFSGYAMSWVRQAPGKGLEWVSTISSGGTYIYYPDSVKGRFTISRDNAKNSLYLQMNSLRAEDTAVYYCARLGGDNYYEYFDVWGKGTTVTVSSTRIQNPDPAVYQLRDSKSSDKSVCLFTDFDSQTNVSQSKDSDVYITDKCVLDMRSMDFKSNSAVAWSNKSDFACANAFNNSIIPEDTFFPSPESSCDVKLVEKSFETDTNLNFQNLSVIGFRILLLKVAGFNLLMTLRLWSS

SEQ ID NO: 20926 - protein, 891 aa, Artificial Sequence
  Synthetic Polypeptide
MALPVTALLLPLALLLHAARPDIVLTQSPASLAVSPGQRATITCRASKSVSTSGYSYMHWYQQKPGQPPKLLIYLASNLESGVPARFSGSGSGTDFTLTINPVEANDTANYYCQHSRELPFTFGGGTKVEIKRTLEDLKNVFPPEVAVFEPSEAEISHTQKATLVCLATGFYPDHVELSWWVNGKEVHSGVCTDPQPLKEQPALNDSRYCLSSRLRVSATFWQNPRNHFRCQVQFYGLSENDEWTQDRAKPVTQIVSAEAWGRADCGFTSESYQQGVLSATILYEILLGKATLYAVLVSALVLMAMVKRKDSRGRAKRSGSGATNFSLLKQAGDVEENPGPTSMDWIWRILFLVGAATGAHSQLQLQESGPGLVKPSETLSLTCTVSGGSISSGDYYWGWIRQPPGKGLEWIGSISYSGSTYYNPSLKSRVTISVDTSRNQFSLKLSSVTAADTAVYYCTREDSSNWRSRGQGTLVTVSSSGGGGSGGGGSEVQLVESGGGLVQAGGSLRLSCAASGRTFSMGWFRQAPGKEREFVAAITYSGGSPYYADSVKGRFTISRDNAKNTVYLQMNSLKPEDTAVYYCAANPTYGSDWNAENWGQGTQVTVSSGSGGGGSGGGGSGGGGSFEEVQLVESGGGLVKPGGSLRLSCAASGFTFSGYAMSWVRQAPGKGLEWVSTISSGGTYIYYPDSVKGRFTISRDNAKNSLYLQMNSLRAEDTAVYYCARLGGDNYYEYFDVWGKGTTVTVSSTRIQNPDPAVYQLRDSKSSDKSVCLFTDFDSQTNVSQSKDSDVYITDKCVLDMRSMDFKSNSAVAWSNKSDFACANAFNNSIIPEDTFFPSPESSCDVKLVEKSFETDTNLNFQNLSVIGFRILLLKVAGFNLLMTLRLWSS

SEQ ID NO: 20927 - protein, 900 aa, Artificial Sequence
  Synthetic Polypeptide
MALPVTALLLPLALLLHAARPEVQVLESGGGLVQPGGSLRLSCAASGFTFSNFAMSWVRQAPGKGLEWVSTISGSAGTTDYADSVKGRFTISRDNSKKTLYLQMNSLRVEDTAVYYCADGRGPFFDYRGQGTLVTVSSGTGGGGSGGGGSGGGGSEFDIVLTQSPASLAVSPGQRATITCRASKSVSTSGYSYMHWYQQKPGQPPKLLIYLASNLESGVPARFSGSGSGTDFTLTINPVEANDTANYYCQHSRELPFTFGGGTKVEIKRTLEDLKNVFPPEVAVFEPSEAEISHTQKATLVCLATGFYPDHVELSWWVNGKEVHSGVCTDPQPLKEQPALNDSRYCLSSRLRVSATFWQNPRNHFRCQVQFYGLSENDEWTQDRAKPVTQIVSAEAWGRADCGFTSESYQQGVLSATILYEILLGKATLYAVLVSALVLMAMVKRKDSRGRAKRSGSGATNFSLLKQAGDVEENPGPTSMDWIWRILFLVGAATGAHSGPEVQLVESGGGLVQAGGSLRLSCAASGRTFSMGWFRQAPGKEREFVAAITYSGGSPYYASSVRGRFTISRDNAKNTVYLQMNSLKPEDTAVYYCAANPTYGSDWNAENWGQGTQVTVSSGSGGGGSGGGGSGGGGSFEEVQLVESGGGLVKPGGSLRLSCAASGFTFSGYAMSWVRQAPGKGLEWVSTISSGGTYIYYPDSVKGRFTISRDNAKNSLYLQMNSLRAEDTAVYYCARLGGDNYYEYFDVWGKGTTVTVSSTRIQNPDPAVYQLRDSKSSDKSVCLFTDFDSQTNVSQSKDSDVYITDKCVLDMRSMDFKSNSAVAWSNKSDFACANAFNNSIIPEDTFFPSPESSCDVKLVEKSFETDTNLNFQNLSVIGFRILLLKVAGFNLLMTLRLWSS

SEQ ID NO: 20928 - protein, 722 aa, Artificial Sequence
  Synthetic Polypeptide
MALPVTALLLPLALLLHAARPDIQMTQSPSSLSVSVGDRVTITCKASQNVRTVVAWYQQKPGLAPKTLIYLASNRHTGVPSRFSGSGSGTDFTFTISSLQPEDIATYFCQQHWSYPLTFGQGTKVEVKRGGGGSGGGGSGGGGSEVQLLESGGGLVQPGGSLRLSCAASGFAFSTYDMSWVRQAPGKGLEWVATISSGGSYTYYLDSVKGRFTISRDSSKNTLYLQMNSLQAEDSAIYYCAPTTVVPFAYWGQGTLVTVSSTREQKLISEEDLAKPTTTPAPRPPTPAPTIASQPLSLRPEACRPAAGGAVHTRGLDFACDIYIWAPLAGTCGVLLLSLVITLYCKRGRKKLLYIFKQPFMRPVQTTQEEDGCSCRFPEEEEGGCELRVKFSRSADAPAYQQGQNQLYNELNLGRREEYDVLDKRRGRDPEMGGKPRRKNPQEGLYNELQKDKMAEAYSEIGMKGERRRGKGHDGLYQGLSTATKDTYDALHMQALPPRSSGSGEGRGSLLTCGDVEENPGPHMTEYKPTVRLATRDDVPRAVRTLAAAFADYPATRHTVDPDRHIERVTELQELFLTRVGLDIGKVWVADDGAAVAVWTTPESVEAGAVFAEIGPRMAELSGSRLAAQQQMEGLLAPHRPKEPAWFLATVGVSPDHQGKGLGSAVVLPGVEAAERAGVPAFLETSAPRNLPFYERLGFTVTADVEVPEGPRTWCMTRKPGA

SEQ ID NO: 20929 - protein, 716 aa, Artificial Sequence
  Synthetic Polypeptide
MALPVTALLLPLALLLHAARPDIQMTQSPSSLSVSVGDRVTITCKASQNVRTVVAWYQQKPGLAPKTLIYLASNRHTGVPSRFSGSGSGTDFTFTISSLQPEDIATYFCQQHWSYPLTFGQGTKVEVKRGGGGSGGGGSGGGGSEVQLLESGGGLVQPGGSLRLSCAASGFAFSTYDMSWVRQAPGKGLEWVATISSGGSYTYYLDSVKGRFTISRDSSKNTLYLQMNSLQAEDSAIYYCAPTTVVPFAYWGQGTLVTVSSTREQKLISEEDLKIEVMYPPPYLDNEKSNGTIIHVKGKHLCPSPLFPGPSKPFWVLVVVGGVLACYSLLVTVAFIIFWVRSKRSRLLHSDYMNMTPRRPGPTRKHYQPYAPPRDFAAYRSRVKFSRSADAPAYQQGQNQLYNELNLGRREEYDVLDKRRGRDPEMGGKPRRKNPQEGLYNELQKDKMAEAYSEIGMKGERRRGKGHDGLYQGLSTATKDTYDALHMQALPPRSSGSGEGRGSLLTCGDVEENPGPHMTEYKPTVRLATRDDVPRAVRTLAAAFADYPATRHTVDPDRHIERVTELQELFLTRVGLDIGKVWVADDGAAVAVWTTPESVEAGAVFAEIGPRMAELSGSRLAAQQQMEGLLAPHRPKEPAWFLATVGVSPDHQGKGLGSAVVLPGVEAAERAGVPAFLETSAPRNLPFYERLGFTVTADVEVPEGPRTWCMTRKPGA

SEQ ID NO: 20930 - protein, 493 aa, Artificial Sequence
  Synthetic Polypeptide
MALPVTALLLPLALLLHAARPDIQMTQSPSSLSVSVGDRVTITCKASQNVRTVVAWYQQKPGLAPKTLIYLASNRHTGVPSRFSGSGSGTDFTFTISSLQPEDIATYFCQQHWSYPLTFGQGTKVEVKRGGGGSGGGGSGGGGSEVQLLESGGGLVQPGGSLRLSCAASGFAFSTYDMSWVRQAPGKGLEWVATISSGGSYTYYLDSVKGRFTISRDSSKNTLYLQMNSLQAEDSAIYYCAPTTVVPFAYWGQGTLVTVSSTREQKLISEEDLKIEVMYPPPYLDNEKSNGTIIHVKGKHLCPSPLFPGPSKPFWVLVVVGGVLACYSLLVTVAFIIFWVRSKRSRLLHSDYMNMTPRRPGPTRKHYQPYAPPRDFAAYRSRVKFSRSADAPAYQQGQNQLYNELNLGRREEYDVLDKRRGRDPEMGGKPRRKNPQEGLYNELQKDKMAEAYSEIGMKGERRRGKGHDGLYQGLSTATKDTYDALHMQALPPR

SEQ ID NO: 20931 - protein, 499 aa, Artificial Sequence
  Synthetic Polypeptide
MALPVTALLLPLALLLHAARPDIQMTQSPSSLSVSVGDRVTITCKASQNVRTVVAWYQQKPGLAPKTLIYLASNRHTGVPSRFSGSGSGTDFTFTISSLQPEDIATYFCQQHWSYPLTFGQGTKVEVKRGGGGSGGGGSGGGGSEVQLLESGGGLVQPGGSLRLSCAASGFAFSTYDMSWVRQAPGKGLEWVATISSGGSYTYYLDSVKGRFTISRDSSKNTLYLQMNSLQAEDSAIYYCAPTTVVPFAYWGQGTLVTVSSTREQKLISEEDLAKPTTTPAPRPPTPAPTIASQPLSLRPEACRPAAGGAVHTRGLDFACDIYIWAPLAGTCGVLLLSLVITLYCKRGRKKLLYIFKQPFMRPVQTTQEEDGCSCRFPEEEEGGCELRVKFSRSADAPAYQQGQNQLYNELNLGRREEYDVLDKRRGRDPEMGGKPRRKNPQEGLYNELQKDKMAEAYSEIGMKGERRRGKGHDGLYQGLSTATKDTYDALHMQALPPR

SEQ ID NO: 20932 - protein, 499 aa, Artificial Sequence
  Synthetic Polypeptide
MALPVTALLLPLALLLHAARPEVQLLESGGGLVQPGGSLRLSCAASGFAFSTYDMSWVRQAPGKGLEWVATISSGGSYTYYLDSVKGRFTISRDSSKNTLYLQMNSLQAEDSAIYYCAPTTVVPFAYWGQGTLVTVSSGGGGSGGGGSGGGGSDIQMTQSPSSLSVSVGDRVTITCKASQNVRTVVAWYQQKPGLAPKTLIYLASNRHTGVPSRFSGSGSGTDFTFTISSLQPEDIATYFCQQHWSYPLTFGQGTKVEVKRTREQKLISEEDLAKPTTTPAPRPPTPAPTIASQPLSLRPEACRPAAGGAVHTRGLDFACDIYIWAPLAGTCGVLLLSLVITLYCKRGRKKLLYIFKQPFMRPVQTTQEEDGCSCRFPEEEEGGCELRVKFSRSADAPAYQQGQNQLYNELNLGRREEYDVLDKRRGRDPEMGGKPRRKNPQEGLYNELQKDKMAEAYSEIGMKGERRRGKGHDGLYQGLSTATKDTYDALHMQALPPR

SEQ ID NO: 20933 - protein, 912 aa, Artificial Sequence
  Synthetic Polypeptide
MALPVTALLLPLALLLHAARPDIQMTQSPSSLSVSVGDRVTITCKASQNVRTVVAWYQQKPGLAPKTLIYLASNRHTGVPSRFSGSGSGTDFTFTISSLQPEDIATYFCQQHWSYPLTFGQGTKVEVKRGGGGSGGGGSGGGGSEVQLLESGGGLVQPGGSLRLSCAASGFAFSTYDMSWVRQAPGKGLEWVATISSGGSYTYYLDSVKGRFTISRDSSKNTLYLQMNSLQAEDSAIYYCAPTTVVPFAYWGQGTLVTVSSTREQKLISEEDLAKPTTTPAPRPPTPAPTIASQPLSLRPEACRPAAGGAVHTRGLDFACDIYIWAPLAGTCGVLLLSLVITLYCGRARVKFSRSADAPAYQQGQNQLYNELNLGRREEYDVLDKRRGRDPEMGGKPRRKNPQEGLYNELQKDKMAEAYSEIGMKGERRRGKGHDGLYQGLSTATKDTYDALHMQALPPRSRGSGATNFSLLKQAGDVEENPGPGIHMATYEVLCEVARKLGTDDREVVLFLLNVFIPQPTLAQLIGALRALKEEGRLTFPLLAECLFRAGRRDLLRDLLHLDPRFLERHLAGTMSYFSPYQLTVLHVDGELCARDIRSLIFLSKDTIGSRSTPQTFLHWVYCMENLDLLGPTDVDALMSMLRSLSRVDLQRQVQTLMGLHLSGPSHSQHYRHTPLETDFYDYKDDDDKTSGSGEGRGSLLTCGDVEENPGPHMTEYKPTVRLATRDDVPRAVRTLAAAFADYPATRHTVDPDRHIERVTELQELFLTRVGLDIGKVWVADDGAAVAVWTTPESVEAGAVFAEIGPRMAELSGSRLAAQQQMEGLLAPHRPKEPAWFLATVGVSPDHQGKGLGSAVVLPGVEAAERAGVPAFLETSAPRNLPFYERLGFTVTADVEVPEGPRTWCMTRKPGA

SEQ ID NO: 20934 - protein, 852 aa, Artificial Sequence
  Synthetic Polypeptide
MALPVTALLLPLALLLHAARPDIQMTQSPSSLSVSVGDRVTITCKASQNVRTVVAWYQQKPGLAPKTLIYLASNRHTGVPSRFSGSGSGTDFTFTISSLQPEDIATYFCQQHWSYPLTFGQGTKVEVKRLEIQNPDPAVYQLRDSKSSDKSVCLFTDFDSQTNVSQSKDSDVYITDKCVLDMRSMDFKSNSAVAWSNKSDFACANAFNNSIIPEDTFFPSSDVPCDVKLVEKSFETDTNLNFQNLSVIGFRILLLKVAGFNLLMTLRLWSSRAKRSGSGVKQTLNFDLLKLAGDVESNPGPTSMDWIWRILFLVGAATGAHSFEEVQLLESGGGLVQPGGSLRLSCAASGFAFSTYDMSWVRQAPGKGLEWVATISSGGSYTYYLDSVKGRFTISRDSSKNTLYLQMNSLQAEDSAIYYCAPTTVVPFAYWGQGTLVTVSSTREDLKNVFPPEVAVFEPSKAEIAHTQKATLVCLATGFYPDHVELSWWVNGKEVHSGVCTDPQPLKEQPALNDSRYCLSSRLRVSATFWQNPRNHFRCQVQFYGLSENDEWTQDRAKPVTQIVSAEAWGRADCGITSASYHQGVLSATILYEILLGKATLYAVLVSALVLMAMVKRKDSRGRAKRSGSGATNFSLLKQAGDVEENPGPSRGHMTEYKPTVRLATRDDVPRAVRTLAAAFADYPATRHTVDPDRHIERVTELQELFLTRVGLDIGKVWVADDGAAVAVWTTPESVEAGAVFAEIGPRMAELSGSRLAAQQQMEGLLAPHRPKEPAWFLATVGVSPDHQGKGLGSAVVLPGVEAAERAGVPAFLETSAPRNLPFYERLGFTVTADVEVPEGPRTWCMTRKPGA

SEQ ID NO: 20935 - protein, 851 aa, Artificial Sequence
  Synthetic Polypeptide
MALPVTALLLPLALLLHAARPDIQMTQSPSSLSVSVGDRVTITCKASQNVRTVVAWYQQKPGLAPKTLIYLASNRHTGVPSRFSGSGSGTDFTFTISSLQPEDIATYFCQQHWSYPLTFGQGTKVEVKRLEDLKNVFPPEVAVFEPSKAEIAHTQKATLVCLATGFYPDHVELSWWVNGKEVHSGVCTDPQPLKEQPALNDSRYCLSSRLRVSATFWQNPRNHFRCQVQFYGLSENDEWTQDRAKPVTQIVSAEAWGRADCGITSASYHQGVLSATILYEILLGKATLYAVLVSALVLMAMVKRKDSRGRAKRSGSGATNFSLLKQAGDVEENPGPTSMDWIWRILFLVGAATGAHSFEEVQLLESGGGLVQPGGSLRLSCAASGFAFSTYDMSWVRQAPGKGLEWVATISSGGSYTYYLDSVKGRFTISRDSSKNTLYLQMNSLQAEDSAIYYCAPTTVVPFAYWGQGTLVTVSSTRIQNPDPAVYQLRDSKSSDKSVCLFTDFDSQTNVSQSKDSDVYITDKCVLDMRSMDFKSNSAVAWSNKSDFACANAFNNSIIPEDTFFPSSDVPCDVKLVEKSFETDTNLNFQNLSVIGFRILLLKVAGFNLLMTLRLWSSRAKRSGSGVKQTLNFDLLKLAGDVESNPGPSRGHMTEYKPTVRLATRDDVPRAVRTLAAAFADYPATRHTVDPDRHIERVTELQELFLTRVGLDIGKVWVADDGAAVAVWTTPESVEAGAVFAEIGPRMAELSGSRLAAQQQMEGLLAPHRPKEPAWFLATVGVSPDHQGKGLGSAVVLPGVEAAERAGVPAFLETSAPRNLPFYERLGFTVTADVEVPEGPRTWCMTRKPGA

SEQ ID NO: 20936 - protein, 618 aa, Artificial Sequence
  Synthetic Polypeptide
MALPVTALLLPLALLLHAARPDIQMTQSPSSLSVSVGDRVTITCKASQNVRTVVAWYQQKPGLAPKTLIYLASNRHTGVPSRFSGSGSGTDFTFTISSLQPEDIATYFCQQHWSYPLTFGQGTKVEVKRLEDLKNVFPPEVAVFEPSEAEISHTQKATLVCLATGFYPDHVELSWWVNGKEVHSGVCTDPQPLKEQPALNDSRYCLSSRLRVSATFWQNPRNHFRCQVQFYGLSENDEWTQDRAKPVTQIVSAEAWGRADCGFTSESYQQGVLSATILYEILLGKATLYAVLVSALVLMAMVKRKDSRGRAKRSGSGATNFSLLKQAGDVEENPGPTSMDWIWRILFLVGAATGAHSFEEVQLLESGGGLVQPGGSLRLSCAASGFAFSTYDMSWVRQAPGKGLEWVATISSGGSYTYYLDSVKGRFTISRDSSKNTLYLQMNSLQAEDSAIYYCAPTTVVPFAYWGQGTLVTVSSTRIQNPDPAVYQLRDSKSSDKSVCLFTDFDSQTNVSQSKDSDVYITDKCVLDMRSMDFKSNSAVAWSNKSDFACANAFNNSIIPEDTFFPSPESSCDVKLVEKSFETDTNLNFQNLSVIGFRILLLKVAGFNLLMTLRLWSS

SEQ ID NO: 20937 - protein, 843 aa, Artificial Sequence
  Synthetic Polypeptide
MALPVTALLLPLALLLHAARPDIQMTQSPSSLSVSVGDRVTITCKASQNVRTVVAWYQQKPGLAPKTLIYLASNRHTGVPSRFSGSGSGTDFTFTISSLQPEDIATYFCQQHWSYPLTFGQGTKVEVKRLEDLKNVFPPEVAVFEPSEAEISHTQKATLVCLATGFYPDHVELSWWVNGKEVHSGVCTDPQPLKEQPALNDSRYCLSSRLRVSATFWQNPRNHFRCQVQFYGLSENDEWTQDRAKPVTQIVSAEAWGRADCGFTSESYQQGVLSATILYEILLGKATLYAVLVSALVLMAMVKRKDSRGRAKRSGSGATNFSLLKQAGDVEENPGPTSMDWIWRILFLVGAATGAHSFEEVQLLESGGGLVQPGGSLRLSCAASGFAFSTYDMSWVRQAPGKGLEWVATISSGGSYTYYLDSVKGRFTISRDSSKNTLYLQMNSLQAEDSAIYYCAPTTVVPFAYWGQGTLVTVSSTRIQNPDPAVYQLRDSKSSDKSVCLFTDFDSQTNVSQSKDSDVYITDKCVLDMRSMDFKSNSAVAWSNKSDFACANAFNNSIIPEDTFFPSPESSCDVKLVEKSFETDTNLNFQNLSVIGFRILLLKVAGFNLLMTLRLWSSRAKRSGSGVKQTLNFDLLKLAGDVESNPGPSRGGIHTMATYEVLCEVARKLGTDDREVVLFLLNVFIPQPTLAQLIGALRALKEEGRLTFPLLAECLFRAGRRDLLRDLLHLDPRFLERHLAGTMSYFSPYQLTVLHVDGELCARDIRSLIFLSKDTIGSRSTPQTFLHWVYCMENLDLLGPTDVDALMSMLRSLSRVDLQRQVQTLMGLHLSGPSHSQHYRHTP

SEQ ID NO: 20938 - protein, 622 aa, Artificial Sequence
  Synthetic Polypeptide
MALPVTALLLPLALLLHAARPDIQMTQSPSSLSVSVGDRVTITCKASQNVRTVVAWYQQKPGLAPKTLIYLASNRHTGVPSRFSGSGSGTDFTFTISSLQPEDIATYFCQQHWSYPLTFGQGTKVEVKRLEIQNPDPAVYQLRDSKSSDKSVCLFTDFDSQTNVSQSKDSDVYITDKCVLDMRSMDFKSNSAVAWSNKSDFACANAFNNSIIPEDTFFPSPESSCDVKLVEKSFETDTNLNFQNLSVIGFRILLLKVAGFNLLMTLRLWSSRAKRSGSGVKQTLNFDLLKLAGDVESNPGPTSMDWIWRILFLVGAATGAHSFEEVQLLESGGGLVQPGGSLRLSCAASGFAFSTYDMSWVRQAPGKGLEWVATISSGGSYTYYLDSVKGRFTISRDSSKNTLYLQMNSLQAEDSAIYYCAPTTVVPFAYWGQGTLVTVSSTREDLKNVFPPEVAVFEPSEAEISHTQKATLVCLATGFYPDHVELSWWVNGKEVHSGVCTDPQPLKEQPALNDSRYCLSSRLRVSATFWQNPRNHFRCQVQFYGLSENDEWTQDRAKPVTQIVSAEAWGRADCGFTSESYQQGVLSATILYEILLGKATLYAVLVSALVLMAMVKRKDSRG

SEQ ID NO: 20939 - protein, 844 aa, Artificial Sequence
  Synthetic Polypeptide
MALPVTALLLPLALLLHAARPDIQMTQSPSSLSVSVGDRVTITCKASQNVRTVVAWYQQKPGLAPKTLIYLASNRHTGVPSRFSGSGSGTDFTFTISSLQPEDIATYFCQQHWSYPLTFGQGTKVEVKRLEIQNPDPAVYQLRDSKSSDKSVCLFTDFDSQTNVSQSKDSDVYITDKCVLDMRSMDFKSNSAVAWSNKSDFACANAFNNSIIPEDTFFPSPESSCDVKLVEKSFETDTNLNFQNLSVIGFRILLLKVAGFNLLMTLRLWSSRAKRSGSGVKQTLNFDLLKLAGDVESNPGPTSMDWIWRILFLVGAATGAHSFEEVQLLESGGGLVQPGGSLRLSCAASGFAFSTYDMSWVRQAPGKGLEWVATISSGGSYTYYLDSVKGRFTISRDSSKNTLYLQMNSLQAEDSAIYYCAPTTVVPFAYWGQGTLVTVSSTREDLKNVFPPEVAVFEPSEAEISHTQKATLVCLATGFYPDHVELSWWVNGKEVHSGVCTDPQPLKEQPALNDSRYCLSSRLRVSATFWQNPRNHFRCQVQFYGLSENDEWTQDRAKPVTQIVSAEAWGRADCGFTSESYQQGVLSATILYEILLGKATLYAVLVSALVLMAMVKRKDSRGRAKRSGSGATNFSLLKQAGDVEENPGPSRGGIHTMATYEVLCEVARKLGTDDREVVLFLLNVFIPQPTLAQLIGALRALKEEGRLTFPLLAECLFRAGRRDLLRDLLHLDPRFLERHLAGTMSYFSPYQLTVLHVDGELCARDIRSLIFLSKDTIGSRSTPQTFLHWVYCMENLDLLGPTDVDALMSMLRSLSRVDLQRQVQTLMGLHLSGPSHSQHYRHTP

SEQ ID NO: 20940 - protein, 896 aa, Artificial Sequence
  Synthetic Polypeptide
MALPVTALLLPLALLLHAARPLEGKPIPNPLLGLDSTGSGEDLKNVFPPEVAVFEPSKAEIAHTQKATLVCLATGFYPDHVELSWWVNGKEVHSGVCTDPQPLKEQPALNDSRYCLSSRLRVSATFWQNPRNHFRCQVQFYGLSENDEWTQDRAKPVTQIVSAEAWGRADCGITSASYHQGVLSATILYEILLGKATLYAVLVSALVLMAMVKRKDSRGRAKRSGSGATNFSLLKQAGDVEENPGPTSMALPVTALLLPLALLLHAARPDIQMTQSPSSLSVSVGDRVTITCKASQNVRTVVAWYQQKPGLAPKTLIYLASNRHTGVPSRFSGSGSGTDFTFTISSLQPEDIATYFCQQHWSYPLTFGQGTKVEVKRGGGGSGGGGSGGGGSEVQLLESGGGLVQPGGSLRLSCAASGFAFSTYDMSWVRQAPGKGLEWVATISSGGSYTYYLDSVKGRFTISRDSSKNTLYLQMNSLQAEDSAIYYCAPTTVVPFAYWGQGTLVTVSSTREQKLISEEDGSGIQNPDPAVYQLRDSKSSDKSVCLFTDFDSQTNVSQSKDSDVYITDKCVLDMRSMDFKSNSAVAWSNKSDFACANAFNNSIIPEDTFFPSSDVPCDVKLVEKSFETDTNLNFQNLSVIGFRILLLKVAGFNLLMTLRLWSSRAKRSGSGVKQTLNFDLLKLAGDVESNPGPSRGHMTEYKPTVRLATRDDVPRAVRTLAAAFADYPATRHTVDPDRHIERVTELQELFLTRVGLDIGKVWVADDGAAVAVWTTPESVEAGAVFAEIGPRMAELSGSRLAAQQQMEGLLAPHRPKEPAWFLATVGVSPDHQGKGLGSAVVLPGVEAAERAGVPAFLETSAPRNLPFYERLGFTVTADVEVPEGPRTWCMTRKPGA

SEQ ID NO: 20941 - protein, 897 aa, Artificial Sequence
  Synthetic Polypeptide
MALPVTALLLPLALLLHAARPLEQKLISEEDLGSGDRPDPAVYQLRDSKSSDKSVCLFTDFDSQTNVSQSKDSDVYITDKCVLDMRSMDFKSNSAVAWSNKSDFACANAFNNSIIPEDTFFPSPESSCDVKLVEKSFETDTNLNFQNLSVIGFRILLLKVAGFNLLMTLRLWSSSSRAKRSGSGVKQTLNFDLLKLAGDVESNPGPTSMALPVTALLLPLALLLHAARPDIQMTQSPSSLSVSVGDRVTITCKASQNVRTVVAWYQQKPGLAPKTLIYLASNRHTGVPSRFSGSGSGTDFTFTISSLQPEDIATYFCQQHWSYPLTFGQGTKVEVKRGGGGSGGGGSGGGGSEVQLLESGGGLVQPGGSLRLSCAASGFAFSTYDMSWVRQAPGKGLEWVATISSGGSYTYYLDSVKGRFTISRDSSKNTLYLQMNSLQAEDSAIYYCAPTTVVPFAYWGQGTLVTVSSTRGKPIPNPLLGLDSTGSGEDLKNVFPPEVAVFEPSEAEISHTQKATLVCLATGFYPDHVELSWWVNGKEVHSGVCTDPQPLKEQPALNDSRYCLSSRLRVSATFWQNPRNHFRCQVQFYGLSENDEWTQDRAKPVTQIVSAEAWGRADCGFTSESYQQGVLSATILYEILLGKATLYAVLVSALVLMAMVKRKDSRGRAKRSGSGATNFSLLKQAGDVEENPGPSRGHMTEYKPTVRLATRDDVPRAVRTLAAAFADYPATRHTVDPDRHIERVTELQELFLTRVGLDIGKVWVADDGAAVAVWTTPESVEAGAVFAEIGPRMAELSGSRLAAQQQMEGLLAPHRPKEPAWFLATVGVSPDHQGKGLGSAVVLPGVEAAERAGVPAFLETSAPRNLPFYERLGFTVTADVEVPEGPRTWCMTRKPGA

SEQ ID NO: 20942 - protein, 851 aa, Artificial Sequence
  Synthetic Polypeptide
MALPVTALLLPLALLLHAARPDIQMTQSPSSLSVSVGDRVTITCKASQNVRTVVAWYQQKPGLAPKTLIYLASNRHTGVPSRFSGSGSGTDFTFTISSLQPEDIATYFCQQHWSYPLTFGQGTKVEVKRLEDLKNVFPPEVAVFEPSEAEISHTQKATLVCLATGFYPDHVELSWWVNGKEVHSGVSTDPQPLKEQPALNDSRYCLSSRLRVSATFWQNPRNHFRCQVQFYGLSENDEWTQDRAKPVTQIVSAEAWGRADCGFTSESYQQGVLSATILYEILLGKATLYAVLVSALVLMAMVKRKDSRGRAKRSGSGATNFSLLKQAGDVEENPGPTSMDWIWRILFLVGAATGAHSFEEVQLLESGGGLVQPGGSLRLSCAASGFAFSTYDMSWVRQAPGKGLEWVATISSGGSYTYYLDSVKGRFTISRDSSKNTLYLQMNSLQAEDSAIYYCAPTTVVPFAYWGQGTLVTVSSTRIQNPDPAVYQLRDSKSSDKSVCLFTDFDSQTNVSQSKDSDVYITDKTVLDMRSMDFKSNSAVAWSNKSDFACANAFNNSIIPEDTFFPSPESSCDVKLVEKSFETDTNLNFQNLSVIGFRILLLKVAGFNLLMTLRLWSSRAKRSGSGVKQTLNFDLLKLAGDVESNPGPSRGHMTEYKPTVRLATRDDVPRAVRTLAAAFADYPATRHTVDPDRHIERVTELQELFLTRVGLDIGKVWVADDGAAVAVWTTPESVEAGAVFAEIGPRMAELSGSRLAAQQQMEGLLAPHRPKEPAWFLATVGVSPDHQGKGLGSAVVLPGVEAAERAGVPAFLETSAPRNLPFYERLGFTVTADVEVPEGPRTWCMTRKPGA

SEQ ID NO: 20943 - protein, 933 aa, Artificial Sequence
  Synthetic Polypeptide
MALPVTALLLPLALLLHAARPDIQMTQSPSSLSVSVGDRVTITCKASQNVRTVVAWYQQKPGLAPKTLIYLASNRHTGVPSRFSGSGSGTDFTFTISSLQPEDIATYFCQQHWSYPLTFGQGTKVEVKRLEDLKNVFPPEVAVFEPSEAEISHTQKATLVCLATGFYPDHVELSWWVNGKEVHSGVSTDPQPLKEQPALNDSRYCLSSRLRVSATFWQNPRNHFRCQVQFYGLSENDEWTQDRAKPVTQIVSAEAWGRADCGFTSESYQQGVLSATILYEILLGKATLYAVLVSALVLMAMVKRKDSRGRAKRSGSGATNFSLLKQAGDVEENPGPTSMDWIWRILFLVGAATGAHSFEEVQLLESGGGLVQPGGSLRLSCAASGFAFSTYDMSWVRQAPGKGLEWVATISSGGSYTYYLDSVKGRFTISRDSSKNTLYLQMNSLQAEDSAIYYCAPTTVVPFAYWGQGTLVTVSSTREQKLISEEDGSGTPFPSLAPPIMLLVDGKQQMVVVCLVLDVAPPGLDSPIWFSAGNGSALDAFTYGPSPATDGTWTNLAHLSLPSEELASWEPLVCHTGPGAEGHSRSTQPMHLSGEASTARTCPQEPLRGTPGGALWLGVLRLLLFKLLLFDLLLTCSCLCDPAGPLPSPATTTRLRALGSHRLHPATETGGREATSSPRPQPRDRRWGDTPPGRKPGSPVRAKRSGSGVKQTLNFDLLKLAGDVESNPGPSRGHMTEYKPTVRLATRDDVPRAVRTLAAAFADYPATRHTVDPDRHIERVTELQELFLTRVGLDIGKVWVADDGAAVAVWTTPESVEAGAVFAEIGPRMAELSGSRLAAQQQMEGLLAPHRPKEPAWFLATVGVSPDHQGKGLGSAVVLPGVEAAERAGVPAFLETSAPRNLPFYERLGFTVTADVEVPEGPRTWCMTRKPGA

SEQ ID NO: 20944 - protein, 951 aa, Artificial Sequence
  Synthetic Polypeptide
MALPVTALLLPLALLLHAARPLEDLKNVFPPEVAVFEPSEAEISHTQKATLVCLATGFYPDHVELSWWVNGKEVHSGVSTDPQPLKEQPALNDSRYCLSSRLRVSATFWQNPRNHFRCQVQFYGLSENDEWTQDRAKPVTQIVSAEAWGRADCGFTSESYQQGVLSATILYEILLGKATLYAVLVSALVLMAMVKRKDSRGRAKRSGSGATNFSLLKQAGDVEENPGPTSMALPVTALLLPLALLLHAARPDIQMTQSPSSLSVSVGDRVTITCKASQNVRTVVAWYQQKPGLAPKTLIYLASNRHTGVPSRFSGSGSGTDFTFTISSLQPEDIATYFCQQHWSYPLTFGQGTKVEVKRGGGGSGGGGSGGGGSEVQLLESGGGLVQPGGSLRLSCAASGFAFSTYDMSWVRQAPGKGLEWVATISSGGSYTYYLDSVKGRFTISRDSSKNTLYLQMNSLQAEDSAIYYCAPTTVVPFAYWGQGTLVTVSSTREQKLISEEDLGSGTPFPSLAPPIMLLVDGKQQMVVVCLVLDVAPPGLDSPIWFSAGNGSALDAFTYGPSPATDGTWTNLAHLSLPSEELASWEPLVCHTGPGAEGHSRSTQPMHLSGEASTARTCPQEPLRGTPGGALWLGVLRLLLFKLLLFDLLLTCSCLCDPAGPLPSPATTTRLRALGSHRLHPATETGGREATSSPRPQPRDRRWGDTPPGRKPGSPVRAKRSGSGVKQTLNFDLLKLAGDVESNPGPSRSRGHMTEYKPTVRLATRDDVPRAVRTLAAAFADYPATRHTVDPDRHIERVTELQELFLTRVGLDIGKVWVADDGAAVAVWTTPESVEAGAVFAEIGPRMAELSGSRLAAQQQMEGLLAPHRPKEPAWFLATVGVSPDHQGKGLGSAVVLPGVEAAERAGVPAFLETSAPRNLPFYERLGFTVTADVEVPEGPRTWCMTRKPGA

SEQ ID NO: 20945 - protein, 888 aa, Artificial Sequence
  Synthetic Polypeptide
MALPVTALLLPLALLLHAARPDIQMTQSPSSLSVSVGDRVTITCKASQNVRTVVAWYQQKPGLAPKTLIYLASNRHTGVPSRFSGSGSGTDFTFTISSLQPEDIATYFCQQHWSYPLTFGQGTKVEVKRLEGKPIPNPLLGLDSTGSGDKQLDADVSPKPTIFLPSIAETKLQKAGTYLCLLEKFFPDVIKIHWQEKKSNTILGSQEGNTMKTNDTYMKFSWLTVPEKSLDKEHRCIVRHENNKNGVDQEIIFPPIKTDVITMDPKDNCSKDANDTLLLQLTNTSAYYMYLLLLLKSVVYFAIITCCLLRRTAFCCNGEKSRAKRSGSGATNFSLLKQAGDVEENPGPTSMDWIWRILFLVGAATGAHSFEEVQLLESGGGLVQPGGSLRLSCAASGFAFSTYDMSWVRQAPGKGLEWVATISSGGSYTYYLDSVKGRFTISRDSSKNTLYLQMNSLQAEDSAIYYCAPTTVVPFAYWGQGTLVTVSSTREQKLISEEDGSGSQPHTKPSVFVMKNGTNVACLVKEFYPKDIRINLVSSKKITEFDPAIVISPSGKYNAVKLGKYEDSNSVTCSVQHDNKTVHSTDFEVKTDSTDHVKPKETENTKQPSKSCHKPKAIVHTEKVNMMSLTVLGLRMLFAKTVAVNFLLTAKLFFLRAKRSGSGVKQTLNFDLLKLAGDVESNPGPSRGHMTEYKPTVRLATRDDVPRAVRTLAAAFADYPATRHTVDPDRHIERVTELQELFLTRVGLDIGKVWVADDGAAVAVWTTPESVEAGAVFAEIGPRMAELSGSRLAAQQQMEGLLAPHRPKEPAWFLATVGVSPDHQGKGLGSAVVLPGVEAAERAGVPAFLETSAPRNLPFYERLGFTVTADVEVPEGPRTWCMTRKPGA

SEQ ID NO: 20946 - protein, 626 aa, Artificial Sequence
  Synthetic Polypeptide
MALPVTALLLPLALLLHAARPDIQMTQSPSSLSVSVGDRVTITCKASQNVRTVVAWYQQKPGLAPKTLIYLASNRHTGVPSRFSGSGSGTDFTFTISSLQPEDIATYFCQQHWSYPLTFGQGTKVEVKRLESQPHTKPSVFVMKNGTNVACLVKEFYPKDIRINLVSSKKITEFDPAIVISPSGKYNAVKLGKYEDSNSVTCSVQHDNKTVHSTDFEVKTDSTDHVKPKETENTKQPSKSCHKPKAIVHTEKVNMMSLTVLGLRMLFAKTVAVNFLLTAKLFFLRAKRSGSGATNFSLLKQAGDVEENPGPTSMDWIWRILFLVGAATGAHSFEEVQLLESGGGLVQPGGSLRLSCAASGFAFSTYDMSWVRQAPGKGLEWVATISSGGSYTYYLDSVKGRFTISRDSSKNTLYLQMNSLQAEDSAIYYCAPTTVVPFAYWGQGTLVTVSSTRDKQLDADVSPKPTIFLPSIAETKLQKAGTYLCLLEKFFPDVIKIHWQEKKSNTILGSQEGNTMKTNDTYMKFSWLTVPEKSLDKEHRCIVRHENNKNGVDQEIIFPPIKTDVITMDPKDNCSKDANDTLLLQLTNTSAYYMYLLLLLKSVVYFAIITCCLLRRTAFCCNGEKS

SEQ ID NO: 20947 - protein, 903 aa, Artificial Sequence
  Synthetic Polypeptide
MALPVTALLLPLALLLHAARPLEGKPIPNPLLGLDSTGSGDKQLDADVSPKPTIFLPSIAETKLQKAGTYLCLLEKFFPDVIKIHWQEKKSNTILGSQEGNTMKTNDTYMKFSWLTVPEKSLDKEHRCIVRHENNKNGVDQEIIFPPIKTDVITMDPKDNCSKDANDTLLLQLTNTSAYYMYLLLLLKSVVYFAIITCCLLRRTAFCCNGEKSRAKRSGSGATNFSLLKQAGDVEENPGPTSMALPVTALLLPLALLLHAARPDIQMTQSPSSLSVSVGDRVTITCKASQNVRTVVAWYQQKPGLAPKTLIYLASNRHTGVPSRFSGSGSGTDFTFTISSLQPEDIATYFCQQHWSYPLTFGQGTKVEVKRGGGGSGGGGSGGGGSEVQLLESGGGLVQPGGSLRLSCAASGFAFSTYDMSWVRQAPGKGLEWVATISSGGSYTYYLDSVKGRFTISRDSSKNTLYLQMNSLQAEDSAIYYCAPTTVVPFAYWGQGTLVTVSSTREQKLISEEDGSGSQPHTKPSVFVMKNGTNVACLVKEFYPKDIRINLVSSKKITEFDPAIVISPSGKYNAVKLGKYEDSNSVTCSVQHDNKTVHSTDFEVKTDSTDHVKPKETENTKQPSKSCHKPKAIVHTEKVNMMSLTVLGLRMLFAKTVAVNFLLTAKLFFLRAKRSGSGVKQTLNFDLLKLAGDVESNPGPSRGHMTEYKPTVRLATRDDVPRAVRTLAAAFADYPATRHTVDPDRHIERVTELQELFLTRVGLDIGKVWVADDGAAVAVWTTPESVEAGAVFAEIGPRMAELSGSRLAAQQQMEGLLAPHRPKEPAWFLATVGVSPDHQGKGLGSAVVLPGVEAAERAGVPAFLETSAPRNLPFYERLGFTVTADVEVPEGPRTWCMTRKPGA

SEQ ID NO: 20948 - protein, 1028 aa, Artificial Sequence
  Synthetic Polypeptide
MALPVTALLLPLALLLHAARPDIQMTQSPSSLSVSVGDRVTITCKASQNVRTVVAWYQQKPGLAPKTLIYLASNRHTGVPSRFSGSGSGTDFTFTISSLQPEDIATYFCQQHWSYPLTFGQGTKVEVKRGQPKANPTVTLFPPSSEELQANKATLVCLISDFYPGAVTVAWKADGSPVKAGVETTKPSKQSNNKYAASSYLSLTPEQWKSHRSYSCQVTHEGSTVEKTVAPTECSGSQSFGLLDPKLCYLLDGILFIYGVILTALFLRVKFSRSADAPAYQQGQNQLYNELNLGRREEYDVLDKRRGRDPEMGGKPQRRKNPQEGLYNELQKDKMAEAYSEIGMKGERRRGKGHDGLYQGLSTATKDTYDALHMQALPPRRAKRSGSGATNFSLLKQAGDVEENPGPTSMDWIWRILFLVGAATGAHSFEEVQLLESGGGLVQPGGSLRLSCAASGFAFSTYDMSWVRQAPGKGLEWVATISSGGSYTYYLDSVKGRFTISRDSSKNTLYLQMNSLQAEDSAIYYCAPTTVVPFAYWGQGTLVTVSSASTKGPSVFPLAPSSKSTSGGTAALGCLVKDYFPEPVTVSWNSGALTSGVHTFPAVLQSSGLYSLSSVVTVPSSSLGTQTYICNVNHKPSNTKVDKRVEPKSCGTQSFGLLDPKLCYLLDGILFIYGVILTALFLRVKFSRSADAPAYQQGQNQLYNELNLGRREEYDVLDKRRGRDPEMGGKPQRRKNPQEGLYNELQKDKMAEAYSEIGMKGERRRGKGHDGLYQGLSTATKDTYDALHMQALPPRRAKRSGSGVKQTLNFDLLKLAGDVESNPGPSRGHMTEYKPTVRLATRDDVPRAVRTLAAAFADYPATRHTVDPDRHIERVTELQELFLTRVGLDIGKVWVADDGAAVAVWTTPESVEAGAVFAEIGPRMAELSGSRLAAQQQMEGLLAPHRPKEPAWFLATVGVSPDHQGKGLGSAVVLPGVEAAERAGVPAFLETSAPRNLPFYERLGFTVTADVEVPEGPRTWCMTRKPGA

SEQ ID NO: 20949 - protein, 814 aa, Artificial Sequence
  Synthetic Polypeptide
MALPVTALLLPLALLLHAARPDIQMTQSPSSLSVSVGDRVTITCKASQNVRTVVAWYQQKPGLAPKTLIYLASNRHTGVPSRFSGSGSGTDFTFTISSLQPEDIATYFCQQHWSYPLTFGQGTKVEVKRLEDLKNVFPPEVAVFEPSEAEISHTQKATLVCLATGFYPDHVELSWWVNGKEVHSGVSTDPQPLKEQPALNDSRYCLSSRLRVSATFWQNPRNHFRCQVQFYGLSENDEWTQDRAKPVTQIVSAEAWGRADCGSQSFGLLDPKLCYLLDGILFIYGVILTALFLRVKFSRSADAPAYQQGQNQLYNELNLGRREEYDVLDKRRGRDPEMGGKPQRRKNPQEGLYNELQKDKMAEAYSEIGMKGERRRGKGHDGLYQGLSTATKDTYDALHMQALPPRRAKRSGSGATNFSLLKQAGDVEENPGPTSMDWIWRILFLVGAATGAHSFEEVQLLESGGGLVQPGGSLRLSCAASGFAFSTYDMSWVRQAPGKGLEWVATISSGGSYTYYLDSVKGRFTISRDSSKNTLYLQMNSLQAEDSAIYYCAPTTVVPFAYWGQGTLVTVSSTRIQNPDPAVYQLRDSKSSDKSVCLFTDFDSQTNVSQSKDSDVYITDKTVLDMRSMDFKSNSAVAWSNKSDFACANAFNNSIIPEDTFFPSPESSCGTQSFGLLDPKLCYLLDGILFIYGVILTALFLRVKFSRSADAPAYQQGQNQLYNELNLGRREEYDVLDKRRGRDPEMGGKPQRRKNPQEGLYNELQKDKMAEAYSEIGMKGERRRGKGHDGLYQGLSTATKDTYDALHMQALPPR

SEQ ID NO: 20950 - protein, 814 aa, Artificial Sequence
  Synthetic Polypeptide
MALPVTALLLPLALLLHAARPDIQMTQSPSSLSVSVGDRVTITCKASQNVRTVVAWYQQKPGLAPKTLIYLASNRHTGVPSRFSGSGSGTDFTFTISSLQPEDIATYFCQQHWSYPLTFGQGTKVEVKRLEDLKNVFPPEVAVFEPSKAEIAHTQKATLVCLATGFYPDHVELSWWVNGKEVHSGVCTDPQPLKEQPALNDSRYCLSSRLRVSATFWQNPRNHFRCQVQFYGLSENDEWTQDRAKPVTQIVSAEAWGRADCGSQSFGLLDPKLCYLLDGILFIYGVILTALFLRVKFSRSADAPAYQQGQNQLYNELNLGRREEYDVLDKRRGRDPEMGGKPQRRKNPQEGLYNELQKDKMAEAYSEIGMKGERRRGKGHDGLYQGLSTATKDTYDALHMQALPPRRAKRSGSGATNFSLLKQAGDVEENPGPTSMDWIWRILFLVGAATGAHSFEEVQLLESGGGLVQPGGSLRLSCAASGFAFSTYDMSWVRQAPGKGLEWVATISSGGSYTYYLDSVKGRFTISRDSSKNTLYLQMNSLQAEDSAIYYCAPTTVVPFAYWGQGTLVTVSSTRIQNPDPAVYQLRDSKSSDKSVCLFTDFDSQTNVSQSKDSDVYITDKCVLDMRSMDFKSNSAVAWSNKSDFACANAFNNSIIPEDTFFPSSDVPCGTQSFGLLDPKLCYLLDGILFIYGVILTALFLRVKFSRSADAPAYQQGQNQLYNELNLGRREEYDVLDKRRGRDPEMGGKPQRRKNPQEGLYNELQKDKMAEAYSEIGMKGERRRGKGHDGLYQGLSTATKDTYDALHMQALPPR

SEQ ID NO: 20951 - protein, 885 aa, Artificial Sequence
  Synthetic Polypeptide
MALPVTALLLPLALLLHAARPDIQMTQSPSSLSVSVGDRVTITCKASQNVRTVVAWYQQKPGLAPKTLIYLASNRHTGVPSRFSGSGSGTDFTFTISSLQPEDIATYFCQQHWSYPLTFGQGTKVEVKRLEGKPIPNPLLGLDSTGSGEDLKNVFPPEVAVFEPSEAEISHTQKATLVCLATGFYPDHVELSWWVNGKEVHSGVSTDPQPLKEQPALNDSRYCLSSRLRVSATFWQNPRNHFRCQVQFYGLSENDEWTQDRAKPVTQIVSAEAWGRADCGSQSFGLLDPKLCYLLDGILFIYGVILTALFLRVKFSRSADAPAYQQGQNQLYNELNLGRREEYDVLDKRRGRDPEMGGKPQRRKNPQEGLYNELQKDKMAEAYSEIGMKGERRRGKGHDGLYQGLSTATKDTYDALHMQALPPRRAKRSGSGATNFSLLKQAGDVEENPGPTSMDWIWRILFLVGAATGAHSFEEVQLLESGGGLVQPGGSLRLSCAASGFAFSTYDMSWVRQAPGKGLEWVATISSGGSYTYYLDSVKGRFTISRDSSKNTLYLQMNSLQAEDSAIYYCAPTTVVPFAYWGQGTLVTVSSTREQKLISEEDGSGIQNPDPAVYQLRDSKSSDKSVCLFTDFDSQTNVSQSKDSDVYITDKTVLDMRSMDFKSNSAVAWSNKSDFACANAFNNSIIPEDTFFPSPESSCGTQSFGLLDPKLCYLLDGILFIYGVILTALFLRSKRSRLLHSDYMNMTPRRPGPTRKHYQPYAPPRDFAAYRSRVKFSRSADAPAYQQGQNQLYNELNLGRREEYDVLDKRRGRDPEMGGKPQRRKNPQEGLYNELQKDKMAEAYSEIGMKGERRRGKGHDGLYQGLSTATKDTYDALHMQALPPR

SEQ ID NO: 20952 - protein, 926 aa, Artificial Sequence
  Synthetic Polypeptide
MALPVTALLLPLALLLHAARPDIQMTQSPSSLSVSVGDRVTITCKASQNVRTVVAWYQQKPGLAPKTLIYLASNRHTGVPSRFSGSGSGTDFTFTISSLQPEDIATYFCQQHWSYPLTFGQGTKVEVKRLEGKPIPNPLLGLDSTGSGEDLKNVFPPEVAVFEPSEAEISHTQKATLVCLATGFYPDHVELSWWVNGKEVHSGVSTDPQPLKEQPALNDSRYCLSSRLRVSATFWQNPRNHFRCQVQFYGLSENDEWTQDRAKPVTQIVSAEAWGRADCGSQSFGLLDPKLCYLLDGILFIYGVILTALFLRSKRSRLLHSDYMNMTPRRPGPTRKHYQPYAPPRDFAAYRSRVKFSRSADAPAYQQGQNQLYNELNLGRREEYDVLDKRRGRDPEMGGKPQRRKNPQEGLYNELQKDKMAEAYSEIGMKGERRRGKGHDGLYQGLSTATKDTYDALHMQALPPRRAKRSGSGATNFSLLKQAGDVEENPGPTSMDWIWRILFLVGAATGAHSFEEVQLLESGGGLVQPGGSLRLSCAASGFAFSTYDMSWVRQAPGKGLEWVATISSGGSYTYYLDSVKGRFTISRDSSKNTLYLQMNSLQAEDSAIYYCAPTTVVPFAYWGQGTLVTVSSTREQKLISEEDGSGIQNPDPAVYQLRDSKSSDKSVCLFTDFDSQTNVSQSKDSDVYITDKTVLDMRSMDFKSNSAVAWSNKSDFACANAFNNSIIPEDTFFPSPESSCGTQSFGLLDPKLCYLLDGILFIYGVILTALFLRSKRSRLLHSDYMNMTPRRPGPTRKHYQPYAPPRDFAAYRSRVKFSRSADAPAYQQGQNQLYNELNLGRREEYDVLDKRRGRDPEMGGKPQRRKNPQEGLYNELQKDKMAEAYSEIGMKGERRRGKGHDGLYQGLSTATKDTYDALHMQALPPR

SEQ ID NO: 20953 - protein, 887 aa, Artificial Sequence
  Synthetic Polypeptide
MALPVTALLLPLALLLHAARPDIQMTQSPSSLSVSVGDRVTITCKASQNVRTVVAWYQQKPGLAPKTLIYLASNRHTGVPSRFSGSGSGTDFTFTISSLQPEDIATYFCQQHWSYPLTFGQGTKVEVKRLEGKPIPNPLLGLDSTGSGEDLKNVFPPEVAVFEPSEAEISHTQKATLVCLATGFYPDHVELSWWVNGKEVHSGVSTDPQPLKEQPALNDSRYCLSSRLRVSATFWQNPRNHFRCQVQFYGLSENDEWTQDRAKPVTQIVSAEAWGRADCGSQSFGLLDPKLCYLLDGILFIYGVILTALFLRVKFSRSADAPAYQQGQNQLYNELNLGRREEYDVLDKRRGRDPEMGGKPQRRKNPQEGLYNELQKDKMAEAYSEIGMKGERRRGKGHDGLYQGLSTATKDTYDALHMQALPPRRAKRSGSGATNFSLLKQAGDVEENPGPTSMDWIWRILFLVGAATGAHSFEEVQLLESGGGLVQPGGSLRLSCAASGFAFSTYDMSWVRQAPGKGLEWVATISSGGSYTYYLDSVKGRFTISRDSSKNTLYLQMNSLQAEDSAIYYCAPTTVVPFAYWGQGTLVTVSSTREQKLISEEDLGSGIQNPDPAVYQLRDSKSSDKSVCLFTDFDSQTNVSQSKDSDVYITDKTVLDMRSMDFKSNSAVAWSNKSDFACANAFNNSIIPEDTFFPSPESSCGTQSFGLLDPKLCYLLDGILFIYGVILTALFLKRGRKKLLYIFKQPFMRPVQTTQEEDGCSCRFPEEEEGGCELRVKFSRSADAPAYQQGQNQLYNELNLGRREEYDVLDKRRGRDPEMGGKPQRRKNPQEGLYNELQKDKMAEAYSEIGMKGERRRGKGHDGLYQGLSTATKDTYDALHMQALPPR

SEQ ID NO: 20954 - protein, 929 aa, Artificial Sequence
  Synthetic Polypeptide
MALPVTALLLPLALLLHAARPDIQMTQSPSSLSVSVGDRVTITCKASQNVRTVVAWYQQKPGLAPKTLIYLASNRHTGVPSRFSGSGSGTDFTFTISSLQPEDIATYFCQQHWSYPLTFGQGTKVEVKRLEGKPIPNPLLGLDSTGSGEDLKNVFPPEVAVFEPSEAEISHTQKATLVCLATGFYPDHVELSWWVNGKEVHSGVSTDPQPLKEQPALNDSRYCLSSRLRVSATFWQNPRNHFRCQVQFYGLSENDEWTQDRAKPVTQIVSAEAWGRADCGSQSFGLLDPKLCYLLDGILFIYGVILTALFLKRGRKKLLYIFKQPFMRPVQTTQEEDGCSCRFPEEEEGGCELRVKFSRSADAPAYQQGQNQLYNELNLGRREEYDVLDKRRGRDPEMGGKPQRRKNPQEGLYNELQKDKMAEAYSEIGMKGERRRGKGHDGLYQGLSTATKDTYDALHMQALPPRRAKRSGSGATNFSLLKQAGDVEENPGPTSMDWIWRILFLVGAATGAHSFEEVQLLESGGGLVQPGGSLRLSCAASGFAFSTYDMSWVRQAPGKGLEWVATISSGGSYTYYLDSVKGRFTISRDSSKNTLYLQMNSLQAEDSAIYYCAPTTVVPFAYWGQGTLVTVSSTREQKLISEEDLGSGIQNPDPAVYQLRDSKSSDKSVCLFTDFDSQTNVSQSKDSDVYITDKTVLDMRSMDFKSNSAVAWSNKSDFACANAFNNSIIPEDTFFPSPESSCGTQSFGLLDPKLCYLLDGILFIYGVILTALFLKRGRKKLLYIFKQPFMRPVQTTQEEDGCSCRFPEEEEGGCELRVKFSRSADAPAYQQGQNQLYNELNLGRREEYDVLDKRRGRDPEMGGKPQRRKNPQEGLYNELQKDKMAEAYSEIGMKGERRRGKGHDGLYQGLSTATKDTYDALHMQALPPR

SEQ ID NO: 20955 - protein, 819 aa, Artificial Sequence
  Synthetic Polypeptide
MALPVTALLLPLALLLHAARPDIQMTQSPSSLSVSVGDRVTITCKASQNVRTVVAWYQQKPGLAPKTLIYLASNRHTGVPSRFSGSGSGTDFTFTISSLQPEDIATYFCQQHWSYPLTFGQGTKVEVKRLEQSFGLLDPKLCYLLDGILFIYGVILTALFLRVKFSRSADAPAYQQGQNQLYNELNLGRREEYDVLDKRRGRDPEMGGKPQRRKNPQEGLYNELQKDKMAEAYSEIGMKGERRRGKGHDGLYQGLSTATKDTYDALHMQALPPRRAKRSGSGATNFSLLKQAGDVEENPGPTSMDWIWRILFLVGAATGAHSFEEVQLLESGGGLVQPGGSLRLSCAASGFAFSTYDMSWVRQAPGKGLEWVATISSGGSYTYYLDSVKGRFTISRDSSKNTLYLQMNSLQAEDSAIYYCAPTTVVPFAYWGQGTLVTVSSTRQSFGLLDPKLCYLLDGILFIYGVILTALFLRVKFSRSADAPAYQQGQNQLYNELNLGRREEYDVLDKRRGRDPEMGGKPQRRKNPQEGLYNELQKDKMAEAYSEIGMKGERRRGKGHDGLYQGLSTATKDTYDALHMQALPPRRAKRSGSGVKQTLNFDLLKLAGDVESNPGPSRGHMTEYKPTVRLATRDDVPRAVRTLAAAFADYPATRHTVDPDRHIERVTELQELFLTRVGLDIGKVWVADDGAAVAVWTTPESVEAGAVFAEIGPRMAELSGSRLAAQQQMEGLLAPHRPKEPAWFLATVGVSPDHQGKGLGSAVVLPGVEAAERAGVPAFLETSAPRNLPFYERLGFTVTADVEVPEGPRTWCMTRKPGA

SEQ ID NO: 20956 - protein, 644 aa, Artificial Sequence
  Synthetic Polypeptide
MALPVTALLLPLALLLHAARPDIQMTQSPSSLSVSVGDRVTITCKASQNVRTVVAWYQQKPGLAPKTLIYLASNRHTGVPSRFSGSGSGTDFTFTISSLQPEDIATYFCQQHWSYPLTFGQGTKVEVKRLEGQPKANPTVTLFPPSSEELQANKATLVCLISDFYPGAVTVAWKADGSPVKAGVETTKPSKQSNNKYAASSYLSLTPEQWKSHRSYSCQVTHEGSTVEKTVAPTECSPIKTDVITMDPKDNCSKDANDTLLLQLTNTSAYYMYLLLLLKSVVYFAIITCCLLRRTAFCCNGEKSRAKRSGSGATNFSLLKQAGDVEENPGPTSMDWIWRILFLVGAATGAHSFEEVQLLESGGGLVQPGGSLRLSCAASGFAFSTYDMSWVRQAPGKGLEWVATISSGGSYTYYLDSVKGRFTISRDSSKNTLYLQMNSLQAEDSAIYYCAPTTVVPFAYWGQGTLVTVSSTRASTKGPSVFPLAPSSKSTSGGTAALGCLVKDYFPEPVTVSWNSGALTSGVHTFPAVLQSSGLYSLSSVVTVPSSSLGTQTYICNVNHKPSNTKVDKRVEPKSCEVKTDSTDHVKPKETENTKQPSKSCHKPKAIVHTEKVNMMSLTVLGLRMLFAKTVAVNFLLTAKLFFL

SEQ ID NO: 20957 - protein, 622 aa, Artificial Sequence
  Synthetic Polypeptide
MALPVTALLLPLALLLHAARPDIQMTQSPSSLSVSVGDRVTITCKASQNVRTVVAWYQQKPGLAPKTLIYLASNRHTGVPSRFSGSGSGTDFTFTISSLQPEDIATYFCQQHWSYPLTFGQGTKVEVKRLEGQPKANPTVTLFPPSSEELQANKATLVCLISDFYPGAVTVAWKADGSPVKAGVETTKPSKQSNNKYAASSYLSLTPEQWKSHRSYSCQVTHEGSTVEKTVAPTECSGRADCGITSASYHQGVLSATILYEILLGKATLYAVLVSALVLMAMVKRKDSRGRAKRSGSGATNFSLLKQAGDVEENPGPTSMDWIWRILFLVGAATGAHSFEEVQLLESGGGLVQPGGSLRLSCAASGFAFSTYDMSWVRQAPGKGLEWVATISSGGSYTYYLDSVKGRFTISRDSSKNTLYLQMNSLQAEDSAIYYCAPTTVVPFAYWGQGTLVTVSSTRASTKGPSVFPLAPSSKSTSGGTAALGCLVKDYFPEPVTVSWNSGALTSGVHTFPAVLQSSGLYSLSSVVTVPSSSLGTQTYICNVNHKPSNTKVDKRVEPKSCIPEDTFFPSSDVPCDVKLVEKSFETDTNLNFQNLSVIGFRILLLKVAGFNLLMTLRLWSS

SEQ ID NO: 20958 - protein, 622 aa, Artificial Sequence
  Synthetic Polypeptide
MALPVTALLLPLALLLHAARPDIQMTQSPSSLSVSVGDRVTITCKASQNVRTVVAWYQQKPGLAPKTLIYLASNRHTGVPSRFSGSGSGTDFTFTISSLQPEDIATYFCQQHWSYPLTFGQGTKVEVKRLEGQPKANPTVTLFPPSSEELQANKATLVCLISDFYPGAVTVAWKADGSPVKAGVETTKPSKQSNNKYAASSYLSLTPEQWKSHRSYSCQVTHEGSTVEKTVAPTECSGRADCGFTSESYQQGVLSATILYEILLGKATLYAVLVSALVLMAMVKRKDSRGRAKRSGSGATNFSLLKQAGDVEENPGPTSMDWIWRILFLVGAATGAHSFEEVQLLESGGGLVQPGGSLRLSCAASGFAFSTYDMSWVRQAPGKGLEWVATISSGGSYTYYLDSVKGRFTISRDSSKNTLYLQMNSLQAEDSAIYYCAPTTVVPFAYWGQGTLVTVSSTRASTKGPSVFPLAPSSKSTSGGTAALGCLVKDYFPEPVTVSWNSGALTSGVHTFPAVLQSSGLYSLSSVVTVPSSSLGTQTYICNVNHKPSNTKVDKRVEPKSCIPEDTFFPSPESSCDVKLVEKSFETDTNLNFQNLSVIGFRILLLKVAGFNLLMTLRLWSS

SEQ ID NO: 20959 - protein, 448 aa, Artificial Sequence
  Synthetic Polypeptide
MALPVTALLLPLALLLHAARPDIQMTQSPSSLSVSVGDRVTITCKASQNVRTVVAWYQQKPGLAPKTLIYLASNRHTGVPSRFSGSGSGTDFTFTISSLQPEDIATYFCQQHWSYPLTFGQGTKVEVKRGGGGSGGGGSGGGGSEVQLLESGGGLVQPGGSLRLSCAASGFAFSTYDMSWVRQAPGKGLEWVATISSGGSYTYYLDSVKGRFTISRDSSKNTLYLQMNSLQAEDSAIYYCAPTTVVPFAYWGQGTLVTVSSTRDGNEEMGGITQTPYKVSISGTTVILTCPQYPGSEILWQHNDKNIGGDEDDKNIGSDEDHLSLKEFSELEQSGYYVCYPRGSKPEDANFYLYLRARVCENCMEMDVMSVATIVIVDICITGGLLLLVYYWSKNRKAKAKPVTRGAGAGGRQRGQNKERPPPVPNPDYEPIRKGQRDLYSGLNQRRI

SEQ ID NO: 20960 - protein, 413 aa, Artificial Sequence
  Synthetic Polypeptide
MALPVTALLLPLALLLHAARPDIQMTQSPSSLSVSVGDRVTITCKASQNVRTVVAWYQQKPGLAPKTLIYLASNRHTGVPSRFSGSGSGTDFTFTISSLQPEDIATYFCQQHWSYPLTFGQGTKVEVKRGGGGSGGGGSGGGGSEVQLLESGGGLVQPGGSLRLSCAASGFAFSTYDMSWVRQAPGKGLEWVATISSGGSYTYYLDSVKGRFTISRDSSKNTLYLQMNSLQAEDSAIYYCAPTTVVPFAYWGQGTLVTVSSTRFKIPIEELEDRVFVNCNTSITWVEGTVGTLLSDITRLDLGKRILDPRGIYRCNGTDIYKDKESTVQVHYRMCQSCVELDPATVAGIIVTDVIATLLLALGVFCFAGHETGRLSGAADTQALLRNDQVYQPLRDRDDAQYSHLGGNWARNK

SEQ ID NO: 20961 - protein, 423 aa, Artificial Sequence
  Synthetic Polypeptide
MALPVTALLLPLALLLHAARPDIQMTQSPSSLSVSVGDRVTITCKASQNVRTVVAWYQQKPGLAPKTLIYLASNRHTGVPSRFSGSGSGTDFTFTISSLQPEDIATYFCQQHWSYPLTFGQGTKVEVKRGGGGSGGGGSGGGGSEVQLLESGGGLVQPGGSLRLSCAASGFAFSTYDMSWVRQAPGKGLEWVATISSGGSYTYYLDSVKGRFTISRDSSKNTLYLQMNSLQAEDSAIYYCAPTTVVPFAYWGQGTLVTVSSTRQSIKGNHLVKVYDYQEDGSVLLTCDAEAKNITWFKDGKMIGFLTEDKKKWNLGSNAKDPRGMYQCKGSQNKSKPLQVYYRMCQNCIELNAATISGFLFAEIVSIFVLAVGVYFIAGQDGVRQSRASDKQTLLPNDQLYQPLKDREDDQYSHLQGNQLRRN

SEQ ID NO: 20962 - protein, 406 aa, Artificial Sequence
  Synthetic Polypeptide
MALPVTALLLPLALLLHAARPDIQMTQSPSSLSVSVGDRVTITCKASQNVRTVVAWYQQKPGLAPKTLIYLASNRHTGVPSRFSGSGSGTDFTFTISSLQPEDIATYFCQQHWSYPLTFGQGTKVEVKRGGGGSGGGGSGGGGSEVQLLESGGGLVQPGGSLRLSCAASGFAFSTYDMSWVRQAPGKGLEWVATISSGGSYTYYLDSVKGRFTISRDSSKNTLYLQMNSLQAEDSAIYYCAPTTVVPFAYWGQGTLVTVSSTRQSFGLLDPKLCYLLDGILFIYGVILTALFLRVKFSRSADAPAYQQGQNQLYNELNLGRREEYDVLDKRRGRDPEMGGKPQRRKNPQEGLYNELQKDKMAEAYSEIGMKGERRRGKGHDGLYQGLSTATKDTYDALHMQALPPR

SEQ ID NO: 20963 - protein, 448 aa, Artificial Sequence
  Synthetic Polypeptide
MALPVTALLLPLALLLHAARPEVQLLESGGGLVQPGGSLRLSCAASGFAFSTYDMSWVRQAPGKGLEWVATISSGGSYTYYLDSVKGRFTISRDSSKNTLYLQMNSLQAEDSAIYYCAPTTVVPFAYWGQGTLVTVSSGGGGSGGGGSGGGGSDIQMTQSPSSLSVSVGDRVTITCKASQNVRTVVAWYQQKPGLAPKTLIYLASNRHTGVPSRFSGSGSGTDFTFTISSLQPEDIATYFCQQHWSYPLTFGQGTKVEVKRTRDGNEEMGGITQTPYKVSISGTTVILTCPQYPGSEILWQHNDKNIGGDEDDKNIGSDEDHLSLKEFSELEQSGYYVCYPRGSKPEDANFYLYLRARVCENCMEMDVMSVATIVIVDICITGGLLLLVYYWSKNRKAKAKPVTRGAGAGGRQRGQNKERPPPVPNPDYEPIRKGQRDLYSGLNQRRI

SEQ ID NO: 20964 - protein, 413 aa, Artificial Sequence
  Synthetic Polypeptide
MALPVTALLLPLALLLHAARPEVQLLESGGGLVQPGGSLRLSCAASGFAFSTYDMSWVRQAPGKGLEWVATISSGGSYTYYLDSVKGRFTISRDSSKNTLYLQMNSLQAEDSAIYYCAPTTVVPFAYWGQGTLVTVSSGGGGSGGGGSGGGGSDIQMTQSPSSLSVSVGDRVTITCKASQNVRTVVAWYQQKPGLAPKTLIYLASNRHTGVPSRFSGSGSGTDFTFTISSLQPEDIATYFCQQHWSYPLTFGQGTKVEVKRTRFKIPIEELEDRVFVNCNTSITWVEGTVGTLLSDITRLDLGKRILDPRGIYRCNGTDIYKDKESTVQVHYRMCQSCVELDPATVAGIIVTDVIATLLLALGVFCFAGHETGRLSGAADTQALLRNDQVYQPLRDRDDAQYSHLGGNWARNK

SEQ ID NO: 20965 - protein, 423 aa, Artificial Sequence
  Synthetic Polypeptide
MALPVTALLLPLALLLHAARPEVQLLESGGGLVQPGGSLRLSCAASGFAFSTYDMSWVRQAPGKGLEWVATISSGGSYTYYLDSVKGRFTISRDSSKNTLYLQMNSLQAEDSAIYYCAPTTVVPFAYWGQGTLVTVSSGGGGSGGGGSGGGGSDIQMTQSPSSLSVSVGDRVTITCKASQNVRTVVAWYQQKPGLAPKTLIYLASNRHTGVPSRFSGSGSGTDFTFTISSLQPEDIATYFCQQHWSYPLTFGQGTKVEVKRTRQSIKGNHLVKVYDYQEDGSVLLTCDAEAKNITWFKDGKMIGFLTEDKKKWNLGSNAKDPRGMYQCKGSQNKSKPLQVYYRMCQNCIELNAATISGFLFAEIVSIFVLAVGVYFIAGQDGVRQSRASDKQTLLPNDQLYQPLKDREDDQYSHLQGNQLRRN

SEQ ID NO: 20966 - protein, 406 aa, Artificial Sequence
  Synthetic Polypeptide
MALPVTALLLPLALLLHAARPEVQLLESGGGLVQPGGSLRLSCAASGFAFSTYDMSWVRQAPGKGLEWVATISSGGSYTYYLDSVKGRFTISRDSSKNTLYLQMNSLQAEDSAIYYCAPTTVVPFAYWGQGTLVTVSSGGGGSGGGGSGGGGSDIQMTQSPSSLSVSVGDRVTITCKASQNVRTVVAWYQQKPGLAPKTLIYLASNRHTGVPSRFSGSGSGTDFTFTISSLQPEDIATYFCQQHWSYPLTFGQGTKVEVKRTRQSFGLLDPKLCYLLDGILFIYGVILTALFLRVKFSRSADAPAYQQGQNQLYNELNLGRREEYDVLDKRRGRDPEMGGKPQRRKNPQEGLYNELQKDKMAEAYSEIGMKGERRRGKGHDGLYQGLSTATKDTYDALHMQALPPR

SEQ ID NO: 20967 - protein, 639 aa, Artificial Sequence
  Synthetic Polypeptide
MALPVTALLLPLALLLHAARPDIQMTQSPSSLSVSVGDRVTITCKASQNVRTVVAWYQQKPGLAPKTLIYLASNRHTGVPSRFSGSGSGTDFTFTISSLQPEDIATYFCQQHWSYPLTFGQGTKVEVKRGGGGSGGGGSGGGGSEVQLLESGGGLVQPGGSLRLSCAASGFAFSTYDMSWVRQAPGKGLEWVATISSGGSYTYYLDSVKGRFTISRDSSKNTLYLQMNSLQAEDSAIYYCAPTTVVPFAYWGQGTLVTVSSTRGSGIQNPDPAVYQLRDSKSSDKSVCLFTDFDSQTNVSQSKDSDVYITDKTVLDMRSMDFKSNSAVAWSNKSDFACANAFNNSIIPEDTFFPSPESSCDVKLVEKSFETDTNLNFQNLSVIGFRILLLKVAGFNLLMTLRLWSSRAKRSGSGVKQTLNFDLLKLAGDVESNPGPSRGHMTEYKPTVRLATRDDVPRAVRTLAAAFADYPATRHTVDPDRHIERVTELQELFLTRVGLDIGKVWVADDGAAVAVWTTPESVEAGAVFAEIGPRMAELSGSRLAAQQQMEGLLAPHRPKEPAWFLATVGVSPDHQGKGLGSAVVLPGVEAAERAGVPAFLETSAPRNLPFYERLGFTVTADVEVPEGPRTWCMTRKPGA

SEQ ID NO: 20968 - protein, 671 aa, Artificial Sequence
  Synthetic Polypeptide
MALPVTALLLPLALLLHAARPDIQMTQSPSSLSVSVGDRVTITCKASQNVRTVVAWYQQKPGLAPKTLIYLASNRHTGVPSRFSGSGSGTDFTFTISSLQPEDIATYFCQQHWSYPLTFGQGTKVEVKRGGGGSGGGGSGGGGSEVQLLESGGGLVQPGGSLRLSCAASGFAFSTYDMSWVRQAPGKGLEWVATISSGGSYTYYLDSVKGRFTISRDSSKNTLYLQMNSLQAEDSAIYYCAPTTVVPFAYWGQGTLVTVSSLEDLKNVFPPEVAVFEPSEAEISHTQKATLVCLATGFYPDHVELSWWVNGKEVHSGVSTDPQPLKEQPALNDSRYCLSSRLRVSATFWQNPRNHFRCQVQFYGLSENDEWTQDRAKPVTQIVSAEAWGRADCGFTSESYQQGVLSATILYEILLGKATLYAVLVSALVLMAMVKRKDSRGRAKRSGSGATNFSLLKQAGDVEENPGPTRGHMTEYKPTVRLATRDDVPRAVRTLAAAFADYPATRHTVDPDRHIERVTELQELFLTRVGLDIGKVWVADDGAAVAVWTTPESVEAGAVFAEIGPRMAELSGSRLAAQQQMEGLLAPHRPKEPAWFLATVGVSPDHQGKGLGSAVVLPGVEAAERAGVPAFLETSAPRNLPFYERLGFTVTADVEVPEGPRTWCMTRKPGA

SEQ ID NO: 20969 - protein, 721 aa, Artificial Sequence
  Synthetic Polypeptide
MALPVTALLLPLALLLHAARPDIQMTQSPSSLSVSVGDRVTITCKASQNVRTVVAWYQQKPGLAPKTLIYLASNRHTGVPSRFSGSGSGTDFTFTISSLQPEDIATYFCQQHWSYPLTFGQGTKVEVKRGGGGSGGGGSGGGGSEVQLLESGGGLVQPGGSLRLSCAASGFAFSTYDMSWVRQAPGKGLEWVATISSGGSYTYYLDSVKGRFTISRDSSKNTLYLQMNSLQAEDSAIYYCAPTTVVPFAYWGQGTLVTVSSTREQKLISEEDLGSGTPFPSLAPPIMLLVDGKQQMVVVCLVLDVAPPGLDSPIWFSAGNGSALDAFTYGPSPATDGTWTNLAHLSLPSEELASWEPLVCHTGPGAEGHSRSTQPMHLSGEASTARTCPQEPLRGTPGGALWLGVLRLLLFKLLLFDLLLTCSCLCDPAGPLPSPATTTRLRALGSHRLHPATETGGREATSSPRPQPRDRRWGDTPPGRKPGSPVRAKRSGSGVKQTLNFDLLKLAGDVESNPGPSRSRGHMTEYKPTVRLATRDDVPRAVRTLAAAFADYPATRHTVDPDRHIERVTELQELFLTRVGLDIGKVWVADDGAAVAVWTTPESVEAGAVFAEIGPRMAELSGSRLAAQQQMEGLLAPHRPKEPAWFLATVGVSPDHQGKGLGSAVVLPGVEAAERAGVPAFLETSAPRNLPFYERLGFTVTADVEVPEGPRTWCMTRKPGA

SEQ ID NO: 20970 - protein, 539 aa, Artificial Sequence
  Synthetic Polypeptide
MALPVTALLLPLALLLHAARPDIQMTQSPSSLSVSVGDRVTITCKASQNVRTVVAWYQQKPGLAPKTLIYLASNRHTGVPSRFSGSGSGTDFTFTISSLQPEDIATYFCQQHWSYPLTFGQGTKVEVKRLEDLKNVFPPEVAVFEPSEAEISHTQKATLVCLATGFYPDHVELSWWVNGKEVHSGVSTDPQPLKEQPALNDSRYCLSSRLRVSATFWQNPRNHFRCQVQFYGLSENDEWTQDRAKPVTQIVSAEAWGRADCGFTSESYQQGVLSATILYEILLGKATLYAVLVSALVLMAMVKRKDSRGRAKRSGSGATNFSLLKQAGDVEENPGPTRGHMTEYKPTVRLATRDDVPRAVRTLAAAFADYPATRHTVDPDRHIERVTELQELFLTRVGLDIGKVWVADDGAAVAVWTTPESVEAGAVFAEIGPRMAELSGSRLAAQQQMEGLLAPHRPKEPAWFLATVGVSPDHQGKGLGSAVVLPGVEAAERAGVPAFLETSAPRNLPFYERLGFTVTADVEVPEGPRTWCMTRKPGA

SEQ ID NO: 20971 - protein, 309 aa, Artificial Sequence
  Synthetic Polypeptide
MALPVTALLLPLALLLHAARPDIQMTQSPSSLSVSVGDRVTITCKASQNVRTVVAWYQQKPGLAPKTLIYLASNRHTGVPSRFSGSGSGTDFTFTISSLQPEDIATYFCQQHWSYPLTFGQGTKVEVKRLEDLKNVFPPEVAVFEPSEAEISHTQKATLVCLATGFYPDHVELSWWVNGKEVHSGVSTDPQPLKEQPALNDSRYCLSSRLRVSATFWQNPRNHFRCQVQFYGLSENDEWTQDRAKPVTQIVSAEAWGRADCGFTSESYQQGVLSATILYEILLGKATLYAVLVSALVLMAMVKRKDSRG

SEQ ID NO: 20972 - protein, 446 aa, Artificial Sequence
  Synthetic Polypeptide
MDWIWRILFLVGAATGAHSFEEVQLLESGGGLVQPGGSLRLSCAASGFAFSTYDMSWVRQAPGKGLEWVATISSGGSYTYYLDSVKGRFTISRDSSKNTLYLQMNSLQAEDSAIYYCAPTTVVPFAYWGQGTLVTVSSTRIQNPDPAVYQLRDSKSSDKSVCLFTDFDSQTNVSQSKDSDVYITDKTVLDMRSMDFKSNSAVAWSNKSDFACANAFNNSIIPEDTFFPSPESSCDVKLVEKSFETDTNLNFQNLSVIGFRILLLKVAGFNLLMTLRLWSSRAKRSGSGVKQTLNFDLLKLAGDVESNPGPSRGHMAKPLSQEESTLIERATATINSIPISEDYSVASAALSSDGRIFTGVNVYHFTGGPCAELVVLGTAAAAAAGNLTCIVAIGNENRGILSPCGRCRQVLLDLHPGIKAIVKDSDGQPTAVGIRELLPSGYVWEG

SEQ ID NO: 20973 - protein, 280 aa, Artificial Sequence
  Synthetic Polypeptide
MDWIWRILFLVGAATGAHSFEEVQLLESGGGLVQPGGSLRLSCAASGFAFSTYDMSWVRQAPGKGLEWVATISSGGSYTYYLDSVKGRFTISRDSSKNTLYLQMNSLQAEDSAIYYCAPTTVVPFAYWGQGTLVTVSSTRIQNPDPAVYQLRDSKSSDKSVCLFTDFDSQTNVSQSKDSDVYITDKTVLDMRSMDFKSNSAVAWSNKSDFACANAFNNSIIPEDTFFPSPESSCDVKLVEKSFETDTNLNFQNLSVIGFRILLLKVAGFNLLMTLRLWSS

SEQ ID NO: 20974 - protein, 557 aa, Artificial Sequence
  Synthetic Polypeptide
MALPVTALLLPLALLLHAARPDIQMTQSPSSLSVSVGDRVTITCKASQNVRTVVAWYQQKPGLAPKTLIYLASNRHTGVPSRFSGSGSGTDFTFTISSLQPEDIATYFCQQHWSYPLTFGQGTKVEVKRLEGKPIPNPLLGLDSTGSGEDLKNVFPPEVAVFEPSEAEISHTQKATLVCLATGFYPDHVELSWWVNGKEVHSGVCTDPQPLKEQPALNDSRYCLSSRLRVSATFWQNPRNHFRCQVQFYGLSENDEWTQDRAKPVTQIVSAEAWGRADCGFTSESYQQGVLSATILYEILLGKATLYAVLVSALVLMAMVKRKDSRGRAKRSGSGATNFSLLKQAGDVEENPGPTRGHMTEYKPTVRLATRDDVPRAVRTLAAAFADYPATRHTVDPDRHIERVTELQELFLTRVGLDIGKVWVADDGAAVAVWTTPESVEAGAVFAEIGPRMAELSGSRLAAQQQMEGLLAPHRPKEPAWFLATVGVSPDHQGKGLGSAVVLPGVEAAERAGVPAFLETSAPRNLPFYERLGFTVTADVEVPEGPRTWCMTRKPGA

SEQ ID NO: 20975 - protein, 327 aa, Artificial Sequence
  Synthetic Polypeptide
MALPVTALLLPLALLLHAARPDIQMTQSPSSLSVSVGDRVTITCKASQNVRTVVAWYQQKPGLAPKTLIYLASNRHTGVPSRFSGSGSGTDFTFTISSLQPEDIATYFCQQHWSYPLTFGQGTKVEVKRLEGKPIPNPLLGLDSTGSGEDLKNVFPPEVAVFEPSEAEISHTQKATLVCLATGFYPDHVELSWWVNGKEVHSGVCTDPQPLKEQPALNDSRYCLSSRLRVSATFWQNPRNHFRCQVQFYGLSENDEWTQDRAKPVTQIVSAEAWGRADCGFTSESYQQGVLSATILYEILLGKATLYAVLVSALVLMAMVKRKDSRG

SEQ ID NO: 20976 - protein, 458 aa, Artificial Sequence
  Synthetic Polypeptide
MDWIWRILFLVGAATGAHSFEEVQLLESGGGLVQPGGSLRLSCAASGFAFSTYDMSWVRQAPGKGLEWVATISSGGSYTYYLDSVKGRFTISRDSSKNTLYLQMNSLQAEDSAIYYCAPTTVVPFAYWGQGTLVTVSSTREQKLISEEDGSGIQNPDPAVYQLRDSKSSDKSVCLFTDFDSQTNVSQSKDSDVYITDKCVLDMRSMDFKSNSAVAWSNKSDFACANAFNNSIIPEDTFFPSPESSCDVKLVEKSFETDTNLNFQNLSVIGFRILLLKVAGFNLLMTLRLWSSRAKRSGSGVKQTLNFDLLKLAGDVESNPGPSRGHMAKPLSQEESTLIERATATINSIPISEDYSVASAALSSDGRIFTGVNVYHFTGGPCAELVVLGTAAAAAAGNLTCIVAIGNENRGILSPCGRCRQVLLDLHPGIKAIVKDSDGQPTAVGIRELLPSGYVWEG

SEQ ID NO: 20977 - protein, 292 aa, Artificial Sequence
  Synthetic Polypeptide
MDWIWRILFLVGAATGAHSFEEVQLLESGGGLVQPGGSLRLSCAASGFAFSTYDMSWVRQAPGKGLEWVATISSGGSYTYYLDSVKGRFTISRDSSKNTLYLQMNSLQAEDSAIYYCAPTTVVPFAYWGQGTLVTVSSTREQKLISEEDGSGIQNPDPAVYQLRDSKSSDKSVCLFTDFDSQTNVSQSKDSDVYITDKCVLDMRSMDFKSNSAVAWSNKSDFACANAFNNSIIPEDTFFPSPESSCDVKLVEKSFETDTNLNFQNLSVIGFRILLLKVAGFNLLMTLRLWSS

SEQ ID NO: 20978 - protein, 639 aa, Artificial Sequence
  Synthetic Polypeptide
MALPVTALLLPLALLLHAARPDIQMTQSPSSLSVSVGDRVTITCKASQNVRTVVAWYQQKPGLAPKTLIYLASNRHTGVPSRFSGSGSGTDFTFTISSLQPEDIATYFCQQHWSYPLTFGQGTKVEVKRGGGGSGGGGSGGGGSEVQLLESGGGLVQPGGSLRLSCAASGFAFSTYDMSWVRQAPGKGLEWVATISSGGSYTYYLDSVKGRFTISRDSSKNTLYLQMNSLQAEDSAIYYCAPTTVVPFAYWGQGTLVTVSSTRGSGIQNPDPAVYQLRDSKSSDKSVCLFTDFDSQTNVSQSKDSDVYITDKTVLDMRSMDFKSNSAVAWSNKSDFACANAFNNSIIPEDTFFPSSDVPCDVKLVEKSFETDTNLNFQNLSVIGFRILLLKVAGFNLLMTLRLWSSRAKRSGSGVKQTLNFDLLKLAGDVESNPGPSRGHMTEYKPTVRLATRDDVPRAVRTLAAAFADYPATRHTVDPDRHIERVTELQELFLTRVGLDIGKVWVADDGAAVAVWTTPESVEAGAVFAEIGPRMAELSGSRLAAQQQMEGLLAPHRPKEPAWFLATVGVSPDHQGKGLGSAVVLPGVEAAERAGVPAFLETSAPRNLPFYERLGFTVTADVEVPEGPRTWCMTRKPGA

SEQ ID NO: 20979 - protein, 671 aa, Artificial Sequence
  Synthetic Polypeptide
MALPVTALLLPLALLLHAARPDIQMTQSPSSLSVSVGDRVTITCKASQNVRTVVAWYQQKPGLAPKTLIYLASNRHTGVPSRFSGSGSGTDFTFTISSLQPEDIATYFCQQHWSYPLTFGQGTKVEVKRGGGGSGGGGSGGGGSEVQLLESGGGLVQPGGSLRLSCAASGFAFSTYDMSWVRQAPGKGLEWVATISSGGSYTYYLDSVKGRFTISRDSSKNTLYLQMNSLQAEDSAIYYCAPTTVVPFAYWGQGTLVTVSSLEDLKNVFPPEVAVFEPSKAEIAHTQKATLVCLATGFYPDHVELSWWVNGKEVHSGVSTDPQPLKEQPALNDSRYCLSSRLRVSATFWQNPRNHFRCQVQFYGLSENDEWTQDRAKPVTQIVSAEAWGRADCGITSASYHQGVLSATILYEILLGKATLYAVLVSALVLMAMVKRKDSRGRAKRSGSGATNFSLLKQAGDVEENPGPTRGHMTEYKPTVRLATRDDVPRAVRTLAAAFADYPATRHTVDPDRHIERVTELQELFLTRVGLDIGKVWVADDGAAVAVWTTPESVEAGAVFAEIGPRMAELSGSRLAAQQQMEGLLAPHRPKEPAWFLATVGVSPDHQGKGLGSAVVLPGVEAAERAGVPAFLETSAPRNLPFYERLGFTVTADVEVPEGPRTWCMTRKPGA

SEQ ID NO: 20980 - protein, 694 aa, Artificial Sequence
  Synthetic Polypeptide
MALPVTALLLPLALLLHAARPDIQMTQSPSSLSVSVGDRVTITCKASQNVRTVVAWYQQKPGLAPKTLIYLASNRHTGVPSRFSGSGSGTDFTFTISSLQPEDIATYFCQQHWSYPLTFGQGTKVEVKRGGGGSGGGGSGGGGSEVQLLESGGGLVQPGGSLRLSCAASGFAFSTYDMSWVRQAPGKGLEWVATISSGGSYTYYLDSVKGRFTISRDSSKNTLYLQMNSLQAEDSAIYYCAPTTVVPFAYWGQGTLVTVSSTRGSGGGGSGGGGSGDGNEEMGGITQTPYKVSISGTTVILTCPQYPGSEILWQHNDKNIGGDEDDKNIGSDEDHLSLKEFSELEQSGYYVCYPRGSKPEDANFYLYLRARVCENCMEMDVMSVATIVIVDICITGGLLLLVYYWSKNRKAKAKPVTRGAGAGGRQRGQNKERPPPVPNPDYEPIRKGQRDLYSGLNQRRIRAKRSGSGVKQTLNFDLLKLAGDVESNPGPSRGHMTEYKPTVRLATRDDVPRAVRTLAAAFADYPATRHTVDPDRHIERVTELQELFLTRVGLDIGKVWVADDGAAVAVWTTPESVEAGAVFAEIGPRMAELSGSRLAAQQQMEGLLAPHRPKEPAWFLATVGVSPDHQGKGLGSAVVLPGVEAAERAGVPAFLETSAPRNLPFYERLGFTVTADVEVPEGPRTWCMTRKPGA

SEQ ID NO: 20981 - protein, 659 aa, Artificial Sequence
  Synthetic Polypeptide
MALPVTALLLPLALLLHAARPDIQMTQSPSSLSVSVGDRVTITCKASQNVRTVVAWYQQKPGLAPKTLIYLASNRHTGVPSRFSGSGSGTDFTFTISSLQPEDIATYFCQQHWSYPLTFGQGTKVEVKRGGGGSGGGGSGGGGSEVQLLESGGGLVQPGGSLRLSCAASGFAFSTYDMSWVRQAPGKGLEWVATISSGGSYTYYLDSVKGRFTISRDSSKNTLYLQMNSLQAEDSAIYYCAPTTVVPFAYWGQGTLVTVSSTRGSGGGGSGGGGSGFKIPIEELEDRVFVNCNTSITWVEGTVGTLLSDITRLDLGKRILDPRGIYRCNGTDIYKDKESTVQVHYRMCQSCVELDPATVAGIIVTDVIATLLLALGVFCFAGHETGRLSGAADTQALLRNDQVYQPLRDRDDAQYSHLGGNWARNKRAKRSGSGVKQTLNFDLLKLAGDVESNPGPSRGHMTEYKPTVRLATRDDVPRAVRTLAAAFADYPATRHTVDPDRHIERVTELQELFLTRVGLDIGKVWVADDGAAVAVWTTPESVEAGAVFAEIGPRMAELSGSRLAAQQQMEGLLAPHRPKEPAWFLATVGVSPDHQGKGLGSAVVLPGVEAAERAGVPAFLETSAPRNLPFYERLGFTVTADVEVPEGPRTWCMTRKPGA

SEQ ID NO: 20982 - protein, 669 aa, Artificial Sequence
  Synthetic Polypeptide
MALPVTALLLPLALLLHAARPDIQMTQSPSSLSVSVGDRVTITCKASQNVRTVVAWYQQKPGLAPKTLIYLASNRHTGVPSRFSGSGSGTDFTFTISSLQPEDIATYFCQQHWSYPLTFGQGTKVEVKRGGGGSGGGGSGGGGSEVQLLESGGGLVQPGGSLRLSCAASGFAFSTYDMSWVRQAPGKGLEWVATISSGGSYTYYLDSVKGRFTISRDSSKNTLYLQMNSLQAEDSAIYYCAPTTVVPFAYWGQGTLVTVSSTRGSGGGGSGGGGSGQSIKGNHLVKVYDYQEDGSVLLTCDAEAKNITWFKDGKMIGFLTEDKKKWNLGSNAKDPRGMYQCKGSQNKSKPLQVYYRMCQNCIELNAATISGFLFAEIVSIFVLAVGVYFIAGQDGVRQSRASDKQTLLPNDQLYQPLKDREDDQYSHLQGNQLRRNRAKRSGSGVKQTLNFDLLKLAGDVESNPGPSRGHMTEYKPTVRLATRDDVPRAVRTLAAAFADYPATRHTVDPDRHIERVTELQELFLTRVGLDIGKVWVADDGAAVAVWTTPESVEAGAVFAEIGPRMAELSGSRLAAQQQMEGLLAPHRPKEPAWFLATVGVSPDHQGKGLGSAVVLPGVEAAERAGVPAFLETSAPRNLPFYERLGFTVTADVEVPEGPRTWCMTRKPGA

SEQ ID NO: 20983 - protein, 652 aa, Artificial Sequence
  Synthetic Polypeptide
MALPVTALLLPLALLLHAARPDIQMTQSPSSLSVSVGDRVTITCKASQNVRTVVAWYQQKPGLAPKTLIYLASNRHTGVPSRFSGSGSGTDFTFTISSLQPEDIATYFCQQHWSYPLTFGQGTKVEVKRGGGGSGGGGSGGGGSEVQLLESGGGLVQPGGSLRLSCAASGFAFSTYDMSWVRQAPGKGLEWVATISSGGSYTYYLDSVKGRFTISRDSSKNTLYLQMNSLQAEDSAIYYCAPTTVVPFAYWGQGTLVTVSSTRGSGGGGSGGGGSGQSFGLLDPKLCYLLDGILFIYGVILTALFLRVKFSRSADAPAYQQGQNQLYNELNLGRREEYDVLDKRRGRDPEMGGKPQRRKNPQEGLYNELQKDKMAEAYSEIGMKGERRRGKGHDGLYQGLSTATKDTYDALHMQALPPRRAKRSGSGVKQTLNFDLLKLAGDVESNPGPSRGHMTEYKPTVRLATRDDVPRAVRTLAAAFADYPATRHTVDPDRHIERVTELQELFLTRVGLDIGKVWVADDGAAVAVWTTPESVEAGAVFAEIGPRMAELSGSRLAAQQQMEGLLAPHRPKEPAWFLATVGVSPDHQGKGLGSAVVLPGVEAAERAGVPAFLETSAPRNLPFYERLGFTVTADVEVPEGPRTWCMTRKPGA

SEQ ID NO: 20984 - protein, 753 aa, Artificial Sequence
  Synthetic Polypeptide
MALPVTALLLPLALLLHAARPEVQLVESGGGLVQPGGSLRLSCAASGFSFSDFWMSWVRQAPGKGLEWVATISQAGSEKDYVDSVKGRFTISRDNAKKSLYLQMNSLRAEDTAVYYCASGVYSFDYRGQGTLVTVSSGTGGGGSGGGGSGGGGSEFDIQMTQSPSSLSVSVGDRVTITCKASQNVRTVVAWYQQKPGLAPKTLIYLASNRHTGVPSRFSGSGSGTDFTFTISSLQPEDIATYFCQQHWSYPLTFGQGTKVEVKRLEDLKNVFPPEVAVFEPSEAEISHTQKATLVCLATGFYPDHVELSWWVNGKEVHSGVCTDPQPLKEQPALNDSRYCLSSRLRVSATFWQNPRNHFRCQVQFYGLSENDEWTQDRAKPVTQIVSAEAWGRADCGFTSESYQQGVLSATILYEILLGKATLYAVLVSALVLMAMVKRKDSRGRAKRSGSGATNFSLLKQAGDVEENPGPTSMDWIWRILFLVGAATGAHSFEEVQLLESGGGLVQPGGSLRLSCAASGFAFSTYDMSWVRQAPGKGLEWVATISSGGSYTYYLDSVKGRFTISRDSSKNTLYLQMNSLQAEDSAIYYCAPTTVVPFAYWGQGTLVTVSSTRIQNPDPAVYQLRDSKSSDKSVCLFTDFDSQTNVSQSKDSDVYITDKCVLDMRSMDFKSNSAVAWSNKSDFACANAFNNSIIPEDTFFPSPESSCDVKLVEKSFETDTNLNFQNLSVIGFRILLLKVAGFNLLMTLRLWSS

SEQ ID NO: 20985 - protein, 757 aa, Artificial Sequence
  Synthetic Polypeptide
MALPVTALLLPLALLLHAARPEVQLVESGGGLVQPGGSLRLSCAASGFSFSDFWMSWVRQAPGKGLEWVATISQAGSEKDYVDSVKGRFTISRDNAKKSLYLQMNSLRAEDTAVYYCASGVYSFDYRGQGTLVTVSSGTGGGGSGGGGSGGGGSEFDIQMTQSPSSLSVSVGDRVTITCKASQNVRTVVAWYQQKPGLAPKTLIYLASNRHTGVPSRFSGSGSGTDFTFTISSLQPEDIATYFCQQHWSYPLTFGQGTKVEVKRLEIQNPDPAVYQLRDSKSSDKSVCLFTDFDSQTNVSQSKDSDVYITDKCVLDMRSMDFKSNSAVAWSNKSDFACANAFNNSIIPEDTFFPSPESSCDVKLVEKSFETDTNLNFQNLSVIGFRILLLKVAGFNLLMTLRLWSSRAKRSGSGVKQTLNFDLLKLAGDVESNPGPTSMDWIWRILFLVGAATGAHSFEEVQLLESGGGLVQPGGSLRLSCAASGFAFSTYDMSWVRQAPGKGLEWVATISSGGSYTYYLDSVKGRFTISRDSSKNTLYLQMNSLQAEDSAIYYCAPTTVVPFAYWGQGTLVTVSSTREDLKNVFPPEVAVFEPSEAEISHTQKATLVCLATGFYPDHVELSWWVNGKEVHSGVCTDPQPLKEQPALNDSRYCLSSRLRVSATFWQNPRNHFRCQVQFYGLSENDEWTQDRAKPVTQIVSAEAWGRADCGFTSESYQQGVLSATILYEILLGKATLYAVLVSALVLMAMVKRKDSRG

SEQ ID NO: 20986 - protein, 949 aa, Artificial Sequence
  Synthetic Polypeptide
MALPVTALLLPLALLLHAARPEVQLVESGGGLVQPGGSLRLSCAASGFSFSDFWMSWVRQAPGKGLEWVATISQAGSEKDYVDSVKGRFTISRDNAKKSLYLQMNSLRAEDTAVYYCASGVYSFDYRGQGTLVTVSSGTGGGGSGGGGSGGGGSEFDIQMTQSPSSLSVSVGDRVTITCKASQNVRTVVAWYQQKPGLAPKTLIYLASNRHTGVPSRFSGSGSGTDFTFTISSLQPEDIATYFCQQHWSYPLTFGQGTKVEVKRLEDLKNVFPPEVAVFEPSEAEISHTQKATLVCLATGFYPDHVELSWWVNGKEVHSGVSTDPQPLKEQPALNDSRYCLSSRLRVSATFWQNPRNHFRCQVQFYGLSENDEWTQDRAKPVTQIVSAEAWGRADCGSQSFGLLDPKLCYLLDGILFIYGVILTALFLRVKFSRSADAPAYQQGQNQLYNELNLGRREEYDVLDKRRGRDPEMGGKPQRRKNPQEGLYNELQKDKMAEAYSEIGMKGERRRGKGHDGLYQGLSTATKDTYDALHMQALPPRRAKRSGSGATNFSLLKQAGDVEENPGPTSMDWIWRILFLVGAATGAHSFEEVQLLESGGGLVQPGGSLRLSCAASGFAFSTYDMSWVRQAPGKGLEWVATISSGGSYTYYLDSVKGRFTISRDSSKNTLYLQMNSLQAEDSAIYYCAPTTVVPFAYWGQGTLVTVSSTRIQNPDPAVYQLRDSKSSDKSVCLFTDFDSQTNVSQSKDSDVYITDKTVLDMRSMDFKSNSAVAWSNKSDFACANAFNNSIIPEDTFFPSPESSCGTQSFGLLDPKLCYLLDGILFIYGVILTALFLRVKFSRSADAPAYQQGQNQLYNELNLGRREEYDVLDKRRGRDPEMGGKPQRRKNPQEGLYNELQKDKMAEAYSEIGMKGERRRGKGHDGLYQGLSTATKDTYDALHMQALPPR

SEQ ID NO: 20987 - protein, 779 aa, Artificial Sequence
  Synthetic Polypeptide
MALPVTALLLPLALLLHAARPEVQLVESGGGLVQPGGSLRLSCAASGFSFSDFWMSWVRQAPGKGLEWVATISQAGSEKDYVDSVKGRFTISRDNAKKSLYLQMNSLRAEDTAVYYCASGVYSFDYRGQGTLVTVSSGTGGGGSGGGGSGGGGSEFDIQMTQSPSSLSVSVGDRVTITCKASQNVRTVVAWYQQKPGLAPKTLIYLASNRHTGVPSRFSGSGSGTDFTFTISSLQPEDIATYFCQQHWSYPLTFGQGTKVEVKRLEGQPKANPTVTLFPPSSEELQANKATLVCLISDFYPGAVTVAWKADGSPVKAGVETTKPSKQSNNKYAASSYLSLTPEQWKSHRSYSCQVTHEGSTVEKTVAPTECSPIKTDVITMDPKDNCSKDANDTLLLQLTNTSAYYMYLLLLLKSVVYFAIITCCLLRRTAFCCNGEKSRAKRSGSGATNFSLLKQAGDVEENPGPTSMDWIWRILFLVGAATGAHSFEEVQLLESGGGLVQPGGSLRLSCAASGFAFSTYDMSWVRQAPGKGLEWVATISSGGSYTYYLDSVKGRFTISRDSSKNTLYLQMNSLQAEDSAIYYCAPTTVVPFAYWGQGTLVTVSSTRASTKGPSVFPLAPSSKSTSGGTAALGCLVKDYFPEPVTVSWNSGALTSGVHTFPAVLQSSGLYSLSSVVTVPSSSLGTQTYICNVNHKPSNTKVDKRVEPKSCEVKTDSTDHVKPKETENTKQPSKSCHKPKAIVHTEKVNMMSLTVLGLRMLFAKTVAVNFLLTAKLFFL

SEQ ID NO: 20988 - protein, 760 aa, Artificial Sequence
  Synthetic Polypeptide
MALPVTALLLPLALLLHAARPEVQLVESGGGLVQPGGSLRLSCAASGFSFSDFWMSWVRQAPGKGLEWVATISQAGSEKDYVDSVKGRFTISRDNAKKSLYLQMNSLRAEDTAVYYCASGVYSFDYRGQGTLVTVSSGTGGGGSGGGGSGGGGSEFDIQMTQSPSSLSVSVGDRVTITCKASQNVRTVVAWYQQKPGLAPKTLIYLASNRHTGVPSRFSGSGSGTDFTFTISSLQPEDIATYFCQQHWSYPLTFGQGTKVEVKRLEGQPKANPTVTLFPPSSEELQANKATLVCLISDFYPGAVTVAWKADGSPVKAGVETTKPSKQSNNKYAASSYLSLTPEQWKSHRSYSCQVTHEGSTVEKTVAPTECSGRADCGFTSESYQQGVLSATILYEILLGKATLYAVLVSALVLMAMVKRKDSRGRAKRSGSGVKQTLNFDLLKLAGDVESNPGPTSMDWIWRILFLVGAATGAHSFEEVQLLESGGGLVQPGGSLRLSCAASGFAFSTYDMSWVRQAPGKGLEWVATISSGGSYTYYLDSVKGRFTISRDSSKNTLYLQMNSLQAEDSAIYYCAPTTVVPFAYWGQGTLVTVSSTRASTKGPSVFPLAPSSKSTSGGTAALGCLVKDYFPEPVTVSWNSGALTSGVHTFPAVLQSSGLYSLSSVVTVPSSSLGTQTYICNVNHKPSNTKVDKRVEPKSCIPEDTFFPSPESSCDVKLVEKSFETDTNLNFQNLSVIGFRILLLKVAGFNLLMTLRLWSS

SEQ ID NO: 20989 - protein, 894 aa, Artificial Sequence
  Synthetic Polypeptide
MALPVTALLLPLALLLHAARPEVQLVESGGGLVQPGGSLRLSCAASGFSFSDFWMSWVRQAPGKGLEWVATISQAGSEKDYVDSVKGRFTISRDNAKKSLYLQMNSLRAEDTAVYYCASGVYSFDYRGQGTLVTVSSGTGGGGSGGGGSGGGGSEFDIQMTQSPSSLSVSVGDRVTITCKASQNVRTVVAWYQQKPGLAPKTLIYLASNRHTGVPSRFSGSGSGTDFTFTISSLQPEDIATYFCQQHWSYPLTFGQGTKVEVKRLEIQNPDPAVYQLRDSKSSDKSVCLFTDFDSQTNVSQSKDSDVYITDKCVLDMRSMDFKSNSAVAWSNKSDFACANAFNNSIIPEDTFFPSPESSCDVKLVEKSFETDTNLNFQNLSVIGFRILLLKVAGFNLLMTLRLWSSRAKRSGSGVKQTLNFDLLKLAGDVESNPGPTSMDWIWRILFLVGAATGAHSGPQLQLQESGPGLVKPSETLSLTCTVSGDSISSGDYYWGWIRQPPGKGLEWIGHIYYSGVTYYNPSLKSRVTISVDTSRNQFSLKLSSVTAADTAVYYCTREDSSNWRSRGQGTLVTVSSGSGGGGSGGGGSGGGGSFEEVQLLESGGGLVQPGGSLRLSCAASGFAFSTYDMSWVRQAPGKGLEWVATISSGGSYTYYLDSVKGRFTISRDSSKNTLYLQMNSLQAEDSAIYYCAPTTVVPFAYWGQGTLVTVSSTREDLKNVFPPEVAVFEPSEAEISHTQKATLVCLATGFYPDHVELSWWVNGKEVHSGVCTDPQPLKEQPALNDSRYCLSSRLRVSATFWQNPRNHFRCQVQFYGLSENDEWTQDRAKPVTQIVSAEAWGRADCGFTSESYQQGVLSATILYEILLGKATLYAVLVSALVLMAMVKRKDSRG

SEQ ID NO: 20990 - protein, 1086 aa, Artificial Sequence
  Synthetic Polypeptide
MALPVTALLLPLALLLHAARPEVQLVESGGGLVQPGGSLRLSCAASGFSFSDFWMSWVRQAPGKGLEWVATISQAGSEKDYVDSVKGRFTISRDNAKKSLYLQMNSLRAEDTAVYYCASGVYSFDYRGQGTLVTVSSGTGGGGSGGGGSGGGGSEFDIQMTQSPSSLSVSVGDRVTITCKASQNVRTVVAWYQQKPGLAPKTLIYLASNRHTGVPSRFSGSGSGTDFTFTISSLQPEDIATYFCQQHWSYPLTFGQGTKVEVKRLEDLKNVFPPEVAVFEPSEAEISHTQKATLVCLATGFYPDHVELSWWVNGKEVHSGVSTDPQPLKEQPALNDSRYCLSSRLRVSATFWQNPRNHFRCQVQFYGLSENDEWTQDRAKPVTQIVSAEAWGRADCGSQSFGLLDPKLCYLLDGILFIYGVILTALFLRVKFSRSADAPAYQQGQNQLYNELNLGRREEYDVLDKRRGRDPEMGGKPQRRKNPQEGLYNELQKDKMAEAYSEIGMKGERRRGKGHDGLYQGLSTATKDTYDALHMQALPPRRAKRSGSGATNFSLLKQAGDVEENPGPTSMDWIWRILFLVGAATGAHSGPQLQLQESGPGLVKPSETLSLTCTVSGDSISSGDYYWGWIRQPPGKGLEWIGHIYYSGVTYYNPSLKSRVTISVDTSRNQFSLKLSSVTAADTAVYYCTREDSSNWRSRGQGTLVTVSSGSGGGGSGGGGSGGGGSFEEVQLLESGGGLVQPGGSLRLSCAASGFAFSTYDMSWVRQAPGKGLEWVATISSGGSYTYYLDSVKGRFTISRDSSKNTLYLQMNSLQAEDSAIYYCAPTTVVPFAYWGQGTLVTVSSTRIQNPDPAVYQLRDSKSSDKSVCLFTDFDSQTNVSQSKDSDVYITDKTVLDMRSMDFKSNSAVAWSNKSDFACANAFNNSIIPEDTFFPSPESSCGTQSFGLLDPKLCYLLDGILFIYGVILTALFLRVKFSRSADAPAYQQGQNQLYNELNLGRREEYDVLDKRRGRDPEMGGKPQRRKNPQEGLYNELQKDKMAEAYSEIGMKGERRRGKGHDGLYQGLSTATKDTYDALHMQALPPR

SEQ ID NO: 20991 - protein, 916 aa, Artificial Sequence
  Synthetic Polypeptide
MALPVTALLLPLALLLHAARPEVQLVESGGGLVQPGGSLRLSCAASGFSFSDFWMSWVRQAPGKGLEWVATISQAGSEKDYVDSVKGRFTISRDNAKKSLYLQMNSLRAEDTAVYYCASGVYSFDYRGQGTLVTVSSGTGGGGSGGGGSGGGGSEFDIQMTQSPSSLSVSVGDRVTITCKASQNVRTVVAWYQQKPGLAPKTLIYLASNRHTGVPSRFSGSGSGTDFTFTISSLQPEDIATYFCQQHWSYPLTFGQGTKVEVKRLEGQPKANPTVTLFPPSSEELQANKATLVCLISDFYPGAVTVAWKADGSPVKAGVETTKPSKQSNNKYAASSYLSLTPEQWKSHRSYSCQVTHEGSTVEKTVAPTECSPIKTDVITMDPKDNCSKDANDTLLLQLTNTSAYYMYLLLLLKSVVYFAIITCCLLRRTAFCCNGEKSRAKRSGSGATNFSLLKQAGDVEENPGPTSMDWIWRILFLVGAATGAHSGPQLQLQESGPGLVKPSETLSLTCTVSGDSISSGDYYWGWIRQPPGKGLEWIGHIYYSGVTYYNPSLKSRVTISVDTSRNQFSLKLSSVTAADTAVYYCTREDSSNWRSRGQGTLVTVSSGSGGGGSGGGGSGGGGSFEEVQLLESGGGLVQPGGSLRLSCAASGFAFSTYDMSWVRQAPGKGLEWVATISSGGSYTYYLDSVKGRFTISRDSSKNTLYLQMNSLQAEDSAIYYCAPTTVVPFAYWGQGTLVTVSSTRASTKGPSVFPLAPSSKSTSGGTAALGCLVKDYFPEPVTVSWNSGALTSGVHTFPAVLQSSGLYSLSSVVTVPSSSLGTQTYICNVNHKPSNTKVDKRVEPKSCEVKTDSTDHVKPKETENTKQPSKSCHKPKAIVHTEKVNMMSLTVLGLRMLFAKTVAVNFLLTAKLFFL

SEQ ID NO: 20992 - protein, 897 aa, Artificial Sequence
  Synthetic Polypeptide
MALPVTALLLPLALLLHAARPEVQLVESGGGLVQPGGSLRLSCAASGFSFSDFWMSWVRQAPGKGLEWVATISQAGSEKDYVDSVKGRFTISRDNAKKSLYLQMNSLRAEDTAVYYCASGVYSFDYRGQGTLVTVSSGTGGGGSGGGGSGGGGSEFDIQMTQSPSSLSVSVGDRVTITCKASQNVRTVVAWYQQKPGLAPKTLIYLASNRHTGVPSRFSGSGSGTDFTFTISSLQPEDIATYFCQQHWSYPLTFGQGTKVEVKRLEGQPKANPTVTLFPPSSEELQANKATLVCLISDFYPGAVTVAWKADGSPVKAGVETTKPSKQSNNKYAASSYLSLTPEQWKSHRSYSCQVTHEGSTVEKTVAPTECSGRADCGFTSESYQQGVLSATILYEILLGKATLYAVLVSALVLMAMVKRKDSRGRAKRSGSGVKQTLNFDLLKLAGDVESNPGPTSMDWIWRILFLVGAATGAHSGPQLQLQESGPGLVKPSETLSLTCTVSGDSISSGDYYWGWIRQPPGKGLEWIGHIYYSGVTYYNPSLKSRVTISVDTSRNQFSLKLSSVTAADTAVYYCTREDSSNWRSRGQGTLVTVSSGSGGGGSGGGGSGGGGSFEEVQLLESGGGLVQPGGSLRLSCAASGFAFSTYDMSWVRQAPGKGLEWVATISSGGSYTYYLDSVKGRFTISRDSSKNTLYLQMNSLQAEDSAIYYCAPTTVVPFAYWGQGTLVTVSSTRASTKGPSVFPLAPSSKSTSGGTAALGCLVKDYFPEPVTVSWNSGALTSGVHTFPAVLQSSGLYSLSSVVTVPSSSLGTQTYICNVNHKPSNTKVDKRVEPKSCIPEDTFFPSPESSCDVKLVEKSFETDTNLNFQNLSVIGFRILLLKVAGFNLLMTLRLWSS

SEQ ID NO: 20993 - protein, 754 aa, Artificial Sequence
  Synthetic Polypeptide
MALPVTALLLPLALLLHAARPEVQVLESGGGLVQPGGSLRLSCAASGFTFSNFAMSWVRQAPGKGLEWVSTISGSAGTTDYADSVKGRFTISRDNSKKTLYLQMNSLRVEDTAVYYCADGRGPFFDYRGQGTLVTVSSGTGGGGSGGGGSGGGGSEFDIQMTQSPSSLSVSVGDRVTITCKASQNVRTVVAWYQQKPGLAPKTLIYLASNRHTGVPSRFSGSGSGTDFTFTISSLQPEDIATYFCQQHWSYPLTFGQGTKVEVKRLEDLKNVFPPEVAVFEPSEAEISHTQKATLVCLATGFYPDHVELSWWVNGKEVHSGVCTDPQPLKEQPALNDSRYCLSSRLRVSATFWQNPRNHFRCQVQFYGLSENDEWTQDRAKPVTQIVSAEAWGRADCGFTSESYQQGVLSATILYEILLGKATLYAVLVSALVLMAMVKRKDSRGRAKRSGSGATNFSLLKQAGDVEENPGPTSMDWIWRILFLVGAATGAHSFEEVQLLESGGGLVQPGGSLRLSCAASGFAFSTYDMSWVRQAPGKGLEWVATISSGGSYTYYLDSVKGRFTISRDSSKNTLYLQMNSLQAEDSAIYYCAPTTVVPFAYWGQGTLVTVSSTRIQNPDPAVYQLRDSKSSDKSVCLFTDFDSQTNVSQSKDSDVYITDKCVLDMRSMDFKSNSAVAWSNKSDFACANAFNNSIIPEDTFFPSPESSCDVKLVEKSFETDTNLNFQNLSVIGFRILLLKVAGFNLLMTLRLWSS

SEQ ID NO: 20994 - protein, 755 aa, Artificial Sequence
  Synthetic Polypeptide
MALPVTALLLPLALLLHAARPDIQMTQSPSSLSVSVGDRVTITCKASQNVRTVVAWYQQKPGLAPKTLIYLASNRHTGVPSRFSGSGSGTDFTFTISSLQPEDIATYFCQQHWSYPLTFGQGTKVEVKRLEDLKNVFPPEVAVFEPSEAEISHTQKATLVCLATGFYPDHVELSWWVNGKEVHSGVCTDPQPLKEQPALNDSRYCLSSRLRVSATFWQNPRNHFRCQVQFYGLSENDEWTQDRAKPVTQIVSAEAWGRADCGFTSESYQQGVLSATILYEILLGKATLYAVLVSALVLMAMVKRKDSRGRAKRSGSGATNFSLLKQAGDVEENPGPTSMDWIWRILFLVGAATGAHSGPEVQLVESGGGLVQAGGSLRLSCAASGRTFSMGWFRQAPGKEREFVAAITYSGGSPYYADSVKGRFTISRDNAKNTVYLQMNSLKPEDTAVYYCAANPTYGSDWNAENWGQGTQVTVSSGSGGGGSGGGGSGGGGSFEEVQLLESGGGLVQPGGSLRLSCAASGFAFSTYDMSWVRQAPGKGLEWVATISSGGSYTYYLDSVKGRFTISRDSSKNTLYLQMNSLQAEDSAIYYCAPTTVVPFAYWGQGTLVTVSSTRIQNPDPAVYQLRDSKSSDKSVCLFTDFDSQTNVSQSKDSDVYITDKCVLDMRSMDFKSNSAVAWSNKSDFACANAFNNSIIPEDTFFPSPESSCDVKLVEKSFETDTNLNFQNLSVIGFRILLLKVAGFNLLMTLRLWSS

SEQ ID NO: 20995 - protein, 882 aa, Artificial Sequence
  Synthetic Polypeptide
MALPVTALLLPLALLLHAARPDIQMTQSPSSLSVSVGDRVTITCKASQNVRTVVAWYQQKPGLAPKTLIYLASNRHTGVPSRFSGSGSGTDFTFTISSLQPEDIATYFCQQHWSYPLTFGQGTKVEVKRLEDLKNVFPPEVAVFEPSEAEISHTQKATLVCLATGFYPDHVELSWWVNGKEVHSGVCTDPQPLKEQPALNDSRYCLSSRLRVSATFWQNPRNHFRCQVQFYGLSENDEWTQDRAKPVTQIVSAEAWGRADCGFTSESYQQGVLSATILYEILLGKATLYAVLVSALVLMAMVKRKDSRGRAKRSGSGATNFSLLKQAGDVEENPGPTSMDWIWRILFLVGAATGAHSQLQLQESGPGLVKPSETLSLTCTVSGGSISSGDYYWGWIRQPPGKGLEWIGSISYSGSTYYNPSLKSRVTISVDTSRNQFSLKLSSVTAADTAVYYCTREDSSNWRSRGQGTLVTVSSSGGGGSGGGGSEVQLVESGGGLVQAGGSLRLSCAASGRTFSMGWFRQAPGKEREFVAAITYSGGSPYYADSVKGRFTISRDNAKNTVYLQMNSLKPEDTAVYYCAANPTYGSDWNAENWGQGTQVTVSSGSGGGGSGGGGSGGGGSFEEVQLLESGGGLVQPGGSLRLSCAASGFAFSTYDMSWVRQAPGKGLEWVATISSGGSYTYYLDSVKGRFTISRDSSKNTLYLQMNSLQAEDSAIYYCAPTTVVPFAYWGQGTLVTVSSTRIQNPDPAVYQLRDSKSSDKSVCLFTDFDSQTNVSQSKDSDVYITDKCVLDMRSMDFKSNSAVAWSNKSDFACANAFNNSIIPEDTFFPSPESSCDVKLVEKSFETDTNLNFQNLSVIGFRILLLKVAGFNLLMTLRLWSS

SEQ ID NO: 20996 - protein, 891 aa, Artificial Sequence
  Synthetic Polypeptide
MALPVTALLLPLALLLHAARPEVQVLESGGGLVQPGGSLRLSCAASGFTFSNFAMSWVRQAPGKGLEWVSTISGSAGTTDYADSVKGRFTISRDNSKKTLYLQMNSLRVEDTAVYYCADGRGPFFDYRGQGTLVTVSSGTGGGGSGGGGSGGGGSEFDIQMTQSPSSLSVSVGDRVTITCKASQNVRTVVAWYQQKPGLAPKTLIYLASNRHTGVPSRFSGSGSGTDFTFTISSLQPEDIATYFCQQHWSYPLTFGQGTKVEVKRLEDLKNVFPPEVAVFEPSEAEISHTQKATLVCLATGFYPDHVELSWWVNGKEVHSGVCTDPQPLKEQPALNDSRYCLSSRLRVSATFWQNPRNHFRCQVQFYGLSENDEWTQDRAKPVTQIVSAEAWGRADCGFTSESYQQGVLSATILYEILLGKATLYAVLVSALVLMAMVKRKDSRGRAKRSGSGATNFSLLKQAGDVEENPGPTSMDWIWRILFLVGAATGAHSGPEVQLVESGGGLVQAGGSLRLSCAASGRTFSMGWFRQAPGKEREFVAAITYSGGSPYYASSVRGRFTISRDNAKNTVYLQMNSLKPEDTAVYYCAANPTYGSDWNAENWGQGTQVTVSSGSGGGGSGGGGSGGGGSFEEVQLLESGGGLVQPGGSLRLSCAASGFAFSTYDMSWVRQAPGKGLEWVATISSGGSYTYYLDSVKGRFTISRDSSKNTLYLQMNSLQAEDSAIYYCAPTTVVPFAYWGQGTLVTVSSTRIQNPDPAVYQLRDSKSSDKSVCLFTDFDSQTNVSQSKDSDVYITDKCVLDMRSMDFKSNSAVAWSNKSDFACANAFNNSIIPEDTFFPSPESSCDVKLVEKSFETDTNLNFQNLSVIGFRILLLKVAGFNLLMTLRLWSS

SEQ ID NO: 20997 - protein, 726 aa, Artificial Sequence
  Synthetic Polypeptide
MALPVTALLLPLALLLHAARPDIQMTQSPSSLSASVGDRVTITCKSSQSLLYSSNQKNYLAWFQQKPGKAPKLLIYWASTRESGVPSRFSGSGSGTDFTLTISSLQPEDFATYFCHQYLSSYTFGQGTKVEIKRGGGGSGGGGSGGGGSEVQLVESGGGLVQPGGSLRLSCAASGYTFTSYWLHWVRQAPGKGLEWVGYIRPSTGYTEYNQKFKDRFTISADTSKNTAYLQMNSLRAEDTAVYYCARSRWLLDYWGQGTLVTVSSTREQKLISEEDLAKPTTTPAPRPPTPAPTIASQPLSLRPEACRPAAGGAVHTRGLDFACDIYIWAPLAGTCGVLLLSLVITLYCKRGRKKLLYIFKQPFMRPVQTTQEEDGCSCRFPEEEEGGCELRVKFSRSADAPAYQQGQNQLYNELNLGRREEYDVLDKRRGRDPEMGGKPRRKNPQEGLYNELQKDKMAEAYSEIGMKGERRRGKGHDGLYQGLSTATKDTYDALHMQALPPRSSGSGEGRGSLLTCGDVEENPGPHMTEYKPTVRLATRDDVPRAVRTLAAAFADYPATRHTVDPDRHIERVTELQELFLTRVGLDIGKVWVADDGAAVAVWTTPESVEAGAVFAEIGPRMAELSGSRLAAQQQMEGLLAPHRPKEPAWFLATVGVSPDHQGKGLGSAVVLPGVEAAERAGVPAFLETSAPRNLPFYERLGFTVTADVEVPEGPRTWCMTRKPGA

SEQ ID NO: 20998 - protein, 720 aa, Artificial Sequence
  Synthetic Polypeptide
MALPVTALLLPLALLLHAARPDIQMTQSPSSLSASVGDRVTITCKSSQSLLYSSNQKNYLAWFQQKPGKAPKLLIYWASTRESGVPSRFSGSGSGTDFTLTISSLQPEDFATYFCHQYLSSYTFGQGTKVEIKRGGGGSGGGGSGGGGSEVQLVESGGGLVQPGGSLRLSCAASGYTFTSYWLHWVRQAPGKGLEWVGYIRPSTGYTEYNQKFKDRFTISADTSKNTAYLQMNSLRAEDTAVYYCARSRWLLDYWGQGTLVTVSSTREQKLISEEDLKIEVMYPPPYLDNEKSNGTIIHVKGKHLCPSPLFPGPSKPFWVLVVVGGVLACYSLLVTVAFIIFWVRSKRSRLLHSDYMNMTPRRPGPTRKHYQPYAPPRDFAAYRSRVKFSRSADAPAYQQGQNQLYNELNLGRREEYDVLDKRRGRDPEMGGKPRRKNPQEGLYNELQKDKMAEAYSEIGMKGERRRGKGHDGLYQGLSTATKDTYDALHMQALPPRSSGSGEGRGSLLTCGDVEENPGPHMTEYKPTVRLATRDDVPRAVRTLAAAFADYPATRHTVDPDRHIERVTELQELFLTRVGLDIGKVWVADDGAAVAVWTTPESVEAGAVFAEIGPRMAELSGSRLAAQQQMEGLLAPHRPKEPAWFLATVGVSPDHQGKGLGSAVVLPGVEAAERAGVPAFLETSAPRNLPFYERLGFTVTADVEVPEGPRTWCMTRKPGA

SEQ ID NO: 20999 - protein, 497 aa, Artificial Sequence
  Synthetic Polypeptide
MALPVTALLLPLALLLHAARPDIQMTQSPSSLSASVGDRVTITCKSSQSLLYSSNQKNYLAWFQQKPGKAPKLLIYWASTRESGVPSRFSGSGSGTDFTLTISSLQPEDFATYFCHQYLSSYTFGQGTKVEIKRGGGGSGGGGSGGGGSEVQLVESGGGLVQPGGSLRLSCAASGYTFTSYWLHWVRQAPGKGLEWVGYIRPSTGYTEYNQKFKDRFTISADTSKNTAYLQMNSLRAEDTAVYYCARSRWLLDYWGQGTLVTVSSTREQKLISEEDLKIEVMYPPPYLDNEKSNGTIIHVKGKHLCPSPLFPGPSKPFWVLVVVGGVLACYSLLVTVAFIIFWVRSKRSRLLHSDYMNMTPRRPGPTRKHYQPYAPPRDFAAYRSRVKFSRSADAPAYQQGQNQLYNELNLGRREEYDVLDKRRGRDPEMGGKPRRKNPQEGLYNELQKDKMAEAYSEIGMKGERRRGKGHDGLYQGLSTATKDTYDALHMQALPPR

SEQ ID NO: 21000 - protein, 503 aa, Artificial Sequence
  Synthetic Polypeptide
MALPVTALLLPLALLLHAARPDIQMTQSPSSLSASVGDRVTITCKSSQSLLYSSNQKNYLAWFQQKPGKAPKLLIYWASTRESGVPSRFSGSGSGTDFTLTISSLQPEDFATYFCHQYLSSYTFGQGTKVEIKRGGGGSGGGGSGGGGSEVQLVESGGGLVQPGGSLRLSCAASGYTFTSYWLHWVRQAPGKGLEWVGYIRPSTGYTEYNQKFKDRFTISADTSKNTAYLQMNSLRAEDTAVYYCARSRWLLDYWGQGTLVTVSSTREQKLISEEDLAKPTTTPAPRPPTPAPTIASQPLSLRPEACRPAAGGAVHTRGLDFACDIYIWAPLAGTCGVLLLSLVITLYCKRGRKKLLYIFKQPFMRPVQTTQEEDGCSCRFPEEEEGGCELRVKFSRSADAPAYQQGQNQLYNELNLGRREEYDVLDKRRGRDPEMGGKPRRKNPQEGLYNELQKDKMAEAYSEIGMKGERRRGKGHDGLYQGLSTATKDTYDALHMQALPPR

SEQ ID NO: 21001 - protein, 503 aa, Artificial Sequence
  Synthetic Polypeptide
MALPVTALLLPLALLLHAARPEVQLVESGGGLVQPGGSLRLSCAASGYTFTSYWLHWVRQAPGKGLEWVGYIRPSTGYTEYNQKFKDRFTISADTSKNTAYLQMNSLRAEDTAVYYCARSRWLLDYWGQGTLVTVSSGGGGSGGGGSGGGGSDIQMTQSPSSLSASVGDRVTITCKSSQSLLYSSNQKNYLAWFQQKPGKAPKLLIYWASTRESGVPSRFSGSGSGTDFTLTISSLQPEDFATYFCHQYLSSYTFGQGTKVEIKRTREQKLISEEDLAKPTTTPAPRPPTPAPTIASQPLSLRPEACRPAAGGAVHTRGLDFACDIYIWAPLAGTCGVLLLSLVITLYCKRGRKKLLYIFKQPFMRPVQTTQEEDGCSCRFPEEEEGGCELRVKFSRSADAPAYQQGQNQLYNELNLGRREEYDVLDKRRGRDPEMGGKPRRKNPQEGLYNELQKDKMAEAYSEIGMKGERRRGKGHDGLYQGLSTATKDTYDALHMQALPPR

SEQ ID NO: 21002 - protein, 916 aa, Artificial Sequence
  Synthetic Polypeptide
MALPVTALLLPLALLLHAARPDIQMTQSPSSLSASVGDRVTITCKSSQSLLYSSNQKNYLAWFQQKPGKAPKLLIYWASTRESGVPSRFSGSGSGTDFTLTISSLQPEDFATYFCHQYLSSYTFGQGTKVEIKRGGGGSGGGGSGGGGSEVQLVESGGGLVQPGGSLRLSCAASGYTFTSYWLHWVRQAPGKGLEWVGYIRPSTGYTEYNQKFKDRFTISADTSKNTAYLQMNSLRAEDTAVYYCARSRWLLDYWGQGTLVTVSSTREQKLISEEDLAKPTTTPAPRPPTPAPTIASQPLSLRPEACRPAAGGAVHTRGLDFACDIYIWAPLAGTCGVLLLSLVITLYCGRARVKFSRSADAPAYQQGQNQLYNELNLGRREEYDVLDKRRGRDPEMGGKPRRKNPQEGLYNELQKDKMAEAYSEIGMKGERRRGKGHDGLYQGLSTATKDTYDALHMQALPPRSRGSGATNFSLLKQAGDVEENPGPGIHMATYEVLCEVARKLGTDDREVVLFLLNVFIPQPTLAQLIGALRALKEEGRLTFPLLAECLFRAGRRDLLRDLLHLDPRFLERHLAGTMSYFSPYQLTVLHVDGELCARDIRSLIFLSKDTIGSRSTPQTFLHWVYCMENLDLLGPTDVDALMSMLRSLSRVDLQRQVQTLMGLHLSGPSHSQHYRHTPLETDFYDYKDDDDKTSGSGEGRGSLLTCGDVEENPGPHMTEYKPTVRLATRDDVPRAVRTLAAAFADYPATRHTVDPDRHIERVTELQELFLTRVGLDIGKVWVADDGAAVAVWTTPESVEAGAVFAEIGPRMAELSGSRLAAQQQMEGLLAPHRPKEPAWFLATVGVSPDHQGKGLGSAVVLPGVEAAERAGVPAFLETSAPRNLPFYERLGFTVTADVEVPEGPRTWCMTRKPGA

SEQ ID NO: 21003 - protein, 856 aa, Artificial Sequence
  Synthetic Polypeptide
MALPVTALLLPLALLLHAARPDIQMTQSPSSLSASVGDRVTITCKSSQSLLYSSNQKNYLAWFQQKPGKAPKLLIYWASTRESGVPSRFSGSGSGTDFTLTISSLQPEDFATYFCHQYLSSYTFGQGTKVEIKRLEIQNPDPAVYQLRDSKSSDKSVCLFTDFDSQTNVSQSKDSDVYITDKCVLDMRSMDFKSNSAVAWSNKSDFACANAFNNSIIPEDTFFPSSDVPCDVKLVEKSFETDTNLNFQNLSVIGFRILLLKVAGFNLLMTLRLWSSRAKRSGSGVKQTLNFDLLKLAGDVESNPGPTSMDWIWRILFLVGAATGAHSFEEVQLVESGGGLVQPGGSLRLSCAASGYTFTSYWLHWVRQAPGKGLEWVGYIRPSTGYTEYNQKFKDRFTISADTSKNTAYLQMNSLRAEDTAVYYCARSRWLLDYWGQGTLVTVSSTREDLKNVFPPEVAVFEPSKAEIAHTQKATLVCLATGFYPDHVELSWWVNGKEVHSGVCTDPQPLKEQPALNDSRYCLSSRLRVSATFWQNPRNHFRCQVQFYGLSENDEWTQDRAKPVTQIVSAEAWGRADCGITSASYHQGVLSATILYEILLGKATLYAVLVSALVLMAMVKRKDSRGRAKRSGSGATNFSLLKQAGDVEENPGPSRGHMTEYKPTVRLATRDDVPRAVRTLAAAFADYPATRHTVDPDRHIERVTELQELFLTRVGLDIGKVWVADDGAAVAVWTTPESVEAGAVFAEIGPRMAELSGSRLAAQQQMEGLLAPHRPKEPAWFLATVGVSPDHQGKGLGSAVVLPGVEAAERAGVPAFLETSAPRNLPFYERLGFTVTADVEVPEGPRTWCMTRKPGA

SEQ ID NO: 21004 - protein, 855 aa, Artificial Sequence
  Synthetic Polypeptide
MALPVTALLLPLALLLHAARPDIQMTQSPSSLSASVGDRVTITCKSSQSLLYSSNQKNYLAWFQQKPGKAPKLLIYWASTRESGVPSRFSGSGSGTDFTLTISSLQPEDFATYFCHQYLSSYTFGQGTKVEIKRLEDLKNVFPPEVAVFEPSKAEIAHTQKATLVCLATGFYPDHVELSWWVNGKEVHSGVCTDPQPLKEQPALNDSRYCLSSRLRVSATFWQNPRNHFRCQVQFYGLSENDEWTQDRAKPVTQIVSAEAWGRADCGITSASYHQGVLSATILYEILLGKATLYAVLVSALVLMAMVKRKDSRGRAKRSGSGATNFSLLKQAGDVEENPGPTSMDWIWRILFLVGAATGAHSFEEVQLVESGGGLVQPGGSLRLSCAASGYTFTSYWLHWVRQAPGKGLEWVGYIRPSTGYTEYNQKFKDRFTISADTSKNTAYLQMNSLRAEDTAVYYCARSRWLLDYWGQGTLVTVSSTRIQNPDPAVYQLRDSKSSDKSVCLFTDFDSQTNVSQSKDSDVYITDKCVLDMRSMDFKSNSAVAWSNKSDFACANAFNNSIIPEDTFFPSSDVPCDVKLVEKSFETDTNLNFQNLSVIGFRILLLKVAGFNLLMTLRLWSSRAKRSGSGVKQTLNFDLLKLAGDVESNPGPSRGHMTEYKPTVRLATRDDVPRAVRTLAAAFADYPATRHTVDPDRHIERVTELQELFLTRVGLDIGKVWVADDGAAVAVWTTPESVEAGAVFAEIGPRMAELSGSRLAAQQQMEGLLAPHRPKEPAWFLATVGVSPDHQGKGLGSAVVLPGVEAAERAGVPAFLETSAPRNLPFYERLGFTVTADVEVPEGPRTWCMTRKPGA

SEQ ID NO: 21005 - protein, 622 aa, Artificial Sequence
  Synthetic Polypeptide
MALPVTALLLPLALLLHAARPDIQMTQSPSSLSASVGDRVTITCKSSQSLLYSSNQKNYLAWFQQKPGKAPKLLIYWASTRESGVPSRFSGSGSGTDFTLTISSLQPEDFATYFCHQYLSSYTFGQGTKVEIKRLEDLKNVFPPEVAVFEPSEAEISHTQKATLVCLATGFYPDHVELSWWVNGKEVHSGVCTDPQPLKEQPALNDSRYCLSSRLRVSATFWQNPRNHFRCQVQFYGLSENDEWTQDRAKPVTQIVSAEAWGRADCGFTSESYQQGVLSATILYEILLGKATLYAVLVSALVLMAMVKRKDSRGRAKRSGSGATNFSLLKQAGDVEENPGPTSMDWIWRILFLVGAATGAHSFEEVQLVESGGGLVQPGGSLRLSCAASGYTFTSYWLHWVRQAPGKGLEWVGYIRPSTGYTEYNQKFKDRFTISADTSKNTAYLQMNSLRAEDTAVYYCARSRWLLDYWGQGTLVTVSSTRIQNPDPAVYQLRDSKSSDKSVCLFTDFDSQTNVSQSKDSDVYITDKCVLDMRSMDFKSNSAVAWSNKSDFACANAFNNSIIPEDTFFPSPESSCDVKLVEKSFETDTNLNFQNLSVIGFRILLLKVAGFNLLMTLRLWSS

SEQ ID NO: 21006 - protein, 847 aa, Artificial Sequence
  Synthetic Polypeptide
MALPVTALLLPLALLLHAARPDIQMTQSPSSLSASVGDRVTITCKSSQSLLYSSNQKNYLAWFQQKPGKAPKLLIYWASTRESGVPSRFSGSGSGTDFTLTISSLQPEDFATYFCHQYLSSYTFGQGTKVEIKRLEDLKNVFPPEVAVFEPSEAEISHTQKATLVCLATGFYPDHVELSWWVNGKEVHSGVCTDPQPLKEQPALNDSRYCLSSRLRVSATFWQNPRNHFRCQVQFYGLSENDEWTQDRAKPVTQIVSAEAWGRADCGFTSESYQQGVLSATILYEILLGKATLYAVLVSALVLMAMVKRKDSRGRAKRSGSGATNFSLLKQAGDVEENPGPTSMDWIWRILFLVGAATGAHSFEEVQLVESGGGLVQPGGSLRLSCAASGYTFTSYWLHWVRQAPGKGLEWVGYIRPSTGYTEYNQKFKDRFTISADTSKNTAYLQMNSLRAEDTAVYYCARSRWLLDYWGQGTLVTVSSTRIQNPDPAVYQLRDSKSSDKSVCLFTDFDSQTNVSQSKDSDVYITDKCVLDMRSMDFKSNSAVAWSNKSDFACANAFNNSIIPEDTFFPSPESSCDVKLVEKSFETDTNLNFQNLSVIGFRILLLKVAGFNLLMTLRLWSSRAKRSGSGVKQTLNFDLLKLAGDVESNPGPSRGGIHTMATYEVLCEVARKLGTDDREVVLFLLNVFIPQPTLAQLIGALRALKEEGRLTFPLLAECLFRAGRRDLLRDLLHLDPRFLERHLAGTMSYFSPYQLTVLHVDGELCARDIRSLIFLSKDTIGSRSTPQTFLHWVYCMENLDLLGPTDVDALMSMLRSLSRVDLQRQVQTLMGLHLSGPSHSQHYRHTP

SEQ ID NO: 21007 - protein, 626 aa, Artificial Sequence
  Synthetic Polypeptide
MALPVTALLLPLALLLHAARPDIQMTQSPSSLSASVGDRVTITCKSSQSLLYSSNQKNYLAWFQQKPGKAPKLLIYWASTRESGVPSRFSGSGSGTDFTLTISSLQPEDFATYFCHQYLSSYTFGQGTKVEIKRLEIQNPDPAVYQLRDSKSSDKSVCLFTDFDSQTNVSQSKDSDVYITDKCVLDMRSMDFKSNSAVAWSNKSDFACANAFNNSIIPEDTFFPSPESSCDVKLVEKSFETDTNLNFQNLSVIGFRILLLKVAGFNLLMTLRLWSSRAKRSGSGVKQTLNFDLLKLAGDVESNPGPTSMDWIWRILFLVGAATGAHSFEEVQLVESGGGLVQPGGSLRLSCAASGYTFTSYWLHWVRQAPGKGLEWVGYIRPSTGYTEYNQKFKDRFTISADTSKNTAYLQMNSLRAEDTAVYYCARSRWLLDYWGQGTLVTVSSTREDLKNVFPPEVAVFEPSEAEISHTQKATLVCLATGFYPDHVELSWWVNGKEVHSGVCTDPQPLKEQPALNDSRYCLSSRLRVSATFWQNPRNHFRCQVQFYGLSENDEWTQDRAKPVTQIVSAEAWGRADCGFTSESYQQGVLSATILYEILLGKATLYAVLVSALVLMAMVKRKDSRG

SEQ ID NO: 21008 - protein, 848 aa, Artificial Sequence
  Synthetic Polypeptide
MALPVTALLLPLALLLHAARPDIQMTQSPSSLSASVGDRVTITCKSSQSLLYSSNQKNYLAWFQQKPGKAPKLLIYWASTRESGVPSRFSGSGSGTDFTLTISSLQPEDFATYFCHQYLSSYTFGQGTKVEIKRLEIQNPDPAVYQLRDSKSSDKSVCLFTDFDSQTNVSQSKDSDVYITDKCVLDMRSMDFKSNSAVAWSNKSDFACANAFNNSIIPEDTFFPSPESSCDVKLVEKSFETDTNLNFQNLSVIGFRILLLKVAGFNLLMTLRLWSSRAKRSGSGVKQTLNFDLLKLAGDVESNPGPTSMDWIWRILFLVGAATGAHSFEEVQLVESGGGLVQPGGSLRLSCAASGYTFTSYWLHWVRQAPGKGLEWVGYIRPSTGYTEYNQKFKDRFTISADTSKNTAYLQMNSLRAEDTAVYYCARSRWLLDYWGQGTLVTVSSTREDLKNVFPPEVAVFEPSEAEISHTQKATLVCLATGFYPDHVELSWWVNGKEVHSGVCTDPQPLKEQPALNDSRYCLSSRLRVSATFWQNPRNHFRCQVQFYGLSENDEWTQDRAKPVTQIVSAEAWGRADCGFTSESYQQGVLSATILYEILLGKATLYAVLVSALVLMAMVKRKDSRGRAKRSGSGATNFSLLKQAGDVEENPGPSRGGIHTMATYEVLCEVARKLGTDDREVVLFLLNVFIPQPTLAQLIGALRALKEEGRLTFPLLAECLFRAGRRDLLRDLLHLDPRFLERHLAGTMSYFSPYQLTVLHVDGELCARDIRSLIFLSKDTIGSRSTPQTFLHWVYCMENLDLLGPTDVDALMSMLRSLSRVDLQRQVQTLMGLHLSGPSHSQHYRHTP

SEQ ID NO: 21009 - protein, 900 aa, Artificial Sequence
  Synthetic Polypeptide
MALPVTALLLPLALLLHAARPLEGKPIPNPLLGLDSTGSGEDLKNVFPPEVAVFEPSKAEIAHTQKATLVCLATGFYPDHVELSWWVNGKEVHSGVCTDPQPLKEQPALNDSRYCLSSRLRVSATFWQNPRNHFRCQVQFYGLSENDEWTQDRAKPVTQIVSAEAWGRADCGITSASYHQGVLSATILYEILLGKATLYAVLVSALVLMAMVKRKDSRGRAKRSGSGATNFSLLKQAGDVEENPGPTSMALPVTALLLPLALLLHAARPDIQMTQSPSSLSASVGDRVTITCKSSQSLLYSSNQKNYLAWFQQKPGKAPKLLIYWASTRESGVPSRFSGSGSGTDFTLTISSLQPEDFATYFCHQYLSSYTFGQGTKVEIKRGGGGSGGGGSGGGGSEVQLVESGGGLVQPGGSLRLSCAASGYTFTSYWLHWVRQAPGKGLEWVGYIRPSTGYTEYNQKFKDRFTISADTSKNTAYLQMNSLRAEDTAVYYCARSRWLLDYWGQGTLVTVSSTREQKLISEEDGSGIQNPDPAVYQLRDSKSSDKSVCLFTDFDSQTNVSQSKDSDVYITDKCVLDMRSMDFKSNSAVAWSNKSDFACANAFNNSIIPEDTFFPSSDVPCDVKLVEKSFETDTNLNFQNLSVIGFRILLLKVAGFNLLMTLRLWSSRAKRSGSGVKQTLNFDLLKLAGDVESNPGPSRGHMTEYKPTVRLATRDDVPRAVRTLAAAFADYPATRHTVDPDRHIERVTELQELFLTRVGLDIGKVWVADDGAAVAVWTTPESVEAGAVFAEIGPRMAELSGSRLAAQQQMEGLLAPHRPKEPAWFLATVGVSPDHQGKGLGSAVVLPGVEAAERAGVPAFLETSAPRNLPFYERLGFTVTADVEVPEGPRTWCMTRKPGA

SEQ ID NO: 21010 - protein, 901 aa, Artificial Sequence
  Synthetic Polypeptide
MALPVTALLLPLALLLHAARPLEQKLISEEDLGSGDRPDPAVYQLRDSKSSDKSVCLFTDFDSQTNVSQSKDSDVYITDKCVLDMRSMDFKSNSAVAWSNKSDFACANAFNNSIIPEDTFFPSPESSCDVKLVEKSFETDTNLNFQNLSVIGFRILLLKVAGFNLLMTLRLWSSSSRAKRSGSGVKQTLNFDLLKLAGDVESNPGPTSMALPVTALLLPLALLLHAARPDIQMTQSPSSLSASVGDRVTITCKSSQSLLYSSNQKNYLAWFQQKPGKAPKLLIYWASTRESGVPSRFSGSGSGTDFTLTISSLQPEDFATYFCHQYLSSYTFGQGTKVEIKRGGGGSGGGGSGGGGSEVQLVESGGGLVQPGGSLRLSCAASGYTFTSYWLHWVRQAPGKGLEWVGYIRPSTGYTEYNQKFKDRFTISADTSKNTAYLQMNSLRAEDTAVYYCARSRWLLDYWGQGTLVTVSSTRGKPIPNPLLGLDSTGSGEDLKNVFPPEVAVFEPSEAEISHTQKATLVCLATGFYPDHVELSWWVNGKEVHSGVCTDPQPLKEQPALNDSRYCLSSRLRVSATFWQNPRNHFRCQVQFYGLSENDEWTQDRAKPVTQIVSAEAWGRADCGFTSESYQQGVLSATILYEILLGKATLYAVLVSALVLMAMVKRKDSRGRAKRSGSGATNFSLLKQAGDVEENPGPSRGHMTEYKPTVRLATRDDVPRAVRTLAAAFADYPATRHTVDPDRHIERVTELQELFLTRVGLDIGKVWVADDGAAVAVWTTPESVEAGAVFAEIGPRMAELSGSRLAAQQQMEGLLAPHRPKEPAWFLATVGVSPDHQGKGLGSAVVLPGVEAAERAGVPAFLETSAPRNLPFYERLGFTVTADVEVPEGPRTWCMTRKPGA

SEQ ID NO: 21011 - protein, 855 aa, Artificial Sequence
  Synthetic Polypeptide
MALPVTALLLPLALLLHAARPDIQMTQSPSSLSASVGDRVTITCKSSQSLLYSSNQKNYLAWFQQKPGKAPKLLIYWASTRESGVPSRFSGSGSGTDFTLTISSLQPEDFATYFCHQYLSSYTFGQGTKVEIKRLEDLKNVFPPEVAVFEPSEAEISHTQKATLVCLATGFYPDHVELSWWVNGKEVHSGVSTDPQPLKEQPALNDSRYCLSSRLRVSATFWQNPRNHFRCQVQFYGLSENDEWTQDRAKPVTQIVSAEAWGRADCGFTSESYQQGVLSATILYEILLGKATLYAVLVSALVLMAMVKRKDSRGRAKRSGSGATNFSLLKQAGDVEENPGPTSMDWIWRILFLVGAATGAHSFEEVQLVESGGGLVQPGGSLRLSCAASGYTFTSYWLHWVRQAPGKGLEWVGYIRPSTGYTEYNQKFKDRFTISADTSKNTAYLQMNSLRAEDTAVYYCARSRWLLDYWGQGTLVTVSSTRIQNPDPAVYQLRDSKSSDKSVCLFTDFDSQTNVSQSKDSDVYITDKTVLDMRSMDFKSNSAVAWSNKSDFACANAFNNSIIPEDTFFPSPESSCDVKLVEKSFETDTNLNFQNLSVIGFRILLLKVAGFNLLMTLRLWSSRAKRSGSGVKQTLNFDLLKLAGDVESNPGPSRGHMTEYKPTVRLATRDDVPRAVRTLAAAFADYPATRHTVDPDRHIERVTELQELFLTRVGLDIGKVWVADDGAAVAVWTTPESVEAGAVFAEIGPRMAELSGSRLAAQQQMEGLLAPHRPKEPAWFLATVGVSPDHQGKGLGSAVVLPGVEAAERAGVPAFLETSAPRNLPFYERLGFTVTADVEVPEGPRTWCMTRKPGA

SEQ ID NO: 21012 - protein, 937 aa, Artificial Sequence
  Synthetic Polypeptide
MALPVTALLLPLALLLHAARPDIQMTQSPSSLSASVGDRVTITCKSSQSLLYSSNQKNYLAWFQQKPGKAPKLLIYWASTRESGVPSRFSGSGSGTDFTLTISSLQPEDFATYFCHQYLSSYTFGQGTKVEIKRLEDLKNVFPPEVAVFEPSEAEISHTQKATLVCLATGFYPDHVELSWWVNGKEVHSGVSTDPQPLKEQPALNDSRYCLSSRLRVSATFWQNPRNHFRCQVQFYGLSENDEWTQDRAKPVTQIVSAEAWGRADCGFTSESYQQGVLSATILYEILLGKATLYAVLVSALVLMAMVKRKDSRGRAKRSGSGATNFSLLKQAGDVEENPGPTSMDWIWRILFLVGAATGAHSFEEVQLVESGGGLVQPGGSLRLSCAASGYTFTSYWLHWVRQAPGKGLEWVGYIRPSTGYTEYNQKFKDRFTISADTSKNTAYLQMNSLRAEDTAVYYCARSRWLLDYWGQGTLVTVSSTREQKLISEEDGSGTPFPSLAPPIMLLVDGKQQMVVVCLVLDVAPPGLDSPIWFSAGNGSALDAFTYGPSPATDGTWTNLAHLSLPSEELASWEPLVCHTGPGAEGHSRSTQPMHLSGEASTARTCPQEPLRGTPGGALWLGVLRLLLFKLLLFDLLLTCSCLCDPAGPLPSPATTTRLRALGSHRLHPATETGGREATSSPRPQPRDRRWGDTPPGRKPGSPVRAKRSGSGVKQTLNFDLLKLAGDVESNPGPSRGHMTEYKPTVRLATRDDVPRAVRTLAAAFADYPATRHTVDPDRHIERVTELQELFLTRVGLDIGKVWVADDGAAVAVWTTPESVEAGAVFAEIGPRMAELSGSRLAAQQQMEGLLAPHRPKEPAWFLATVGVSPDHQGKGLGSAVVLPGVEAAERAGVPAFLETSAPRNLPFYERLGFTVTADVEVPEGPRTWCMTRKPGA

SEQ ID NO: 21013 - protein, 955 aa, Artificial Sequence
  Synthetic Polypeptide
MALPVTALLLPLALLLHAARPLEDLKNVFPPEVAVFEPSEAEISHTQKATLVCLATGFYPDHVELSWWVNGKEVHSGVSTDPQPLKEQPALNDSRYCLSSRLRVSATFWQNPRNHFRCQVQFYGLSENDEWTQDRAKPVTQIVSAEAWGRADCGFTSESYQQGVLSATILYEILLGKATLYAVLVSALVLMAMVKRKDSRGRAKRSGSGATNFSLLKQAGDVEENPGPTSMALPVTALLLPLALLLHAARPDIQMTQSPSSLSASVGDRVTITCKSSQSLLYSSNQKNYLAWFQQKPGKAPKLLIYWASTRESGVPSRFSGSGSGTDFTLTISSLQPEDFATYFCHQYLSSYTFGQGTKVEIKRGGGGSGGGGSGGGGSEVQLVESGGGLVQPGGSLRLSCAASGYTFTSYWLHWVRQAPGKGLEWVGYIRPSTGYTEYNQKFKDRFTISADTSKNTAYLQMNSLRAEDTAVYYCARSRWLLDYWGQGTLVTVSSTREQKLISEEDLGSGTPFPSLAPPIMLLVDGKQQMVVVCLVLDVAPPGLDSPIWFSAGNGSALDAFTYGPSPATDGTWTNLAHLSLPSEELASWEPLVCHTGPGAEGHSRSTQPMHLSGEASTARTCPQEPLRGTPGGALWLGVLRLLLFKLLLFDLLLTCSCLCDPAGPLPSPATTTRLRALGSHRLHPATETGGREATSSPRPQPRDRRWGDTPPGRKPGSPVRAKRSGSGVKQTLNFDLLKLAGDVESNPGPSRSRGHMTEYKPTVRLATRDDVPRAVRTLAAAFADYPATRHTVDPDRHIERVTELQELFLTRVGLDIGKVWVADDGAAVAVWTTPESVEAGAVFAEIGPRMAELSGSRLAAQQQMEGLLAPHRPKEPAWFLATVGVSPDHQGKGLGSAVVLPGVEAAERAGVPAFLETSAPRNLPFYERLGFTVTADVEVPEGPRTWCMTRKPGA

SEQ ID NO: 21014 - protein, 892 aa, Artificial Sequence
  Synthetic Polypeptide
MALPVTALLLPLALLLHAARPDIQMTQSPSSLSASVGDRVTITCKSSQSLLYSSNQKNYLAWFQQKPGKAPKLLIYWASTRESGVPSRFSGSGSGTDFTLTISSLQPEDFATYFCHQYLSSYTFGQGTKVEIKRLEGKPIPNPLLGLDSTGSGDKQLDADVSPKPTIFLPSIAETKLQKAGTYLCLLEKFFPDVIKIHWQEKKSNTILGSQEGNTMKTNDTYMKFSWLTVPEKSLDKEHRCIVRHENNKNGVDQEIIFPPIKTDVITMDPKDNCSKDANDTLLLQLTNTSAYYMYLLLLLKSVVYFAIITCCLLRRTAFCCNGEKSRAKRSGSGATNFSLLKQAGDVEENPGPTSMDWIWRILFLVGAATGAHSFEEVQLVESGGGLVQPGGSLRLSCAASGYTFTSYWLHWVRQAPGKGLEWVGYIRPSTGYTEYNQKFKDRFTISADTSKNTAYLQMNSLRAEDTAVYYCARSRWLLDYWGQGTLVTVSSTREQKLISEEDGSGSQPHTKPSVFVMKNGTNVACLVKEFYPKDIRINLVSSKKITEFDPAIVISPSGKYNAVKLGKYEDSNSVTCSVQHDNKTVHSTDFEVKTDSTDHVKPKETENTKQPSKSCHKPKAIVHTEKVNMMSLTVLGLRMLFAKTVAVNFLLTAKLFFLRAKRSGSGVKQTLNFDLLKLAGDVESNPGPSRGHMTEYKPTVRLATRDDVPRAVRTLAAAFADYPATRHTVDPDRHIERVTELQELFLTRVGLDIGKVWVADDGAAVAVWTTPESVEAGAVFAEIGPRMAELSGSRLAAQQQMEGLLAPHRPKEPAWFLATVGVSPDHQGKGLGSAVVLPGVEAAERAGVPAFLETSAPRNLPFYERLGFTVTADVEVPEGPRTWCMTRKPGA

SEQ ID NO: 21015 - protein, 630 aa, Artificial Sequence
  Synthetic Polypeptide
MALPVTALLLPLALLLHAARPDIQMTQSPSSLSASVGDRVTITCKSSQSLLYSSNQKNYLAWFQQKPGKAPKLLIYWASTRESGVPSRFSGSGSGTDFTLTISSLQPEDFATYFCHQYLSSYTFGQGTKVEIKRLESQPHTKPSVFVMKNGTNVACLVKEFYPKDIRINLVSSKKITEFDPAIVISPSGKYNAVKLGKYEDSNSVTCSVQHDNKTVHSTDFEVKTDSTDHVKPKETENTKQPSKSCHKPKAIVHTEKVNMMSLTVLGLRMLFAKTVAVNFLLTAKLFFLRAKRSGSGATNFSLLKQAGDVEENPGPTSMDWIWRILFLVGAATGAHSFEEVQLVESGGGLVQPGGSLRLSCAASGYTFTSYWLHWVRQAPGKGLEWVGYIRPSTGYTEYNQKFKDRFTISADTSKNTAYLQMNSLRAEDTAVYYCARSRWLLDYWGQGTLVTVSSTRDKQLDADVSPKPTIFLPSIAETKLQKAGTYLCLLEKFFPDVIKIHWQEKKSNTILGSQEGNTMKTNDTYMKFSWLTVPEKSLDKEHRCIVRHENNKNGVDQEIIFPPIKTDVITMDPKDNCSKDANDTLLLQLTNTSAYYMYLLLLLKSVVYFAIITCCLLRRTAFCCNGEKS

SEQ ID NO: 21016 - protein, 907 aa, Artificial Sequence
  Synthetic Polypeptide
MALPVTALLLPLALLLHAARPLEGKPIPNPLLGLDSTGSGDKQLDADVSPKPTIFLPSIAETKLQKAGTYLCLLEKFFPDVIKIHWQEKKSNTILGSQEGNTMKTNDTYMKFSWLTVPEKSLDKEHRCIVRHENNKNGVDQEIIFPPIKTDVITMDPKDNCSKDANDTLLLQLTNTSAYYMYLLLLLKSVVYFAIITCCLLRRTAFCCNGEKSRAKRSGSGATNFSLLKQAGDVEENPGPTSMALPVTALLLPLALLLHAARPDIQMTQSPSSLSASVGDRVTITCKSSQSLLYSSNQKNYLAWFQQKPGKAPKLLIYWASTRESGVPSRFSGSGSGTDFTLTISSLQPEDFATYFCHQYLSSYTFGQGTKVEIKRGGGGSGGGGSGGGGSEVQLVESGGGLVQPGGSLRLSCAASGYTFTSYWLHWVRQAPGKGLEWVGYIRPSTGYTEYNQKFKDRFTISADTSKNTAYLQMNSLRAEDTAVYYCARSRWLLDYWGQGTLVTVSSTREQKLISEEDGSGSQPHTKPSVFVMKNGTNVACLVKEFYPKDIRINLVSSKKITEFDPAIVISPSGKYNAVKLGKYEDSNSVTCSVQHDNKTVHSTDFEVKTDSTDHVKPKETENTKQPSKSCHKPKAIVHTEKVNMMSLTVLGLRMLFAKTVAVNFLLTAKLFFLRAKRSGSGVKQTLNFDLLKLAGDVESNPGPSRGHMTEYKPTVRLATRDDVPRAVRTLAAAFADYPATRHTVDPDRHIERVTELQELFLTRVGLDIGKVWVADDGAAVAVWTTPESVEAGAVFAEIGPRMAELSGSRLAAQQQMEGLLAPHRPKEPAWFLATVGVSPDHQGKGLGSAVVLPGVEAAERAGVPAFLETSAPRNLPFYERLGFTVTADVEVPEGPRTWCMTRKPGA

SEQ ID NO: 21017 - protein, 1032 aa, Artificial Sequence
  Synthetic Polypeptide
MALPVTALLLPLALLLHAARPDIQMTQSPSSLSASVGDRVTITCKSSQSLLYSSNQKNYLAWFQQKPGKAPKLLIYWASTRESGVPSRFSGSGSGTDFTLTISSLQPEDFATYFCHQYLSSYTFGQGTKVEIKRGQPKANPTVTLFPPSSEELQANKATLVCLISDFYPGAVTVAWKADGSPVKAGVETTKPSKQSNNKYAASSYLSLTPEQWKSHRSYSCQVTHEGSTVEKTVAPTECSGSQSFGLLDPKLCYLLDGILFIYGVILTALFLRVKFSRSADAPAYQQGQNQLYNELNLGRREEYDVLDKRRGRDPEMGGKPQRRKNPQEGLYNELQKDKMAEAYSEIGMKGERRRGKGHDGLYQGLSTATKDTYDALHMQALPPRRAKRSGSGATNFSLLKQAGDVEENPGPTSMDWIWRILFLVGAATGAHSFEEVQLVESGGGLVQPGGSLRLSCAASGYTFTSYWLHWVRQAPGKGLEWVGYIRPSTGYTEYNQKFKDRFTISADTSKNTAYLQMNSLRAEDTAVYYCARSRWLLDYWGQGTLVTVSSASTKGPSVFPLAPSSKSTSGGTAALGCLVKDYFPEPVTVSWNSGALTSGVHTFPAVLQSSGLYSLSSVVTVPSSSLGTQTYICNVNHKPSNTKVDKRVEPKSCGTQSFGLLDPKLCYLLDGILFIYGVILTALFLRVKFSRSADAPAYQQGQNQLYNELNLGRREEYDVLDKRRGRDPEMGGKPQRRKNPQEGLYNELQKDKMAEAYSEIGMKGERRRGKGHDGLYQGLSTATKDTYDALHMQALPPRRAKRSGSGVKQTLNFDLLKLAGDVESNPGPSRGHMTEYKPTVRLATRDDVPRAVRTLAAAFADYPATRHTVDPDRHIERVTELQELFLTRVGLDIGKVWVADDGAAVAVWTTPESVEAGAVFAEIGPRMAELSGSRLAAQQQMEGLLAPHRPKEPAWFLATVGVSPDHQGKGLGSAVVLPGVEAAERAGVPAFLETSAPRNLPFYERLGFTVTADVEVPEGPRTWCMTRKPGA

SEQ ID NO: 21018 - protein, 818 aa, Artificial Sequence
  Synthetic Polypeptide
MALPVTALLLPLALLLHAARPDIQMTQSPSSLSASVGDRVTITCKSSQSLLYSSNQKNYLAWFQQKPGKAPKLLIYWASTRESGVPSRFSGSGSGTDFTLTISSLQPEDFATYFCHQYLSSYTFGQGTKVEIKRLEDLKNVFPPEVAVFEPSEAEISHTQKATLVCLATGFYPDHVELSWWVNGKEVHSGVSTDPQPLKEQPALNDSRYCLSSRLRVSATFWQNPRNHFRCQVQFYGLSENDEWTQDRAKPVTQIVSAEAWGRADCGSQSFGLLDPKLCYLLDGILFIYGVILTALFLRVKFSRSADAPAYQQGQNQLYNELNLGRREEYDVLDKRRGRDPEMGGKPQRRKNPQEGLYNELQKDKMAEAYSEIGMKGERRRGKGHDGLYQGLSTATKDTYDALHMQALPPRRAKRSGSGATNFSLLKQAGDVEENPGPTSMDWIWRILFLVGAATGAHSFEEVQLVESGGGLVQPGGSLRLSCAASGYTFTSYWLHWVRQAPGKGLEWVGYIRPSTGYTEYNQKFKDRFTISADTSKNTAYLQMNSLRAEDTAVYYCARSRWLLDYWGQGTLVTVSSTRIQNPDPAVYQLRDSKSSDKSVCLFTDFDSQTNVSQSKDSDVYITDKTVLDMRSMDFKSNSAVAWSNKSDFACANAFNNSIIPEDTFFPSPESSCGTQSFGLLDPKLCYLLDGILFIYGVILTALFLRVKFSRSADAPAYQQGQNQLYNELNLGRREEYDVLDKRRGRDPEMGGKPQRRKNPQEGLYNELQKDKMAEAYSEIGMKGERRRGKGHDGLYQGLSTATKDTYDALHMQALPPR

SEQ ID NO: 21019 - protein, 818 aa, Artificial Sequence
  Synthetic Polypeptide
MALPVTALLLPLALLLHAARPDIQMTQSPSSLSASVGDRVTITCKSSQSLLYSSNQKNYLAWFQQKPGKAPKLLIYWASTRESGVPSRFSGSGSGTDFTLTISSLQPEDFATYFCHQYLSSYTFGQGTKVEIKRLEDLKNVFPPEVAVFEPSKAEIAHTQKATLVCLATGFYPDHVELSWWVNGKEVHSGVCTDPQPLKEQPALNDSRYCLSSRLRVSATFWQNPRNHFRCQVQFYGLSENDEWTQDRAKPVTQIVSAEAWGRADCGSQSFGLLDPKLCYLLDGILFIYGVILTALFLRVKFSRSADAPAYQQGQNQLYNELNLGRREEYDVLDKRRGRDPEMGGKPQRRKNPQEGLYNELQKDKMAEAYSEIGMKGERRRGKGHDGLYQGLSTATKDTYDALHMQALPPRRAKRSGSGATNFSLLKQAGDVEENPGPTSMDWIWRILFLVGAATGAHSFEEVQLVESGGGLVQPGGSLRLSCAASGYTFTSYWLHWVRQAPGKGLEWVGYIRPSTGYTEYNQKFKDRFTISADTSKNTAYLQMNSLRAEDTAVYYCARSRWLLDYWGQGTLVTVSSTRIQNPDPAVYQLRDSKSSDKSVCLFTDFDSQTNVSQSKDSDVYITDKCVLDMRSMDFKSNSAVAWSNKSDFACANAFNNSIIPEDTFFPSSDVPCGTQSFGLLDPKLCYLLDGILFIYGVILTALFLRVKFSRSADAPAYQQGQNQLYNELNLGRREEYDVLDKRRGRDPEMGGKPQRRKNPQEGLYNELQKDKMAEAYSEIGMKGERRRGKGHDGLYQGLSTATKDTYDALHMQALPPR

SEQ ID NO: 21020 - protein, 889 aa, Artificial Sequence
  Synthetic Polypeptide
MALPVTALLLPLALLLHAARPDIQMTQSPSSLSASVGDRVTITCKSSQSLLYSSNQKNYLAWFQQKPGKAPKLLIYWASTRESGVPSRFSGSGSGTDFTLTISSLQPEDFATYFCHQYLSSYTFGQGTKVEIKRLEGKPIPNPLLGLDSTGSGEDLKNVFPPEVAVFEPSEAEISHTQKATLVCLATGFYPDHVELSWWVNGKEVHSGVSTDPQPLKEQPALNDSRYCLSSRLRVSATFWQNPRNHFRCQVQFYGLSENDEWTQDRAKPVTQIVSAEAWGRADCGSQSFGLLDPKLCYLLDGILFIYGVILTALFLRVKFSRSADAPAYQQGQNQLYNELNLGRREEYDVLDKRRGRDPEMGGKPQRRKNPQEGLYNELQKDKMAEAYSEIGMKGERRRGKGHDGLYQGLSTATKDTYDALHMQALPPRRAKRSGSGATNFSLLKQAGDVEENPGPTSMDWIWRILFLVGAATGAHSFEEVQLVESGGGLVQPGGSLRLSCAASGYTFTSYWLHWVRQAPGKGLEWVGYIRPSTGYTEYNQKFKDRFTISADTSKNTAYLQMNSLRAEDTAVYYCARSRWLLDYWGQGTLVTVSSTREQKLISEEDGSGIQNPDPAVYQLRDSKSSDKSVCLFTDFDSQTNVSQSKDSDVYITDKTVLDMRSMDFKSNSAVAWSNKSDFACANAFNNSIIPEDTFFPSPESSCGTQSFGLLDPKLCYLLDGILFIYGVILTALFLRSKRSRLLHSDYMNMTPRRPGPTRKHYQPYAPPRDFAAYRSRVKFSRSADAPAYQQGQNQLYNELNLGRREEYDVLDKRRGRDPEMGGKPQRRKNPQEGLYNELQKDKMAEAYSEIGMKGERRRGKGHDGLYQGLSTATKDTYDALHMQALPPR

SEQ ID NO: 21021 - protein, 930 aa, Artificial Sequence
  Synthetic Polypeptide
MALPVTALLLPLALLLHAARPDIQMTQSPSSLSASVGDRVTITCKSSQSLLYSSNQKNYLAWFQQKPGKAPKLLIYWASTRESGVPSRFSGSGSGTDFTLTISSLQPEDFATYFCHQYLSSYTFGQGTKVEIKRLEGKPIPNPLLGLDSTGSGEDLKNVFPPEVAVFEPSEAEISHTQKATLVCLATGFYPDHVELSWWVNGKEVHSGVSTDPQPLKEQPALNDSRYCLSSRLRVSATFWQNPRNHFRCQVQFYGLSENDEWTQDRAKPVTQIVSAEAWGRADCGSQSFGLLDPKLCYLLDGILFIYGVILTALFLRSKRSRLLHSDYMNMTPRRPGPTRKHYQPYAPPRDFAAYRSRVKFSRSADAPAYQQGQNQLYNELNLGRREEYDVLDKRRGRDPEMGGKPQRRKNPQEGLYNELQKDKMAEAYSEIGMKGERRRGKGHDGLYQGLSTATKDTYDALHMQALPPRRAKRSGSGATNFSLLKQAGDVEENPGPTSMDWIWRILFLVGAATGAHSFEEVQLVESGGGLVQPGGSLRLSCAASGYTFTSYWLHWVRQAPGKGLEWVGYIRPSTGYTEYNQKFKDRFTISADTSKNTAYLQMNSLRAEDTAVYYCARSRWLLDYWGQGTLVTVSSTREQKLISEEDGSGIQNPDPAVYQLRDSKSSDKSVCLFTDFDSQTNVSQSKDSDVYITDKTVLDMRSMDFKSNSAVAWSNKSDFACANAFNNSIIPEDTFFPSPESSCGTQSFGLLDPKLCYLLDGILFIYGVILTALFLRSKRSRLLHSDYMNMTPRRPGPTRKHYQPYAPPRDFAAYRSRVKFSRSADAPAYQQGQNQLYNELNLGRREEYDVLDKRRGRDPEMGGKPQRRKNPQEGLYNELQKDKMAEAYSEIGMKGERRRGKGHDGLYQGLSTATKDTYDALHMQALPPR

SEQ ID NO: 21022 - protein, 891 aa, Artificial Sequence
  Synthetic Polypeptide
MALPVTALLLPLALLLHAARPDIQMTQSPSSLSASVGDRVTITCKSSQSLLYSSNQKNYLAWFQQKPGKAPKLLIYWASTRESGVPSRFSGSGSGTDFTLTISSLQPEDFATYFCHQYLSSYTFGQGTKVEIKRLEGKPIPNPLLGLDSTGSGEDLKNVFPPEVAVFEPSEAEISHTQKATLVCLATGFYPDHVELSWWVNGKEVHSGVSTDPQPLKEQPALNDSRYCLSSRLRVSATFWQNPRNHFRCQVQFYGLSENDEWTQDRAKPVTQIVSAEAWGRADCGSQSFGLLDPKLCYLLDGILFIYGVILTALFLRVKFSRSADAPAYQQGQNQLYNELNLGRREEYDVLDKRRGRDPEMGGKPQRRKNPQEGLYNELQKDKMAEAYSEIGMKGERRRGKGHDGLYQGLSTATKDTYDALHMQALPPRRAKRSGSGATNFSLLKQAGDVEENPGPTSMDWIWRILFLVGAATGAHSFEEVQLVESGGGLVQPGGSLRLSCAASGYTFTSYWLHWVRQAPGKGLEWVGYIRPSTGYTEYNQKFKDRFTISADTSKNTAYLQMNSLRAEDTAVYYCARSRWLLDYWGQGTLVTVSSTREQKLISEEDLGSGIQNPDPAVYQLRDSKSSDKSVCLFTDFDSQTNVSQSKDSDVYITDKTVLDMRSMDFKSNSAVAWSNKSDFACANAFNNSIIPEDTFFPSPESSCGTQSFGLLDPKLCYLLDGILFIYGVILTALFLKRGRKKLLYIFKQPFMRPVQTTQEEDGCSCRFPEEEEGGCELRVKFSRSADAPAYQQGQNQLYNELNLGRREEYDVLDKRRGRDPEMGGKPQRRKNPQEGLYNELQKDKMAEAYSEIGMKGERRRGKGHDGLYQGLSTATKDTYDALHMQALPPR

SEQ ID NO: 21023 - protein, 933 aa, Artificial Sequence
  Synthetic Polypeptide
MALPVTALLLPLALLLHAARPDIQMTQSPSSLSASVGDRVTITCKSSQSLLYSSNQKNYLAWFQQKPGKAPKLLIYWASTRESGVPSRFSGSGSGTDFTLTISSLQPEDFATYFCHQYLSSYTFGQGTKVEIKRLEGKPIPNPLLGLDSTGSGEDLKNVFPPEVAVFEPSEAEISHTQKATLVCLATGFYPDHVELSWWVNGKEVHSGVSTDPQPLKEQPALNDSRYCLSSRLRVSATFWQNPRNHFRCQVQFYGLSENDEWTQDRAKPVTQIVSAEAWGRADCGSQSFGLLDPKLCYLLDGILFIYGVILTALFLKRGRKKLLYIFKQPFMRPVQTTQEEDGCSCRFPEEEEGGCELRVKFSRSADAPAYQQGQNQLYNELNLGRREEYDVLDKRRGRDPEMGGKPQRRKNPQEGLYNELQKDKMAEAYSEIGMKGERRRGKGHDGLYQGLSTATKDTYDALHMQALPPRRAKRSGSGATNFSLLKQAGDVEENPGPTSMDWIWRILFLVGAATGAHSFEEVQLVESGGGLVQPGGSLRLSCAASGYTFTSYWLHWVRQAPGKGLEWVGYIRPSTGYTEYNQKFKDRFTISADTSKNTAYLQMNSLRAEDTAVYYCARSRWLLDYWGQGTLVTVSSTREQKLISEEDLGSGIQNPDPAVYQLRDSKSSDKSVCLFTDFDSQTNVSQSKDSDVYITDKTVLDMRSMDFKSNSAVAWSNKSDFACANAFNNSIIPEDTFFPSPESSCGTQSFGLLDPKLCYLLDGILFIYGVILTALFLKRGRKKLLYIFKQPFMRPVQTTQEEDGCSCRFPEEEEGGCELRVKFSRSADAPAYQQGQNQLYNELNLGRREEYDVLDKRRGRDPEMGGKPQRRKNPQEGLYNELQKDKMAEAYSEIGMKGERRRGKGHDGLYQGLSTATKDTYDALHMQALPPR

SEQ ID NO: 21024 - protein, 823 aa, Artificial Sequence
  Synthetic Polypeptide
MALPVTALLLPLALLLHAARPDIQMTQSPSSLSASVGDRVTITCKSSQSLLYSSNQKNYLAWFQQKPGKAPKLLIYWASTRESGVPSRFSGSGSGTDFTLTISSLQPEDFATYFCHQYLSSYTFGQGTKVEIKRLEQSFGLLDPKLCYLLDGILFIYGVILTALFLRVKFSRSADAPAYQQGQNQLYNELNLGRREEYDVLDKRRGRDPEMGGKPQRRKNPQEGLYNELQKDKMAEAYSEIGMKGERRRGKGHDGLYQGLSTATKDTYDALHMQALPPRRAKRSGSGATNFSLLKQAGDVEENPGPTSMDWIWRILFLVGAATGAHSFEEVQLVESGGGLVQPGGSLRLSCAASGYTFTSYWLHWVRQAPGKGLEWVGYIRPSTGYTEYNQKFKDRFTISADTSKNTAYLQMNSLRAEDTAVYYCARSRWLLDYWGQGTLVTVSSTRQSFGLLDPKLCYLLDGILFIYGVILTALFLRVKFSRSADAPAYQQGQNQLYNELNLGRREEYDVLDKRRGRDPEMGGKPQRRKNPQEGLYNELQKDKMAEAYSEIGMKGERRRGKGHDGLYQGLSTATKDTYDALHMQALPPRRAKRSGSGVKQTLNFDLLKLAGDVESNPGPSRGHMTEYKPTVRLATRDDVPRAVRTLAAAFADYPATRHTVDPDRHIERVTELQELFLTRVGLDIGKVWVADDGAAVAVWTTPESVEAGAVFAEIGPRMAELSGSRLAAQQQMEGLLAPHRPKEPAWFLATVGVSPDHQGKGLGSAVVLPGVEAAERAGVPAFLETSAPRNLPFYERLGFTVTADVEVPEGPRTWCMTRKPGA

SEQ ID NO: 21025 - protein, 648 aa, Artificial Sequence
  Synthetic Polypeptide
MALPVTALLLPLALLLHAARPDIQMTQSPSSLSASVGDRVTITCKSSQSLLYSSNQKNYLAWFQQKPGKAPKLLIYWASTRESGVPSRFSGSGSGTDFTLTISSLQPEDFATYFCHQYLSSYTFGQGTKVEIKRLEGQPKANPTVTLFPPSSEELQANKATLVCLISDFYPGAVTVAWKADGSPVKAGVETTKPSKQSNNKYAASSYLSLTPEQWKSHRSYSCQVTHEGSTVEKTVAPTECSPIKTDVITMDPKDNCSKDANDTLLLQLTNTSAYYMYLLLLLKSVVYFAIITCCLLRRTAFCCNGEKSRAKRSGSGATNFSLLKQAGDVEENPGPTSMDWIWRILFLVGAATGAHSFEEVQLVESGGGLVQPGGSLRLSCAASGYTFTSYWLHWVRQAPGKGLEWVGYIRPSTGYTEYNQKFKDRFTISADTSKNTAYLQMNSLRAEDTAVYYCARSRWLLDYWGQGTLVTVSSTRASTKGPSVFPLAPSSKSTSGGTAALGCLVKDYFPEPVTVSWNSGALTSGVHTFPAVLQSSGLYSLSSVVTVPSSSLGTQTYICNVNHKPSNTKVDKRVEPKSCEVKTDSTDHVKPKETENTKQPSKSCHKPKAIVHTEKVNMMSLTVLGLRMLFAKTVAVNFLLTAKLFFL

SEQ ID NO: 21026 - protein, 626 aa, Artificial Sequence
  Synthetic Polypeptide
MALPVTALLLPLALLLHAARPDIQMTQSPSSLSASVGDRVTITCKSSQSLLYSSNQKNYLAWFQQKPGKAPKLLIYWASTRESGVPSRFSGSGSGTDFTLTISSLQPEDFATYFCHQYLSSYTFGQGTKVEIKRLEGQPKANPTVTLFPPSSEELQANKATLVCLISDFYPGAVTVAWKADGSPVKAGVETTKPSKQSNNKYAASSYLSLTPEQWKSHRSYSCQVTHEGSTVEKTVAPTECSGRADCGITSASYHQGVLSATILYEILLGKATLYAVLVSALVLMAMVKRKDSRGRAKRSGSGATNFSLLKQAGDVEENPGPTSMDWIWRILFLVGAATGAHSFEEVQLVESGGGLVQPGGSLRLSCAASGYTFTSYWLHWVRQAPGKGLEWVGYIRPSTGYTEYNQKFKDRFTISADTSKNTAYLQMNSLRAEDTAVYYCARSRWLLDYWGQGTLVTVSSTRASTKGPSVFPLAPSSKSTSGGTAALGCLVKDYFPEPVTVSWNSGALTSGVHTFPAVLQSSGLYSLSSVVTVPSSSLGTQTYICNVNHKPSNTKVDKRVEPKSCIPEDTFFPSSDVPCDVKLVEKSFETDTNLNFQNLSVIGFRILLLKVAGFNLLMTLRLWSS

SEQ ID NO: 21027 - protein, 626 aa, Artificial Sequence
  Synthetic Polypeptide
MALPVTALLLPLALLLHAARPDIQMTQSPSSLSASVGDRVTITCKSSQSLLYSSNQKNYLAWFQQKPGKAPKLLIYWASTRESGVPSRFSGSGSGTDFTLTISSLQPEDFATYFCHQYLSSYTFGQGTKVEIKRLEGQPKANPTVTLFPPSSEELQANKATLVCLISDFYPGAVTVAWKADGSPVKAGVETTKPSKQSNNKYAASSYLSLTPEQWKSHRSYSCQVTHEGSTVEKTVAPTECSGRADCGFTSESYQQGVLSATILYEILLGKATLYAVLVSALVLMAMVKRKDSRGRAKRSGSGATNFSLLKQAGDVEENPGPTSMDWIWRILFLVGAATGAHSFEEVQLVESGGGLVQPGGSLRLSCAASGYTFTSYWLHWVRQAPGKGLEWVGYIRPSTGYTEYNQKFKDRFTISADTSKNTAYLQMNSLRAEDTAVYYCARSRWLLDYWGQGTLVTVSSTRASTKGPSVFPLAPSSKSTSGGTAALGCLVKDYFPEPVTVSWNSGALTSGVHTFPAVLQSSGLYSLSSVVTVPSSSLGTQTYICNVNHKPSNTKVDKRVEPKSCIPEDTFFPSPESSCDVKLVEKSFETDTNLNFQNLSVIGFRILLLKVAGFNLLMTLRLWSS

SEQ ID NO: 21028 - protein, 452 aa, Artificial Sequence
  Synthetic Polypeptide
MALPVTALLLPLALLLHAARPDIQMTQSPSSLSASVGDRVTITCKSSQSLLYSSNQKNYLAWFQQKPGKAPKLLIYWASTRESGVPSRFSGSGSGTDFTLTISSLQPEDFATYFCHQYLSSYTFGQGTKVEIKRGGGGSGGGGSGGGGSEVQLVESGGGLVQPGGSLRLSCAASGYTFTSYWLHWVRQAPGKGLEWVGYIRPSTGYTEYNQKFKDRFTISADTSKNTAYLQMNSLRAEDTAVYYCARSRWLLDYWGQGTLVTVSSTRDGNEEMGGITQTPYKVSISGTTVILTCPQYPGSEILWQHNDKNIGGDEDDKNIGSDEDHLSLKEFSELEQSGYYVCYPRGSKPEDANFYLYLRARVCENCMEMDVMSVATIVIVDICITGGLLLLVYYWSKNRKAKAKPVTRGAGAGGRQRGQNKERPPPVPNPDYEPIRKGQRDLYSGLNQRRI

SEQ ID NO: 21029 - protein, 417 aa, Artificial Sequence
  Synthetic Polypeptide
MALPVTALLLPLALLLHAARPDIQMTQSPSSLSASVGDRVTITCKSSQSLLYSSNQKNYLAWFQQKPGKAPKLLIYWASTRESGVPSRFSGSGSGTDFTLTISSLQPEDFATYFCHQYLSSYTFGQGTKVEIKRGGGGSGGGGSGGGGSEVQLVESGGGLVQPGGSLRLSCAASGYTFTSYWLHWVRQAPGKGLEWVGYIRPSTGYTEYNQKFKDRFTISADTSKNTAYLQMNSLRAEDTAVYYCARSRWLLDYWGQGTLVTVSSTRFKIPIEELEDRVFVNCNTSITWVEGTVGTLLSDITRLDLGKRILDPRGIYRCNGTDIYKDKESTVQVHYRMCQSCVELDPATVAGIIVTDVIATLLLALGVFCFAGHETGRLSGAADTQALLRNDQVYQPLRDRDDAQYSHLGGNWARNK

SEQ ID NO: 21030 - protein, 427 aa, Artificial Sequence
  Synthetic Polypeptide
MALPVTALLLPLALLLHAARPDIQMTQSPSSLSASVGDRVTITCKSSQSLLYSSNQKNYLAWFQQKPGKAPKLLIYWASTRESGVPSRFSGSGSGTDFTLTISSLQPEDFATYFCHQYLSSYTFGQGTKVEIKRGGGGSGGGGSGGGGSEVQLVESGGGLVQPGGSLRLSCAASGYTFTSYWLHWVRQAPGKGLEWVGYIRPSTGYTEYNQKFKDRFTISADTSKNTAYLQMNSLRAEDTAVYYCARSRWLLDYWGQGTLVTVSSTRQSIKGNHLVKVYDYQEDGSVLLTCDAEAKNITWFKDGKMIGFLTEDKKKWNLGSNAKDPRGMYQCKGSQNKSKPLQVYYRMCQNCIELNAATISGFLFAEIVSIFVLAVGVYFIAGQDGVRQSRASDKQTLLPNDQLYQPLKDREDDQYSHLQGNQLRRN

SEQ ID NO: 21031 - protein, 410 aa, Artificial Sequence
  Synthetic Polypeptide
MALPVTALLLPLALLLHAARPDIQMTQSPSSLSASVGDRVTITCKSSQSLLYSSNQKNYLAWFQQKPGKAPKLLIYWASTRESGVPSRFSGSGSGTDFTLTISSLQPEDFATYFCHQYLSSYTFGQGTKVEIKRGGGGSGGGGSGGGGSEVQLVESGGGLVQPGGSLRLSCAASGYTFTSYWLHWVRQAPGKGLEWVGYIRPSTGYTEYNQKFKDRFTISADTSKNTAYLQMNSLRAEDTAVYYCARSRWLLDYWGQGTLVTVSSTRQSFGLLDPKLCYLLDGILFIYGVILTALFLRVKFSRSADAPAYQQGQNQLYNELNLGRREEYDVLDKRRGRDPEMGGKPQRRKNPQEGLYNELQKDKMAEAYSEIGMKGERRRGKGHDGLYQGLSTATKDTYDALHMQALPPR

SEQ ID NO: 21032 - protein, 452 aa, Artificial Sequence
  Synthetic Polypeptide
MALPVTALLLPLALLLHAARPEVQLVESGGGLVQPGGSLRLSCAASGYTFTSYWLHWVRQAPGKGLEWVGYIRPSTGYTEYNQKFKDRFTISADTSKNTAYLQMNSLRAEDTAVYYCARSRWLLDYWGQGTLVTVSSGGGGSGGGGSGGGGSDIQMTQSPSSLSASVGDRVTITCKSSQSLLYSSNQKNYLAWFQQKPGKAPKLLIYWASTRESGVPSRFSGSGSGTDFTLTISSLQPEDFATYFCHQYLSSYTFGQGTKVEIKRTRDGNEEMGGITQTPYKVSISGTTVILTCPQYPGSEILWQHNDKNIGGDEDDKNIGSDEDHLSLKEFSELEQSGYYVCYPRGSKPEDANFYLYLRARVCENCMEMDVMSVATIVIVDICITGGLLLLVYYWSKNRKAKAKPVTRGAGAGGRQRGQNKERPPPVPNPDYEPIRKGQRDLYSGLNQRRI

SEQ ID NO: 21033 - protein, 417 aa, Artificial Sequence
  Synthetic Polypeptide
MALPVTALLLPLALLLHAARPEVQLVESGGGLVQPGGSLRLSCAASGYTFTSYWLHWVRQAPGKGLEWVGYIRPSTGYTEYNQKFKDRFTISADTSKNTAYLQMNSLRAEDTAVYYCARSRWLLDYWGQGTLVTVSSGGGGSGGGGSGGGGSDIQMTQSPSSLSASVGDRVTITCKSSQSLLYSSNQKNYLAWFQQKPGKAPKLLIYWASTRESGVPSRFSGSGSGTDFTLTISSLQPEDFATYFCHQYLSSYTFGQGTKVEIKRTRFKIPIEELEDRVFVNCNTSITWVEGTVGTLLSDITRLDLGKRILDPRGIYRCNGTDIYKDKESTVQVHYRMCQSCVELDPATVAGIIVTDVIATLLLALGVFCFAGHETGRLSGAADTQALLRNDQVYQPLRDRDDAQYSHLGGNWARNK

SEQ ID NO: 21034 - protein, 427 aa, Artificial Sequence
  Synthetic Polypeptide
MALPVTALLLPLALLLHAARPEVQLVESGGGLVQPGGSLRLSCAASGYTFTSYWLHWVRQAPGKGLEWVGYIRPSTGYTEYNQKFKDRFTISADTSKNTAYLQMNSLRAEDTAVYYCARSRWLLDYWGQGTLVTVSSGGGGSGGGGSGGGGSDIQMTQSPSSLSASVGDRVTITCKSSQSLLYSSNQKNYLAWFQQKPGKAPKLLIYWASTRESGVPSRFSGSGSGTDFTLTISSLQPEDFATYFCHQYLSSYTFGQGTKVEIKRTRQSIKGNHLVKVYDYQEDGSVLLTCDAEAKNITWFKDGKMIGFLTEDKKKWNLGSNAKDPRGMYQCKGSQNKSKPLQVYYRMCQNCIELNAATISGFLFAEIVSIFVLAVGVYFIAGQDGVRQSRASDKQTLLPNDQLYQPLKDREDDQYSHLQGNQLRRN

SEQ ID NO: 21035 - protein, 410 aa, Artificial Sequence
  Synthetic Polypeptide
MALPVTALLLPLALLLHAARPEVQLVESGGGLVQPGGSLRLSCAASGYTFTSYWLHWVRQAPGKGLEWVGYIRPSTGYTEYNQKFKDRFTISADTSKNTAYLQMNSLRAEDTAVYYCARSRWLLDYWGQGTLVTVSSGGGGSGGGGSGGGGSDIQMTQSPSSLSASVGDRVTITCKSSQSLLYSSNQKNYLAWFQQKPGKAPKLLIYWASTRESGVPSRFSGSGSGTDFTLTISSLQPEDFATYFCHQYLSSYTFGQGTKVEIKRTRQSFGLLDPKLCYLLDGILFIYGVILTALFLRVKFSRSADAPAYQQGQNQLYNELNLGRREEYDVLDKRRGRDPEMGGKPQRRKNPQEGLYNELQKDKMAEAYSEIGMKGERRRGKGHDGLYQGLSTATKDTYDALHMQALPPR

SEQ ID NO: 21036 - protein, 643 aa, Artificial Sequence
  Synthetic Polypeptide
MALPVTALLLPLALLLHAARPDIQMTQSPSSLSASVGDRVTITCKSSQSLLYSSNQKNYLAWFQQKPGKAPKLLIYWASTRESGVPSRFSGSGSGTDFTLTISSLQPEDFATYFCHQYLSSYTFGQGTKVEIKRGGGGSGGGGSGGGGSEVQLVESGGGLVQPGGSLRLSCAASGYTFTSYWLHWVRQAPGKGLEWVGYIRPSTGYTEYNQKFKDRFTISADTSKNTAYLQMNSLRAEDTAVYYCARSRWLLDYWGQGTLVTVSSTRGSGIQNPDPAVYQLRDSKSSDKSVCLFTDFDSQTNVSQSKDSDVYITDKTVLDMRSMDFKSNSAVAWSNKSDFACANAFNNSIIPEDTFFPSPESSCDVKLVEKSFETDTNLNFQNLSVIGFRILLLKVAGFNLLMTLRLWSSRAKRSGSGVKQTLNFDLLKLAGDVESNPGPSRGHMTEYKPTVRLATRDDVPRAVRTLAAAFADYPATRHTVDPDRHIERVTELQELFLTRVGLDIGKVWVADDGAAVAVWTTPESVEAGAVFAEIGPRMAELSGSRLAAQQQMEGLLAPHRPKEPAWFLATVGVSPDHQGKGLGSAVVLPGVEAAERAGVPAFLETSAPRNLPFYERLGFTVTADVEVPEGPRTWCMTRKPGA

SEQ ID NO: 21037 - protein, 675 aa, Artificial Sequence
  Synthetic Polypeptide
MALPVTALLLPLALLLHAARPDIQMTQSPSSLSASVGDRVTITCKSSQSLLYSSNQKNYLAWFQQKPGKAPKLLIYWASTRESGVPSRFSGSGSGTDFTLTISSLQPEDFATYFCHQYLSSYTFGQGTKVEIKRGGGGSGGGGSGGGGSEVQLVESGGGLVQPGGSLRLSCAASGYTFTSYWLHWVRQAPGKGLEWVGYIRPSTGYTEYNQKFKDRFTISADTSKNTAYLQMNSLRAEDTAVYYCARSRWLLDYWGQGTLVTVSSLEDLKNVFPPEVAVFEPSEAEISHTQKATLVCLATGFYPDHVELSWWVNGKEVHSGVSTDPQPLKEQPALNDSRYCLSSRLRVSATFWQNPRNHFRCQVQFYGLSENDEWTQDRAKPVTQIVSAEAWGRADCGFTSESYQQGVLSATILYEILLGKATLYAVLVSALVLMAMVKRKDSRGRAKRSGSGATNFSLLKQAGDVEENPGPTRGHMTEYKPTVRLATRDDVPRAVRTLAAAFADYPATRHTVDPDRHIERVTELQELFLTRVGLDIGKVWVADDGAAVAVWTTPESVEAGAVFAEIGPRMAELSGSRLAAQQQMEGLLAPHRPKEPAWFLATVGVSPDHQGKGLGSAVVLPGVEAAERAGVPAFLETSAPRNLPFYERLGFTVTADVEVPEGPRTWCMTRKPGA

SEQ ID NO: 21038 - protein, 725 aa, Artificial Sequence
  Synthetic Polypeptide
MALPVTALLLPLALLLHAARPDIQMTQSPSSLSASVGDRVTITCKSSQSLLYSSNQKNYLAWFQQKPGKAPKLLIYWASTRESGVPSRFSGSGSGTDFTLTISSLQPEDFATYFCHQYLSSYTFGQGTKVEIKRGGGGSGGGGSGGGGSEVQLVESGGGLVQPGGSLRLSCAASGYTFTSYWLHWVRQAPGKGLEWVGYIRPSTGYTEYNQKFKDRFTISADTSKNTAYLQMNSLRAEDTAVYYCARSRWLLDYWGQGTLVTVSSTREQKLISEEDLGSGTPFPSLAPPIMLLVDGKQQMVVVCLVLDVAPPGLDSPIWFSAGNGSALDAFTYGPSPATDGTWTNLAHLSLPSEELASWEPLVCHTGPGAEGHSRSTQPMHLSGEASTARTCPQEPLRGTPGGALWLGVLRLLLFKLLLFDLLLTCSCLCDPAGPLPSPATTTRLRALGSHRLHPATETGGREATSSPRPQPRDRRWGDTPPGRKPGSPVRAKRSGSGVKQTLNFDLLKLAGDVESNPGPSRSRGHMTEYKPTVRLATRDDVPRAVRTLAAAFADYPATRHTVDPDRHIERVTELQELFLTRVGLDIGKVWVADDGAAVAVWTTPESVEAGAVFAEIGPRMAELSGSRLAAQQQMEGLLAPHRPKEPAWFLATVGVSPDHQGKGLGSAVVLPGVEAAERAGVPAFLETSAPRNLPFYERLGFTVTADVEVPEGPRTWCMTRKPGA

SEQ ID NO: 21039 - protein, 544 aa, Artificial Sequence
  Synthetic Polypeptide
MALPVTALLLPLALLLHAARPDIQMTQSPSSLSASVGDRVTITCKSSQSLLYSSNQKNYLAWFQQKPGKAPKLLIYWASTRESGVPSRFSGSGSGTDFTLTISSLQPEDFATYFCHQYLSSYTFGQGTKVEIKRLEDLKNVFPPEVAVFEPSEAEISHTQKATLVCLATGFYPDHVELSWWVNGKEVHSGVSTDPQPLKEQPALNDSRYCLSSRLRVSATFWQNPRNHFRCQVQFYGLSENDEWTQDRAKPVTQIVSAEAWGRADCGFTSESYQQGVLSATILYEILLGKATLYAVLVSALVLMAMVKRKDSRGRAKRSGSGATNFSLLKQAGDVEENPGPTRGHMTEYKPTVRLATRDDVPRAVRTLAAAFADYPATRHTVDPDRHIERVTELQELFLTRVGLDIGKVWVADDGAAVAVWTTPESVEAGAVFAEIGPRMAELSGSRLAAQQQMEGLLAPHRPKEPAWFLATVGVSPDHQGKGLGSAVVLPGVEAAERAGVPAFLETSAPRNLPFYERLGFTVTADVEVPEGPRTWCMTRKPGA

SEQ ID NO: 21040 - protein, 314 aa, Artificial Sequence
  Synthetic Polypeptide
MALPVTALLLPLALLLHAARPDIQMTQSPSSLSASVGDRVTITCKSSQSLLYSSNQKNYLAWFQQKPGKAPKLLIYWASTRESGVPSRFSGSGSGTDFTLTISSLQPEDFATYFCHQYLSSYTFGQGTKVEIKRLEDLKNVFPPEVAVFEPSEAEISHTQKATLVCLATGFYPDHVELSWWVNGKEVHSGVSTDPQPLKEQPALNDSRYCLSSRLRVSATFWQNPRNHFRCQVQFYGLSENDEWTQDRAKPVTQIVSAEAWGRADCGFTSESYQQGVLSATILYEILLGKATLYAVLVSALVLMAMVKRKDSRG

SEQ ID NO: 21041 - protein, 445 aa, Artificial Sequence
  Synthetic Polypeptide
MDWIWRILFLVGAATGAHSFEEVQLVESGGGLVQPGGSLRLSCAASGYTFTSYWLHWVRQAPGKGLEWVGYIRPSTGYTEYNQKFKDRFTISADTSKNTAYLQMNSLRAEDTAVYYCARSRWLLDYWGQGTLVTVSSTRIQNPDPAVYQLRDSKSSDKSVCLFTDFDSQTNVSQSKDSDVYITDKTVLDMRSMDFKSNSAVAWSNKSDFACANAFNNSIIPEDTFFPSPESSCDVKLVEKSFETDTNLNFQNLSVIGFRILLLKVAGFNLLMTLRLWSSRAKRSGSGVKQTLNFDLLKLAGDVESNPGPSRGHMAKPLSQEESTLIERATATINSIPISEDYSVASAALSSDGRIFTGVNVYHFTGGPCAELVVLGTAAAAAAGNLTCIVAIGNENRGILSPCGRCRQVLLDLHPGIKAIVKDSDGQPTAVGIRELLPSGYVWEG

SEQ ID NO: 21042 - protein, 279 aa, Artificial Sequence
  Synthetic Polypeptide
MDWIWRILFLVGAATGAHSFEEVQLVESGGGLVQPGGSLRLSCAASGYTFTSYWLHWVRQAPGKGLEWVGYIRPSTGYTEYNQKFKDRFTISADTSKNTAYLQMNSLRAEDTAVYYCARSRWLLDYWGQGTLVTVSSTRIQNPDPAVYQLRDSKSSDKSVCLFTDFDSQTNVSQSKDSDVYITDKTVLDMRSMDFKSNSAVAWSNKSDFACANAFNNSIIPEDTFFPSPESSCDVKLVEKSFETDTNLNFQNLSVIGFRILLLKVAGFNLLMTLRLWSS

SEQ ID NO: 21043 - protein, 562 aa, Artificial Sequence
  Synthetic Polypeptide
MALPVTALLLPLALLLHAARPDIQMTQSPSSLSASVGDRVTITCKSSQSLLYSSNQKNYLAWFQQKPGKAPKLLIYWASTRESGVPSRFSGSGSGTDFTLTISSLQPEDFATYFCHQYLSSYTFGQGTKVEIKRLEGKPIPNPLLGLDSTGSGEDLKNVFPPEVAVFEPSEAEISHTQKATLVCLATGFYPDHVELSWWVNGKEVHSGVCTDPQPLKEQPALNDSRYCLSSRLRVSATFWQNPRNHFRCQVQFYGLSENDEWTQDRAKPVTQIVSAEAWGRADCGFTSESYQQGVLSATILYEILLGKATLYAVLVSALVLMAMVKRKDSRGRAKRSGSGATNFSLLKQAGDVEENPGPTRGHMTEYKPTVRLATRDDVPRAVRTLAAAFADYPATRHTVDPDRHIERVTELQELFLTRVGLDIGKVWVADDGAAVAVWTTPESVEAGAVFAEIGPRMAELSGSRLAAQQQMEGLLAPHRPKEPAWFLATVGVSPDHQGKGLGSAVVLPGVEAAERAGVPAFLETSAPRNLPFYERLGFTVTADVEVPEGPRTWCMTRKPGA

SEQ ID NO: 21044 - protein, 332 aa, Artificial Sequence
  Synthetic Polypeptide
MALPVTALLLPLALLLHAARPDIQMTQSPSSLSASVGDRVTITCKSSQSLLYSSNQKNYLAWFQQKPGKAPKLLIYWASTRESGVPSRFSGSGSGTDFTLTISSLQPEDFATYFCHQYLSSYTFGQGTKVEIKRLEGKPIPNPLLGLDSTGSGEDLKNVFPPEVAVFEPSEAEISHTQKATLVCLATGFYPDHVELSWWVNGKEVHSGVCTDPQPLKEQPALNDSRYCLSSRLRVSATFWQNPRNHFRCQVQFYGLSENDEWTQDRAKPVTQIVSAEAWGRADCGFTSESYQQGVLSATILYEILLGKATLYAVLVSALVLMAMVKRKDSRG

SEQ ID NO: 21045 - protein, 457 aa, Artificial Sequence
  Synthetic Polypeptide
MDWIWRILFLVGAATGAHSFEEVQLVESGGGLVQPGGSLRLSCAASGYTFTSYWLHWVRQAPGKGLEWVGYIRPSTGYTEYNQKFKDRFTISADTSKNTAYLQMNSLRAEDTAVYYCARSRWLLDYWGQGTLVTVSSTREQKLISEEDGSGIQNPDPAVYQLRDSKSSDKSVCLFTDFDSQTNVSQSKDSDVYITDKCVLDMRSMDFKSNSAVAWSNKSDFACANAFNNSIIPEDTFFPSPESSCDVKLVEKSFETDTNLNFQNLSVIGFRILLLKVAGFNLLMTLRLWSSRAKRSGSGVKQTLNFDLLKLAGDVESNPGPSRGHMAKPLSQEESTLIERATATINSIPISEDYSVASAALSSDGRIFTGVNVYHFTGGPCAELVVLGTAAAAAAGNLTCIVAIGNENRGILSPCGRCRQVLLDLHPGIKAIVKDSDGQPTAVGIRELLPSGYVWEG

SEQ ID NO: 21046 - protein, 291 aa, Artificial Sequence
  Synthetic Polypeptide
MDWIWRILFLVGAATGAHSFEEVQLVESGGGLVQPGGSLRLSCAASGYTFTSYWLHWVRQAPGKGLEWVGYIRPSTGYTEYNQKFKDRFTISADTSKNTAYLQMNSLRAEDTAVYYCARSRWLLDYWGQGTLVTVSSTREQKLISEEDGSGIQNPDPAVYQLRDSKSSDKSVCLFTDFDSQTNVSQSKDSDVYITDKCVLDMRSMDFKSNSAVAWSNKSDFACANAFNNSIIPEDTFFPSPESSCDVKLVEKSFETDTNLNFQNLSVIGFRILLLKVAGFNLLMTLRLWSS

SEQ ID NO: 21047 - protein, 643 aa, Artificial Sequence
  Synthetic Polypeptide
MALPVTALLLPLALLLHAARPDIQMTQSPSSLSASVGDRVTITCKSSQSLLYSSNQKNYLAWFQQKPGKAPKLLIYWASTRESGVPSRFSGSGSGTDFTLTISSLQPEDFATYFCHQYLSSYTFGQGTKVEIKRGGGGSGGGGSGGGGSEVQLVESGGGLVQPGGSLRLSCAASGYTFTSYWLHWVRQAPGKGLEWVGYIRPSTGYTEYNQKFKDRFTISADTSKNTAYLQMNSLRAEDTAVYYCARSRWLLDYWGQGTLVTVSSTRGSGIQNPDPAVYQLRDSKSSDKSVCLFTDFDSQTNVSQSKDSDVYITDKTVLDMRSMDFKSNSAVAWSNKSDFACANAFNNSIIPEDTFFPSSDVPCDVKLVEKSFETDTNLNFQNLSVIGFRILLLKVAGFNLLMTLRLWSSRAKRSGSGVKQTLNFDLLKLAGDVESNPGPSRGHMTEYKPTVRLATRDDVPRAVRTLAAAFADYPATRHTVDPDRHIERVTELQELFLTRVGLDIGKVWVADDGAAVAVWTTPESVEAGAVFAEIGPRMAELSGSRLAAQQQMEGLLAPHRPKEPAWFLATVGVSPDHQGKGLGSAVVLPGVEAAERAGVPAFLETSAPRNLPFYERLGFTVTADVEVPEGPRTWCMTRKPGA

SEQ ID NO: 21048 - protein, 675 aa, Artificial Sequence
  Synthetic Polypeptide
MALPVTALLLPLALLLHAARPDIQMTQSPSSLSASVGDRVTITCKSSQSLLYSSNQKNYLAWFQQKPGKAPKLLIYWASTRESGVPSRFSGSGSGTDFTLTISSLQPEDFATYFCHQYLSSYTFGQGTKVEIKRGGGGSGGGGSGGGGSEVQLVESGGGLVQPGGSLRLSCAASGYTFTSYWLHWVRQAPGKGLEWVGYIRPSTGYTEYNQKFKDRFTISADTSKNTAYLQMNSLRAEDTAVYYCARSRWLLDYWGQGTLVTVSSLEDLKNVFPPEVAVFEPSKAEIAHTQKATLVCLATGFYPDHVELSWWVNGKEVHSGVSTDPQPLKEQPALNDSRYCLSSRLRVSATFWQNPRNHFRCQVQFYGLSENDEWTQDRAKPVTQIVSAEAWGRADCGITSASYHQGVLSATILYEILLGKATLYAVLVSALVLMAMVKRKDSRGRAKRSGSGATNFSLLKQAGDVEENPGPTRGHMTEYKPTVRLATRDDVPRAVRTLAAAFADYPATRHTVDPDRHIERVTELQELFLTRVGLDIGKVWVADDGAAVAVWTTPESVEAGAVFAEIGPRMAELSGSRLAAQQQMEGLLAPHRPKEPAWFLATVGVSPDHQGKGLGSAVVLPGVEAAERAGVPAFLETSAPRNLPFYERLGFTVTADVEVPEGPRTWCMTRKPGA

SEQ ID NO: 21049 - protein, 698 aa, Artificial Sequence
  Synthetic Polypeptide
MALPVTALLLPLALLLHAARPDIQMTQSPSSLSASVGDRVTITCKSSQSLLYSSNQKNYLAWFQQKPGKAPKLLIYWASTRESGVPSRFSGSGSGTDFTLTISSLQPEDFATYFCHQYLSSYTFGQGTKVEIKRGGGGSGGGGSGGGGSEVQLVESGGGLVQPGGSLRLSCAASGYTFTSYWLHWVRQAPGKGLEWVGYIRPSTGYTEYNQKFKDRFTISADTSKNTAYLQMNSLRAEDTAVYYCARSRWLLDYWGQGTLVTVSSTRGSGGGGSGGGGSGDGNEEMGGITQTPYKVSISGTTVILTCPQYPGSEILWQHNDKNIGGDEDDKNIGSDEDHLSLKEFSELEQSGYYVCYPRGSKPEDANFYLYLRARVCENCMEMDVMSVATIVIVDICITGGLLLLVYYWSKNRKAKAKPVTRGAGAGGRQRGQNKERPPPVPNPDYEPIRKGQRDLYSGLNQRRIRAKRSGSGVKQTLNFDLLKLAGDVESNPGPSRGHMTEYKPTVRLATRDDVPRAVRTLAAAFADYPATRHTVDPDRHIERVTELQELFLTRVGLDIGKVWVADDGAAVAVWTTPESVEAGAVFAEIGPRMAELSGSRLAAQQQMEGLLAPHRPKEPAWFLATVGVSPDHQGKGLGSAVVLPGVEAAERAGVPAFLETSAPRNLPFYERLGFTVTADVEVPEGPRTWCMTRKPGA

SEQ ID NO: 21050 - protein, 663 aa, Artificial Sequence
  Synthetic Polypeptide
MALPVTALLLPLALLLHAARPDIQMTQSPSSLSASVGDRVTITCKSSQSLLYSSNQKNYLAWFQQKPGKAPKLLIYWASTRESGVPSRFSGSGSGTDFTLTISSLQPEDFATYFCHQYLSSYTFGQGTKVEIKRGGGGSGGGGSGGGGSEVQLVESGGGLVQPGGSLRLSCAASGYTFTSYWLHWVRQAPGKGLEWVGYIRPSTGYTEYNQKFKDRFTISADTSKNTAYLQMNSLRAEDTAVYYCARSRWLLDYWGQGTLVTVSSTRGSGGGGSGGGGSGFKIPIEELEDRVFVNCNTSITWVEGTVGTLLSDITRLDLGKRILDPRGIYRCNGTDIYKDKESTVQVHYRMCQSCVELDPATVAGIIVTDVIATLLLALGVFCFAGHETGRLSGAADTQALLRNDQVYQPLRDRDDAQYSHLGGNWARNKRAKRSGSGVKQTLNFDLLKLAGDVESNPGPSRGHMTEYKPTVRLATRDDVPRAVRTLAAAFADYPATRHTVDPDRHIERVTELQELFLTRVGLDIGKVWVADDGAAVAVWTTPESVEAGAVFAEIGPRMAELSGSRLAAQQQMEGLLAPHRPKEPAWFLATVGVSPDHQGKGLGSAVVLPGVEAAERAGVPAFLETSAPRNLPFYERLGFTVTADVEVPEGPRTWCMTRKPGA

SEQ ID NO: 21051 - protein, 673 aa, Artificial Sequence
  Synthetic Polypeptide
MALPVTALLLPLALLLHAARPDIQMTQSPSSLSASVGDRVTITCKSSQSLLYSSNQKNYLAWFQQKPGKAPKLLIYWASTRESGVPSRFSGSGSGTDFTLTISSLQPEDFATYFCHQYLSSYTFGQGTKVEIKRGGGGSGGGGSGGGGSEVQLVESGGGLVQPGGSLRLSCAASGYTFTSYWLHWVRQAPGKGLEWVGYIRPSTGYTEYNQKFKDRFTISADTSKNTAYLQMNSLRAEDTAVYYCARSRWLLDYWGQGTLVTVSSTRGSGGGGSGGGGSGQSIKGNHLVKVYDYQEDGSVLLTCDAEAKNITWFKDGKMIGFLTEDKKKWNLGSNAKDPRGMYQCKGSQNKSKPLQVYYRMCQNCIELNAATISGFLFAEIVSIFVLAVGVYFIAGQDGVRQSRASDKQTLLPNDQLYQPLKDREDDQYSHLQGNQLRRNRAKRSGSGVKQTLNFDLLKLAGDVESNPGPSRGHMTEYKPTVRLATRDDVPRAVRTLAAAFADYPATRHTVDPDRHIERVTELQELFLTRVGLDIGKVWVADDGAAVAVWTTPESVEAGAVFAEIGPRMAELSGSRLAAQQQMEGLLAPHRPKEPAWFLATVGVSPDHQGKGLGSAVVLPGVEAAERAGVPAFLETSAPRNLPFYERLGFTVTADVEVPEGPRTWCMTRKPGA

SEQ ID NO: 21052 - protein, 656 aa, Artificial Sequence
  Synthetic Polypeptide
MALPVTALLLPLALLLHAARPDIQMTQSPSSLSASVGDRVTITCKSSQSLLYSSNQKNYLAWFQQKPGKAPKLLIYWASTRESGVPSRFSGSGSGTDFTLTISSLQPEDFATYFCHQYLSSYTFGQGTKVEIKRGGGGSGGGGSGGGGSEVQLVESGGGLVQPGGSLRLSCAASGYTFTSYWLHWVRQAPGKGLEWVGYIRPSTGYTEYNQKFKDRFTISADTSKNTAYLQMNSLRAEDTAVYYCARSRWLLDYWGQGTLVTVSSTRGSGGGGSGGGGSGQSFGLLDPKLCYLLDGILFIYGVILTALFLRVKFSRSADAPAYQQGQNQLYNELNLGRREEYDVLDKRRGRDPEMGGKPQRRKNPQEGLYNELQKDKMAEAYSEIGMKGERRRGKGHDGLYQGLSTATKDTYDALHMQALPPRRAKRSGSGVKQTLNFDLLKLAGDVESNPGPSRGHMTEYKPTVRLATRDDVPRAVRTLAAAFADYPATRHTVDPDRHIERVTELQELFLTRVGLDIGKVWVADDGAAVAVWTTPESVEAGAVFAEIGPRMAELSGSRLAAQQQMEGLLAPHRPKEPAWFLATVGVSPDHQGKGLGSAVVLPGVEAAERAGVPAFLETSAPRNLPFYERLGFTVTADVEVPEGPRTWCMTRKPGA

SEQ ID NO: 21053 - protein, 757 aa, Artificial Sequence
  Synthetic Polypeptide
MALPVTALLLPLALLLHAARPEVQLVESGGGLVQPGGSLRLSCAASGFSFSDFWMSWVRQAPGKGLEWVATISQAGSEKDYVDSVKGRFTISRDNAKKSLYLQMNSLRAEDTAVYYCASGVYSFDYRGQGTLVTVSSGTGGGGSGGGGSGGGGSEFDIQMTQSPSSLSASVGDRVTITCKSSQSLLYSSNQKNYLAWFQQKPGKAPKLLIYWASTRESGVPSRFSGSGSGTDFTLTISSLQPEDFATYFCHQYLSSYTFGQGTKVEIKRLEDLKNVFPPEVAVFEPSEAEISHTQKATLVCLATGFYPDHVELSWWVNGKEVHSGVCTDPQPLKEQPALNDSRYCLSSRLRVSATFWQNPRNHFRCQVQFYGLSENDEWTQDRAKPVTQIVSAEAWGRADCGFTSESYQQGVLSATILYEILLGKATLYAVLVSALVLMAMVKRKDSRGRAKRSGSGATNFSLLKQAGDVEENPGPTSMDWIWRILFLVGAATGAHSFEEVQLVESGGGLVQPGGSLRLSCAASGYTFTSYWLHWVRQAPGKGLEWVGYIRPSTGYTEYNQKFKDRFTISADTSKNTAYLQMNSLRAEDTAVYYCARSRWLLDYWGQGTLVTVSSTRIQNPDPAVYQLRDSKSSDKSVCLFTDFDSQTNVSQSKDSDVYITDKCVLDMRSMDFKSNSAVAWSNKSDFACANAFNNSIIPEDTFFPSPESSCDVKLVEKSFETDTNLNFQNLSVIGFRILLLKVAGFNLLMTLRLWSS

SEQ ID NO: 21054 - protein, 761 aa, Artificial Sequence
  Synthetic Polypeptide
MALPVTALLLPLALLLHAARPEVQLVESGGGLVQPGGSLRLSCAASGFSFSDFWMSWVRQAPGKGLEWVATISQAGSEKDYVDSVKGRFTISRDNAKKSLYLQMNSLRAEDTAVYYCASGVYSFDYRGQGTLVTVSSGTGGGGSGGGGSGGGGSEFDIQMTQSPSSLSASVGDRVTITCKSSQSLLYSSNQKNYLAWFQQKPGKAPKLLIYWASTRESGVPSRFSGSGSGTDFTLTISSLQPEDFATYFCHQYLSSYTFGQGTKVEIKRLEIQNPDPAVYQLRDSKSSDKSVCLFTDFDSQTNVSQSKDSDVYITDKCVLDMRSMDFKSNSAVAWSNKSDFACANAFNNSIIPEDTFFPSPESSCDVKLVEKSFETDTNLNFQNLSVIGFRILLLKVAGFNLLMTLRLWSSRAKRSGSGVKQTLNFDLLKLAGDVESNPGPTSMDWIWRILFLVGAATGAHSFEEVQLVESGGGLVQPGGSLRLSCAASGYTFTSYWLHWVRQAPGKGLEWVGYIRPSTGYTEYNQKFKDRFTISADTSKNTAYLQMNSLRAEDTAVYYCARSRWLLDYWGQGTLVTVSSTREDLKNVFPPEVAVFEPSEAEISHTQKATLVCLATGFYPDHVELSWWVNGKEVHSGVCTDPQPLKEQPALNDSRYCLSSRLRVSATFWQNPRNHFRCQVQFYGLSENDEWTQDRAKPVTQIVSAEAWGRADCGFTSESYQQGVLSATILYEILLGKATLYAVLVSALVLMAMVKRKDSRG

SEQ ID NO: 21055 - protein, 953 aa, Artificial Sequence
  Synthetic Polypeptide
MALPVTALLLPLALLLHAARPEVQLVESGGGLVQPGGSLRLSCAASGFSFSDFWMSWVRQAPGKGLEWVATISQAGSEKDYVDSVKGRFTISRDNAKKSLYLQMNSLRAEDTAVYYCASGVYSFDYRGQGTLVTVSSGTGGGGSGGGGSGGGGSEFDIQMTQSPSSLSASVGDRVTITCKSSQSLLYSSNQKNYLAWFQQKPGKAPKLLIYWASTRESGVPSRFSGSGSGTDFTLTISSLQPEDFATYFCHQYLSSYTFGQGTKVEIKRLEDLKNVFPPEVAVFEPSEAEISHTQKATLVCLATGFYPDHVELSWWVNGKEVHSGVSTDPQPLKEQPALNDSRYCLSSRLRVSATFWQNPRNHFRCQVQFYGLSENDEWTQDRAKPVTQIVSAEAWGRADCGSQSFGLLDPKLCYLLDGILFIYGVILTALFLRVKFSRSADAPAYQQGQNQLYNELNLGRREEYDVLDKRRGRDPEMGGKPQRRKNPQEGLYNELQKDKMAEAYSEIGMKGERRRGKGHDGLYQGLSTATKDTYDALHMQALPPRRAKRSGSGATNFSLLKQAGDVEENPGPTSMDWIWRILFLVGAATGAHSFEEVQLVESGGGLVQPGGSLRLSCAASGYTFTSYWLHWVRQAPGKGLEWVGYIRPSTGYTEYNQKFKDRFTISADTSKNTAYLQMNSLRAEDTAVYYCARSRWLLDYWGQGTLVTVSSTRIQNPDPAVYQLRDSKSSDKSVCLFTDFDSQTNVSQSKDSDVYITDKTVLDMRSMDFKSNSAVAWSNKSDFACANAFNNSIIPEDTFFPSPESSCGTQSFGLLDPKLCYLLDGILFIYGVILTALFLRVKFSRSADAPAYQQGQNQLYNELNLGRREEYDVLDKRRGRDPEMGGKPQRRKNPQEGLYNELQKDKMAEAYSEIGMKGERRRGKGHDGLYQGLSTATKDTYDALHMQALPPR

SEQ ID NO: 21056 - protein, 783 aa, Artificial Sequence
  Synthetic Polypeptide
MALPVTALLLPLALLLHAARPEVQLVESGGGLVQPGGSLRLSCAASGFSFSDFWMSWVRQAPGKGLEWVATISQAGSEKDYVDSVKGRFTISRDNAKKSLYLQMNSLRAEDTAVYYCASGVYSFDYRGQGTLVTVSSGTGGGGSGGGGSGGGGSEFDIQMTQSPSSLSASVGDRVTITCKSSQSLLYSSNQKNYLAWFQQKPGKAPKLLIYWASTRESGVPSRFSGSGSGTDFTLTISSLQPEDFATYFCHQYLSSYTFGQGTKVEIKRLEGQPKANPTVTLFPPSSEELQANKATLVCLISDFYPGAVTVAWKADGSPVKAGVETTKPSKQSNNKYAASSYLSLTPEQWKSHRSYSCQVTHEGSTVEKTVAPTECSPIKTDVITMDPKDNCSKDANDTLLLQLTNTSAYYMYLLLLLKSVVYFAIITCCLLRRTAFCCNGEKSRAKRSGSGATNFSLLKQAGDVEENPGPTSMDWIWRILFLVGAATGAHSFEEVQLVESGGGLVQPGGSLRLSCAASGYTFTSYWLHWVRQAPGKGLEWVGYIRPSTGYTEYNQKFKDRFTISADTSKNTAYLQMNSLRAEDTAVYYCARSRWLLDYWGQGTLVTVSSTRASTKGPSVFPLAPSSKSTSGGTAALGCLVKDYFPEPVTVSWNSGALTSGVHTFPAVLQSSGLYSLSSVVTVPSSSLGTQTYICNVNHKPSNTKVDKRVEPKSCEVKTDSTDHVKPKETENTKQPSKSCHKPKAIVHTEKVNMMSLTVLGLRMLFAKTVAVNFLLTAKLFFL

SEQ ID NO: 21057 - protein, 764 aa, Artificial Sequence
  Synthetic Polypeptide
MALPVTALLLPLALLLHAARPEVQLVESGGGLVQPGGSLRLSCAASGFSFSDFWMSWVRQAPGKGLEWVATISQAGSEKDYVDSVKGRFTISRDNAKKSLYLQMNSLRAEDTAVYYCASGVYSFDYRGQGTLVTVSSGTGGGGSGGGGSGGGGSEFDIQMTQSPSSLSASVGDRVTITCKSSQSLLYSSNQKNYLAWFQQKPGKAPKLLIYWASTRESGVPSRFSGSGSGTDFTLTISSLQPEDFATYFCHQYLSSYTFGQGTKVEIKRLEGQPKANPTVTLFPPSSEELQANKATLVCLISDFYPGAVTVAWKADGSPVKAGVETTKPSKQSNNKYAASSYLSLTPEQWKSHRSYSCQVTHEGSTVEKTVAPTECSGRADCGFTSESYQQGVLSATILYEILLGKATLYAVLVSALVLMAMVKRKDSRGRAKRSGSGVKQTLNFDLLKLAGDVESNPGPTSMDWIWRILFLVGAATGAHSFEEVQLVESGGGLVQPGGSLRLSCAASGYTFTSYWLHWVRQAPGKGLEWVGYIRPSTGYTEYNQKFKDRFTISADTSKNTAYLQMNSLRAEDTAVYYCARSRWLLDYWGQGTLVTVSSTRASTKGPSVFPLAPSSKSTSGGTAALGCLVKDYFPEPVTVSWNSGALTSGVHTFPAVLQSSGLYSLSSVVTVPSSSLGTQTYICNVNHKPSNTKVDKRVEPKSCIPEDTFFPSPESSCDVKLVEKSFETDTNLNFQNLSVIGFRILLLKVAGFNLLMTLRLWSS

SEQ ID NO: 21058 - protein, 898 aa, Artificial Sequence
  Synthetic Polypeptide
MALPVTALLLPLALLLHAARPEVQLVESGGGLVQPGGSLRLSCAASGFSFSDFWMSWVRQAPGKGLEWVATISQAGSEKDYVDSVKGRFTISRDNAKKSLYLQMNSLRAEDTAVYYCASGVYSFDYRGQGTLVTVSSGTGGGGSGGGGSGGGGSEFDIQMTQSPSSLSASVGDRVTITCKSSQSLLYSSNQKNYLAWFQQKPGKAPKLLIYWASTRESGVPSRFSGSGSGTDFTLTISSLQPEDFATYFCHQYLSSYTFGQGTKVEIKRLEIQNPDPAVYQLRDSKSSDKSVCLFTDFDSQTNVSQSKDSDVYITDKCVLDMRSMDFKSNSAVAWSNKSDFACANAFNNSIIPEDTFFPSPESSCDVKLVEKSFETDTNLNFQNLSVIGFRILLLKVAGFNLLMTLRLWSSRAKRSGSGVKQTLNFDLLKLAGDVESNPGPTSMDWIWRILFLVGAATGAHSGPQLQLQESGPGLVKPSETLSLTCTVSGDSISSGDYYWGWIRQPPGKGLEWIGHIYYSGVTYYNPSLKSRVTISVDTSRNQFSLKLSSVTAADTAVYYCTREDSSNWRSRGQGTLVTVSSGSGGGGSGGGGSGGGGSFEEVQLVESGGGLVQPGGSLRLSCAASGYTFTSYWLHWVRQAPGKGLEWVGYIRPSTGYTEYNQKFKDRFTISADTSKNTAYLQMNSLRAEDTAVYYCARSRWLLDYWGQGTLVTVSSTREDLKNVFPPEVAVFEPSEAEISHTQKATLVCLATGFYPDHVELSWWVNGKEVHSGVCTDPQPLKEQPALNDSRYCLSSRLRVSATFWQNPRNHFRCQVQFYGLSENDEWTQDRAKPVTQIVSAEAWGRADCGFTSESYQQGVLSATILYEILLGKATLYAVLVSALVLMAMVKRKDSRG

SEQ ID NO: 21059 - protein, 1090 aa, Artificial Sequence
  Synthetic Polypeptide
MALPVTALLLPLALLLHAARPEVQLVESGGGLVQPGGSLRLSCAASGFSFSDFWMSWVRQAPGKGLEWVATISQAGSEKDYVDSVKGRFTISRDNAKKSLYLQMNSLRAEDTAVYYCASGVYSFDYRGQGTLVTVSSGTGGGGSGGGGSGGGGSEFDIQMTQSPSSLSASVGDRVTITCKSSQSLLYSSNQKNYLAWFQQKPGKAPKLLIYWASTRESGVPSRFSGSGSGTDFTLTISSLQPEDFATYFCHQYLSSYTFGQGTKVEIKRLEDLKNVFPPEVAVFEPSEAEISHTQKATLVCLATGFYPDHVELSWWVNGKEVHSGVSTDPQPLKEQPALNDSRYCLSSRLRVSATFWQNPRNHFRCQVQFYGLSENDEWTQDRAKPVTQIVSAEAWGRADCGSQSFGLLDPKLCYLLDGILFIYGVILTALFLRVKFSRSADAPAYQQGQNQLYNELNLGRREEYDVLDKRRGRDPEMGGKPQRRKNPQEGLYNELQKDKMAEAYSEIGMKGERRRGKGHDGLYQGLSTATKDTYDALHMQALPPRRAKRSGSGATNFSLLKQAGDVEENPGPTSMDWIWRILFLVGAATGAHSGPQLQLQESGPGLVKPSETLSLTCTVSGDSISSGDYYWGWIRQPPGKGLEWIGHIYYSGVTYYNPSLKSRVTISVDTSRNQFSLKLSSVTAADTAVYYCTREDSSNWRSRGQGTLVTVSSGSGGGGSGGGGSGGGGSFEEVQLVESGGGLVQPGGSLRLSCAASGYTFTSYWLHWVRQAPGKGLEWVGYIRPSTGYTEYNQKFKDRFTISADTSKNTAYLQMNSLRAEDTAVYYCARSRWLLDYWGQGTLVTVSSTRIQNPDPAVYQLRDSKSSDKSVCLFTDFDSQTNVSQSKDSDVYITDKTVLDMRSMDFKSNSAVAWSNKSDFACANAFNNSIIPEDTFFPSPESSCGTQSFGLLDPKLCYLLDGILFIYGVILTALFLRVKFSRSADAPAYQQGQNQLYNELNLGRREEYDVLDKRRGRDPEMGGKPQRRKNPQEGLYNELQKDKMAEAYSEIGMKGERRRGKGHDGLYQGLSTATKDTYDALHMQALPPR

SEQ ID NO: 21060 - protein, 920 aa, Artificial Sequence
  Synthetic Polypeptide
MALPVTALLLPLALLLHAARPEVQLVESGGGLVQPGGSLRLSCAASGFSFSDFWMSWVRQAPGKGLEWVATISQAGSEKDYVDSVKGRFTISRDNAKKSLYLQMNSLRAEDTAVYYCASGVYSFDYRGQGTLVTVSSGTGGGGSGGGGSGGGGSEFDIQMTQSPSSLSASVGDRVTITCKSSQSLLYSSNQKNYLAWFQQKPGKAPKLLIYWASTRESGVPSRFSGSGSGTDFTLTISSLQPEDFATYFCHQYLSSYTFGQGTKVEIKRLEGQPKANPTVTLFPPSSEELQANKATLVCLISDFYPGAVTVAWKADGSPVKAGVETTKPSKQSNNKYAASSYLSLTPEQWKSHRSYSCQVTHEGSTVEKTVAPTECSPIKTDVITMDPKDNCSKDANDTLLLQLTNTSAYYMYLLLLLKSVVYFAIITCCLLRRTAFCCNGEKSRAKRSGSGATNFSLLKQAGDVEENPGPTSMDWIWRILFLVGAATGAHSGPQLQLQESGPGLVKPSETLSLTCTVSGDSISSGDYYWGWIRQPPGKGLEWIGHIYYSGVTYYNPSLKSRVTISVDTSRNQFSLKLSSVTAADTAVYYCTREDSSNWRSRGQGTLVTVSSGSGGGGSGGGGSGGGGSFEEVQLVESGGGLVQPGGSLRLSCAASGYTFTSYWLHWVRQAPGKGLEWVGYIRPSTGYTEYNQKFKDRFTISADTSKNTAYLQMNSLRAEDTAVYYCARSRWLLDYWGQGTLVTVSSTRASTKGPSVFPLAPSSKSTSGGTAALGCLVKDYFPEPVTVSWNSGALTSGVHTFPAVLQSSGLYSLSSVVTVPSSSLGTQTYICNVNHKPSNTKVDKRVEPKSCEVKTDSTDHVKPKETENTKQPSKSCHKPKAIVHTEKVNMMSLTVLGLRMLFAKTVAVNFLLTAKLFFL

SEQ ID NO: 21061 - protein, 901 aa, Artificial Sequence
  Synthetic Polypeptide
MALPVTALLLPLALLLHAARPEVQLVESGGGLVQPGGSLRLSCAASGFSFSDFWMSWVRQAPGKGLEWVATISQAGSEKDYVDSVKGRFTISRDNAKKSLYLQMNSLRAEDTAVYYCASGVYSFDYRGQGTLVTVSSGTGGGGSGGGGSGGGGSEFDIQMTQSPSSLSASVGDRVTITCKSSQSLLYSSNQKNYLAWFQQKPGKAPKLLIYWASTRESGVPSRFSGSGSGTDFTLTISSLQPEDFATYFCHQYLSSYTFGQGTKVEIKRLEGQPKANPTVTLFPPSSEELQANKATLVCLISDFYPGAVTVAWKADGSPVKAGVETTKPSKQSNNKYAASSYLSLTPEQWKSHRSYSCQVTHEGSTVEKTVAPTECSGRADCGFTSESYQQGVLSATILYEILLGKATLYAVLVSALVLMAMVKRKDSRGRAKRSGSGVKQTLNFDLLKLAGDVESNPGPTSMDWIWRILFLVGAATGAHSGPQLQLQESGPGLVKPSETLSLTCTVSGDSISSGDYYWGWIRQPPGKGLEWIGHIYYSGVTYYNPSLKSRVTISVDTSRNQFSLKLSSVTAADTAVYYCTREDSSNWRSRGQGTLVTVSSGSGGGGSGGGGSGGGGSFEEVQLVESGGGLVQPGGSLRLSCAASGYTFTSYWLHWVRQAPGKGLEWVGYIRPSTGYTEYNQKFKDRFTISADTSKNTAYLQMNSLRAEDTAVYYCARSRWLLDYWGQGTLVTVSSTRASTKGPSVFPLAPSSKSTSGGTAALGCLVKDYFPEPVTVSWNSGALTSGVHTFPAVLQSSGLYSLSSVVTVPSSSLGTQTYICNVNHKPSNTKVDKRVEPKSCIPEDTFFPSPESSCDVKLVEKSFETDTNLNFQNLSVIGFRILLLKVAGFNLLMTLRLWSS

SEQ ID NO: 21062 - protein, 758 aa, Artificial Sequence
  Synthetic Polypeptide
MALPVTALLLPLALLLHAARPEVQVLESGGGLVQPGGSLRLSCAASGFTFSNFAMSWVRQAPGKGLEWVSTISGSAGTTDYADSVKGRFTISRDNSKKTLYLQMNSLRVEDTAVYYCADGRGPFFDYRGQGTLVTVSSGTGGGGSGGGGSGGGGSEFDIQMTQSPSSLSASVGDRVTITCKSSQSLLYSSNQKNYLAWFQQKPGKAPKLLIYWASTRESGVPSRFSGSGSGTDFTLTISSLQPEDFATYFCHQYLSSYTFGQGTKVEIKRLEDLKNVFPPEVAVFEPSEAEISHTQKATLVCLATGFYPDHVELSWWVNGKEVHSGVCTDPQPLKEQPALNDSRYCLSSRLRVSATFWQNPRNHFRCQVQFYGLSENDEWTQDRAKPVTQIVSAEAWGRADCGFTSESYQQGVLSATILYEILLGKATLYAVLVSALVLMAMVKRKDSRGRAKRSGSGATNFSLLKQAGDVEENPGPTSMDWIWRILFLVGAATGAHSFEEVQLVESGGGLVQPGGSLRLSCAASGYTFTSYWLHWVRQAPGKGLEWVGYIRPSTGYTEYNQKFKDRFTISADTSKNTAYLQMNSLRAEDTAVYYCARSRWLLDYWGQGTLVTVSSTRIQNPDPAVYQLRDSKSSDKSVCLFTDFDSQTNVSQSKDSDVYITDKCVLDMRSMDFKSNSAVAWSNKSDFACANAFNNSIIPEDTFFPSPESSCDVKLVEKSFETDTNLNFQNLSVIGFRILLLKVAGFNLLMTLRLWSS

SEQ ID NO: 21063 - protein, 759 aa, Artificial Sequence
  Synthetic Polypeptide
MALPVTALLLPLALLLHAARPDIQMTQSPSSLSASVGDRVTITCKSSQSLLYSSNQKNYLAWFQQKPGKAPKLLIYWASTRESGVPSRFSGSGSGTDFTLTISSLQPEDFATYFCHQYLSSYTFGQGTKVEIKRLEDLKNVFPPEVAVFEPSEAEISHTQKATLVCLATGFYPDHVELSWWVNGKEVHSGVCTDPQPLKEQPALNDSRYCLSSRLRVSATFWQNPRNHFRCQVQFYGLSENDEWTQDRAKPVTQIVSAEAWGRADCGFTSESYQQGVLSATILYEILLGKATLYAVLVSALVLMAMVKRKDSRGRAKRSGSGATNFSLLKQAGDVEENPGPTSMDWIWRILFLVGAATGAHSGPEVQLVESGGGLVQAGGSLRLSCAASGRTFSMGWFRQAPGKEREFVAAITYSGGSPYYADSVKGRFTISRDNAKNTVYLQMNSLKPEDTAVYYCAANPTYGSDWNAENWGQGTQVTVSSGSGGGGSGGGGSGGGGSFEEVQLVESGGGLVQPGGSLRLSCAASGYTFTSYWLHWVRQAPGKGLEWVGYIRPSTGYTEYNQKFKDRFTISADTSKNTAYLQMNSLRAEDTAVYYCARSRWLLDYWGQGTLVTVSSTRIQNPDPAVYQLRDSKSSDKSVCLFTDFDSQTNVSQSKDSDVYITDKCVLDMRSMDFKSNSAVAWSNKSDFACANAFNNSIIPEDTFFPSPESSCDVKLVEKSFETDTNLNFQNLSVIGFRILLLKVAGFNLLMTLRLWSS

SEQ ID NO: 21064 - protein, 886 aa, Artificial Sequence
  Synthetic Polypeptide
MALPVTALLLPLALLLHAARPDIQMTQSPSSLSASVGDRVTITCKSSQSLLYSSNQKNYLAWFQQKPGKAPKLLIYWASTRESGVPSRFSGSGSGTDFTLTISSLQPEDFATYFCHQYLSSYTFGQGTKVEIKRLEDLKNVFPPEVAVFEPSEAEISHTQKATLVCLATGFYPDHVELSWWVNGKEVHSGVCTDPQPLKEQPALNDSRYCLSSRLRVSATFWQNPRNHFRCQVQFYGLSENDEWTQDRAKPVTQIVSAEAWGRADCGFTSESYQQGVLSATILYEILLGKATLYAVLVSALVLMAMVKRKDSRGRAKRSGSGATNFSLLKQAGDVEENPGPTSMDWIWRILFLVGAATGAHSQLQLQESGPGLVKPSETLSLTCTVSGGSISSGDYYWGWIRQPPGKGLEWIGSISYSGSTYYNPSLKSRVTISVDTSRNQFSLKLSSVTAADTAVYYCTREDSSNWRSRGQGTLVTVSSSGGGGSGGGGSEVQLVESGGGLVQAGGSLRLSCAASGRTFSMGWFRQAPGKEREFVAAITYSGGSPYYADSVKGRFTISRDNAKNTVYLQMNSLKPEDTAVYYCAANPTYGSDWNAENWGQGTQVTVSSGSGGGGSGGGGSGGGGSFEEVQLVESGGGLVQPGGSLRLSCAASGYTFTSYWLHWVRQAPGKGLEWVGYIRPSTGYTEYNQKFKDRFTISADTSKNTAYLQMNSLRAEDTAVYYCARSRWLLDYWGQGTLVTVSSTRIQNPDPAVYQLRDSKSSDKSVCLFTDFDSQTNVSQSKDSDVYITDKCVLDMRSMDFKSNSAVAWSNKSDFACANAFNNSIIPEDTFFPSPESSCDVKLVEKSFETDTNLNFQNLSVIGFRILLLKVAGFNLLMTLRLWSS

SEQ ID NO: 21065 - protein, 895 aa, Artificial Sequence
  Synthetic Polypeptide
MALPVTALLLPLALLLHAARPEVQVLESGGGLVQPGGSLRLSCAASGFTFSNFAMSWVRQAPGKGLEWVSTISGSAGTTDYADSVKGRFTISRDNSKKTLYLQMNSLRVEDTAVYYCADGRGPFFDYRGQGTLVTVSSGTGGGGSGGGGSGGGGSEFDIQMTQSPSSLSASVGDRVTITCKSSQSLLYSSNQKNYLAWFQQKPGKAPKLLIYWASTRESGVPSRFSGSGSGTDFTLTISSLQPEDFATYFCHQYLSSYTFGQGTKVEIKRLEDLKNVFPPEVAVFEPSEAEISHTQKATLVCLATGFYPDHVELSWWVNGKEVHSGVCTDPQPLKEQPALNDSRYCLSSRLRVSATFWQNPRNHFRCQVQFYGLSENDEWTQDRAKPVTQIVSAEAWGRADCGFTSESYQQGVLSATILYEILLGKATLYAVLVSALVLMAMVKRKDSRGRAKRSGSGATNFSLLKQAGDVEENPGPTSMDWIWRILFLVGAATGAHSGPEVQLVESGGGLVQAGGSLRLSCAASGRTFSMGWFRQAPGKEREFVAAITYSGGSPYYASSVRGRFTISRDNAKNTVYLQMNSLKPEDTAVYYCAANPTYGSDWNAENWGQGTQVTVSSGSGGGGSGGGGSGGGGSFEEVQLVESGGGLVQPGGSLRLSCAASGYTFTSYWLHWVRQAPGKGLEWVGYIRPSTGYTEYNQKFKDRFTISADTSKNTAYLQMNSLRAEDTAVYYCARSRWLLDYWGQGTLVTVSSTRIQNPDPAVYQLRDSKSSDKSVCLFTDFDSQTNVSQSKDSDVYITDKCVLDMRSMDFKSNSAVAWSNKSDFACANAFNNSIIPEDTFFPSPESSCDVKLVEKSFETDTNLNFQNLSVIGFRILLLKVAGFNLLMTLRLWSS

SEQ ID NO: 21066 - protein, 725 aa, Artificial Sequence
  Synthetic Polypeptide
MALPVTALLLPLALLLHAARPDIQMTQSPSSLSASVGDRVTITCKSSQSVLYSSNQKNYLAWFQQKPGKAPKLLIYWASTRESGVPSRFSGSGSGTDFTLTISSLQPEDFATYFCHQYLSSYTFGQGTKVEIKRGGGGSGGGGSGGGGSEVQLVESGGGLVQPGGSLRLSCAASGFTFTTYWMHWVRQAPGKGLEWVGYIRPSTGYTEYNQKFKDRFTISADTSKNTAYLQMNSLRAEDTAVYYCARSRWLLDYWGQGTLVTVSTREQKLISEEDLAKPTTTPAPRPPTPAPTIASQPLSLRPEACRPAAGGAVHTRGLDFACDIYIWAPLAGTCGVLLLSLVITLYCKRGRKKLLYIFKQPFMRPVQTTQEEDGCSCRFPEEEEGGCELRVKFSRSADAPAYQQGQNQLYNELNLGRREEYDVLDKRRGRDPEMGGKPRRKNPQEGLYNELQKDKMAEAYSEIGMKGERRRGKGHDGLYQGLSTATKDTYDALHMQALPPRSSGSGEGRGSLLTCGDVEENPGPHMTEYKPTVRLATRDDVPRAVRTLAAAFADYPATRHTVDPDRHIERVTELQELFLTRVGLDIGKVWVADDGAAVAVWTTPESVEAGAVFAEIGPRMAELSGSRLAAQQQMEGLLAPHRPKEPAWFLATVGVSPDHQGKGLGSAVVLPGVEAAERAGVPAFLETSAPRNLPFYERLGFTVTADVEVPEGPRTWCMTRKPGA

SEQ ID NO: 21067 - protein, 719 aa, Artificial Sequence
  Synthetic Polypeptide
MALPVTALLLPLALLLHAARPDIQMTQSPSSLSASVGDRVTITCKSSQSVLYSSNQKNYLAWFQQKPGKAPKLLIYWASTRESGVPSRFSGSGSGTDFTLTISSLQPEDFATYFCHQYLSSYTFGQGTKVEIKRGGGGSGGGGSGGGGSEVQLVESGGGLVQPGGSLRLSCAASGFTFTTYWMHWVRQAPGKGLEWVGYIRPSTGYTEYNQKFKDRFTISADTSKNTAYLQMNSLRAEDTAVYYCARSRWLLDYWGQGTLVTVSTREQKLISEEDLKIEVMYPPPYLDNEKSNGTIIHVKGKHLCPSPLFPGPSKPFWVLVVVGGVLACYSLLVTVAFIIFWVRSKRSRLLHSDYMNMTPRRPGPTRKHYQPYAPPRDFAAYRSRVKFSRSADAPAYQQGQNQLYNELNLGRREEYDVLDKRRGRDPEMGGKPRRKNPQEGLYNELQKDKMAEAYSEIGMKGERRRGKGHDGLYQGLSTATKDTYDALHMQALPPRSSGSGEGRGSLLTCGDVEENPGPHMTEYKPTVRLATRDDVPRAVRTLAAAFADYPATRHTVDPDRHIERVTELQELFLTRVGLDIGKVWVADDGAAVAVWTTPESVEAGAVFAEIGPRMAELSGSRLAAQQQMEGLLAPHRPKEPAWFLATVGVSPDHQGKGLGSAVVLPGVEAAERAGVPAFLETSAPRNLPFYERLGFTVTADVEVPEGPRTWCMTRKPGA

SEQ ID NO: 21068 - protein, 496 aa, Artificial Sequence
  Synthetic Polypeptide
MALPVTALLLPLALLLHAARPDIQMTQSPSSLSASVGDRVTITCKSSQSVLYSSNQKNYLAWFQQKPGKAPKLLIYWASTRESGVPSRFSGSGSGTDFTLTISSLQPEDFATYFCHQYLSSYTFGQGTKVEIKRGGGGSGGGGSGGGGSEVQLVESGGGLVQPGGSLRLSCAASGFTFTTYWMHWVRQAPGKGLEWVGYIRPSTGYTEYNQKFKDRFTISADTSKNTAYLQMNSLRAEDTAVYYCARSRWLLDYWGQGTLVTVSTREQKLISEEDLKIEVMYPPPYLDNEKSNGTIIHVKGKHLCPSPLFPGPSKPFWVLVVVGGVLACYSLLVTVAFIIFWVRSKRSRLLHSDYMNMTPRRPGPTRKHYQPYAPPRDFAAYRSRVKFSRSADAPAYQQGQNQLYNELNLGRREEYDVLDKRRGRDPEMGGKPRRKNPQEGLYNELQKDKMAEAYSEIGMKGERRRGKGHDGLYQGLSTATKDTYDALHMQALPPR

SEQ ID NO: 21069 - protein, 502 aa, Artificial Sequence
  Synthetic Polypeptide
MALPVTALLLPLALLLHAARPDIQMTQSPSSLSASVGDRVTITCKSSQSVLYSSNQKNYLAWFQQKPGKAPKLLIYWASTRESGVPSRFSGSGSGTDFTLTISSLQPEDFATYFCHQYLSSYTFGQGTKVEIKRGGGGSGGGGSGGGGSEVQLVESGGGLVQPGGSLRLSCAASGFTFTTYWMHWVRQAPGKGLEWVGYIRPSTGYTEYNQKFKDRFTISADTSKNTAYLQMNSLRAEDTAVYYCARSRWLLDYWGQGTLVTVSTREQKLISEEDLAKPTTTPAPRPPTPAPTIASQPLSLRPEACRPAAGGAVHTRGLDFACDIYIWAPLAGTCGVLLLSLVITLYCKRGRKKLLYIFKQPFMRPVQTTQEEDGCSCRFPEEEEGGCELRVKFSRSADAPAYQQGQNQLYNELNLGRREEYDVLDKRRGRDPEMGGKPRRKNPQEGLYNELQKDKMAEAYSEIGMKGERRRGKGHDGLYQGLSTATKDTYDALHMQALPPR

SEQ ID NO: 21070 - protein, 502 aa, Artificial Sequence
  Synthetic Polypeptide
MALPVTALLLPLALLLHAARPEVQLVESGGGLVQPGGSLRLSCAASGFTFTTYWMHWVRQAPGKGLEWVGYIRPSTGYTEYNQKFKDRFTISADTSKNTAYLQMNSLRAEDTAVYYCARSRWLLDYWGQGTLVTVSGGGGSGGGGSGGGGSDIQMTQSPSSLSASVGDRVTITCKSSQSVLYSSNQKNYLAWFQQKPGKAPKLLIYWASTRESGVPSRFSGSGSGTDFTLTISSLQPEDFATYFCHQYLSSYTFGQGTKVEIKRTREQKLISEEDLAKPTTTPAPRPPTPAPTIASQPLSLRPEACRPAAGGAVHTRGLDFACDIYIWAPLAGTCGVLLLSLVITLYCKRGRKKLLYIFKQPFMRPVQTTQEEDGCSCRFPEEEEGGCELRVKFSRSADAPAYQQGQNQLYNELNLGRREEYDVLDKRRGRDPEMGGKPRRKNPQEGLYNELQKDKMAEAYSEIGMKGERRRGKGHDGLYQGLSTATKDTYDALHMQALPPR

SEQ ID NO: 21071 - protein, 915 aa, Artificial Sequence
  Synthetic Polypeptide
MALPVTALLLPLALLLHAARPDIQMTQSPSSLSASVGDRVTITCKSSQSVLYSSNQKNYLAWFQQKPGKAPKLLIYWASTRESGVPSRFSGSGSGTDFTLTISSLQPEDFATYFCHQYLSSYTFGQGTKVEIKRGGGGSGGGGSGGGGSEVQLVESGGGLVQPGGSLRLSCAASGFTFTTYWMHWVRQAPGKGLEWVGYIRPSTGYTEYNQKFKDRFTISADTSKNTAYLQMNSLRAEDTAVYYCARSRWLLDYWGQGTLVTVSTREQKLISEEDLAKPTTTPAPRPPTPAPTIASQPLSLRPEACRPAAGGAVHTRGLDFACDIYIWAPLAGTCGVLLLSLVITLYCGRARVKFSRSADAPAYQQGQNQLYNELNLGRREEYDVLDKRRGRDPEMGGKPRRKNPQEGLYNELQKDKMAEAYSEIGMKGERRRGKGHDGLYQGLSTATKDTYDALHMQALPPRSRGSGATNFSLLKQAGDVEENPGPGIHMATYEVLCEVARKLGTDDREVVLFLLNVFIPQPTLAQLIGALRALKEEGRLTFPLLAECLFRAGRRDLLRDLLHLDPRFLERHLAGTMSYFSPYQLTVLHVDGELCARDIRSLIFLSKDTIGSRSTPQTFLHWVYCMENLDLLGPTDVDALMSMLRSLSRVDLQRQVQTLMGLHLSGPSHSQHYRHTPLETDFYDYKDDDDKTSGSGEGRGSLLTCGDVEENPGPHMTEYKPTVRLATRDDVPRAVRTLAAAFADYPATRHTVDPDRHIERVTELQELFLTRVGLDIGKVWVADDGAAVAVWTTPESVEAGAVFAEIGPRMAELSGSRLAAQQQMEGLLAPHRPKEPAWFLATVGVSPDHQGKGLGSAVVLPGVEAAERAGVPAFLETSAPRNLPFYERLGFTVTADVEVPEGPRTWCMTRKPGA

SEQ ID NO: 21072 - protein, 855 aa, Artificial Sequence
  Synthetic Polypeptide
MALPVTALLLPLALLLHAARPDIQMTQSPSSLSASVGDRVTITCKSSQSVLYSSNQKNYLAWFQQKPGKAPKLLIYWASTRESGVPSRFSGSGSGTDFTLTISSLQPEDFATYFCHQYLSSYTFGQGTKVEIKRLEIQNPDPAVYQLRDSKSSDKSVCLFTDFDSQTNVSQSKDSDVYITDKCVLDMRSMDFKSNSAVAWSNKSDFACANAFNNSIIPEDTFFPSSDVPCDVKLVEKSFETDTNLNFQNLSVIGFRILLLKVAGFNLLMTLRLWSSRAKRSGSGVKQTLNFDLLKLAGDVESNPGPTSMDWIWRILFLVGAATGAHSFEEVQLVESGGGLVQPGGSLRLSCAASGFTFTTYWMHWVRQAPGKGLEWVGYIRPSTGYTEYNQKFKDRFTISADTSKNTAYLQMNSLRAEDTAVYYCARSRWLLDYWGQGTLVTVSTREDLKNVFPPEVAVFEPSKAEIAHTQKATLVCLATGFYPDHVELSWWVNGKEVHSGVCTDPQPLKEQPALNDSRYCLSSRLRVSATFWQNPRNHFRCQVQFYGLSENDEWTQDRAKPVTQIVSAEAWGRADCGITSASYHQGVLSATILYEILLGKATLYAVLVSALVLMAMVKRKDSRGRAKRSGSGATNFSLLKQAGDVEENPGPSRGHMTEYKPTVRLATRDDVPRAVRTLAAAFADYPATRHTVDPDRHIERVTELQELFLTRVGLDIGKVWVADDGAAVAVWTTPESVEAGAVFAEIGPRMAELSGSRLAAQQQMEGLLAPHRPKEPAWFLATVGVSPDHQGKGLGSAVVLPGVEAAERAGVPAFLETSAPRNLPFYERLGFTVTADVEVPEGPRTWCMTRKPGA

SEQ ID NO: 21073 - protein, 854 aa, Artificial Sequence
  Synthetic Polypeptide
MALPVTALLLPLALLLHAARPDIQMTQSPSSLSASVGDRVTITCKSSQSVLYSSNQKNYLAWFQQKPGKAPKLLIYWASTRESGVPSRFSGSGSGTDFTLTISSLQPEDFATYFCHQYLSSYTFGQGTKVEIKRLEDLKNVFPPEVAVFEPSKAEIAHTQKATLVCLATGFYPDHVELSWWVNGKEVHSGVCTDPQPLKEQPALNDSRYCLSSRLRVSATFWQNPRNHFRCQVQFYGLSENDEWTQDRAKPVTQIVSAEAWGRADCGITSASYHQGVLSATILYEILLGKATLYAVLVSALVLMAMVKRKDSRGRAKRSGSGATNFSLLKQAGDVEENPGPTSMDWIWRILFLVGAATGAHSFEEVQLVESGGGLVQPGGSLRLSCAASGFTFTTYWMHWVRQAPGKGLEWVGYIRPSTGYTEYNQKFKDRFTISADTSKNTAYLQMNSLRAEDTAVYYCARSRWLLDYWGQGTLVTVSTRIQNPDPAVYQLRDSKSSDKSVCLFTDFDSQTNVSQSKDSDVYITDKCVLDMRSMDFKSNSAVAWSNKSDFACANAFNNSIIPEDTFFPSSDVPCDVKLVEKSFETDTNLNFQNLSVIGFRILLLKVAGFNLLMTLRLWSSRAKRSGSGVKQTLNFDLLKLAGDVESNPGPSRGHMTEYKPTVRLATRDDVPRAVRTLAAAFADYPATRHTVDPDRHIERVTELQELFLTRVGLDIGKVWVADDGAAVAVWTTPESVEAGAVFAEIGPRMAELSGSRLAAQQQMEGLLAPHRPKEPAWFLATVGVSPDHQGKGLGSAVVLPGVEAAERAGVPAFLETSAPRNLPFYERLGFTVTADVEVPEGPRTWCMTRKPGA

SEQ ID NO: 21074 - protein, 621 aa, Artificial Sequence
  Synthetic Polypeptide
MALPVTALLLPLALLLHAARPDIQMTQSPSSLSASVGDRVTITCKSSQSVLYSSNQKNYLAWFQQKPGKAPKLLIYWASTRESGVPSRFSGSGSGTDFTLTISSLQPEDFATYFCHQYLSSYTFGQGTKVEIKRLEDLKNVFPPEVAVFEPSEAEISHTQKATLVCLATGFYPDHVELSWWVNGKEVHSGVCTDPQPLKEQPALNDSRYCLSSRLRVSATFWQNPRNHFRCQVQFYGLSENDEWTQDRAKPVTQIVSAEAWGRADCGFTSESYQQGVLSATILYEILLGKATLYAVLVSALVLMAMVKRKDSRGRAKRSGSGATNFSLLKQAGDVEENPGPTSMDWIWRILFLVGAATGAHSFEEVQLVESGGGLVQPGGSLRLSCAASGFTFTTYWMHWVRQAPGKGLEWVGYIRPSTGYTEYNQKFKDRFTISADTSKNTAYLQMNSLRAEDTAVYYCARSRWLLDYWGQGTLVTVSTRIQNPDPAVYQLRDSKSSDKSVCLFTDFDSQTNVSQSKDSDVYITDKCVLDMRSMDFKSNSAVAWSNKSDFACANAFNNSIIPEDTFFPSPESSCDVKLVEKSFETDTNLNFQNLSVIGFRILLLKVAGFNLLMTLRLWSS

SEQ ID NO: 21075 - protein, 846 aa, Artificial Sequence
  Synthetic Polypeptide
MALPVTALLLPLALLLHAARPDIQMTQSPSSLSASVGDRVTITCKSSQSVLYSSNQKNYLAWFQQKPGKAPKLLIYWASTRESGVPSRFSGSGSGTDFTLTISSLQPEDFATYFCHQYLSSYTFGQGTKVEIKRLEDLKNVFPPEVAVFEPSEAEISHTQKATLVCLATGFYPDHVELSWWVNGKEVHSGVCTDPQPLKEQPALNDSRYCLSSRLRVSATFWQNPRNHFRCQVQFYGLSENDEWTQDRAKPVTQIVSAEAWGRADCGFTSESYQQGVLSATILYEILLGKATLYAVLVSALVLMAMVKRKDSRGRAKRSGSGATNFSLLKQAGDVEENPGPTSMDWIWRILFLVGAATGAHSFEEVQLVESGGGLVQPGGSLRLSCAASGFTFTTYWMHWVRQAPGKGLEWVGYIRPSTGYTEYNQKFKDRFTISADTSKNTAYLQMNSLRAEDTAVYYCARSRWLLDYWGQGTLVTVSTRIQNPDPAVYQLRDSKSSDKSVCLFTDFDSQTNVSQSKDSDVYITDKCVLDMRSMDFKSNSAVAWSNKSDFACANAFNNSIIPEDTFFPSPESSCDVKLVEKSFETDTNLNFQNLSVIGFRILLLKVAGFNLLMTLRLWSSRAKRSGSGVKQTLNFDLLKLAGDVESNPGPSRGGIHTMATYEVLCEVARKLGTDDREVVLFLLNVFIPQPTLAQLIGALRALKEEGRLTFPLLAECLFRAGRRDLLRDLLHLDPRFLERHLAGTMSYFSPYQLTVLHVDGELCARDIRSLIFLSKDTIGSRSTPQTFLHWVYCMENLDLLGPTDVDALMSMLRSLSRVDLQRQVQTLMGLHLSGPSHSQHYRHTP

SEQ ID NO: 21076 - protein, 625 aa, Artificial Sequence
  Synthetic Polypeptide
MALPVTALLLPLALLLHAARPDIQMTQSPSSLSASVGDRVTITCKSSQSVLYSSNQKNYLAWFQQKPGKAPKLLIYWASTRESGVPSRFSGSGSGTDFTLTISSLQPEDFATYFCHQYLSSYTFGQGTKVEIKRLEIQNPDPAVYQLRDSKSSDKSVCLFTDFDSQTNVSQSKDSDVYITDKCVLDMRSMDFKSNSAVAWSNKSDFACANAFNNSIIPEDTFFPSPESSCDVKLVEKSFETDTNLNFQNLSVIGFRILLLKVAGFNLLMTLRLWSSRAKRSGSGVKQTLNFDLLKLAGDVESNPGPTSMDWIWRILFLVGAATGAHSFEEVQLVESGGGLVQPGGSLRLSCAASGFTFTTYWMHWVRQAPGKGLEWVGYIRPSTGYTEYNQKFKDRFTISADTSKNTAYLQMNSLRAEDTAVYYCARSRWLLDYWGQGTLVTVSTREDLKNVFPPEVAVFEPSEAEISHTQKATLVCLATGFYPDHVELSWWVNGKEVHSGVCTDPQPLKEQPALNDSRYCLSSRLRVSATFWQNPRNHFRCQVQFYGLSENDEWTQDRAKPVTQIVSAEAWGRADCGFTSESYQQGVLSATILYEILLGKATLYAVLVSALVLMAMVKRKDSRG

SEQ ID NO: 21077 - protein, 847 aa, Artificial Sequence
  Synthetic Polypeptide
MALPVTALLLPLALLLHAARPDIQMTQSPSSLSASVGDRVTITCKSSQSVLYSSNQKNYLAWFQQKPGKAPKLLIYWASTRESGVPSRFSGSGSGTDFTLTISSLQPEDFATYFCHQYLSSYTFGQGTKVEIKRLEIQNPDPAVYQLRDSKSSDKSVCLFTDFDSQTNVSQSKDSDVYITDKCVLDMRSMDFKSNSAVAWSNKSDFACANAFNNSIIPEDTFFPSPESSCDVKLVEKSFETDTNLNFQNLSVIGFRILLLKVAGFNLLMTLRLWSSRAKRSGSGVKQTLNFDLLKLAGDVESNPGPTSMDWIWRILFLVGAATGAHSFEEVQLVESGGGLVQPGGSLRLSCAASGFTFTTYWMHWVRQAPGKGLEWVGYIRPSTGYTEYNQKFKDRFTISADTSKNTAYLQMNSLRAEDTAVYYCARSRWLLDYWGQGTLVTVSTREDLKNVFPPEVAVFEPSEAEISHTQKATLVCLATGFYPDHVELSWWVNGKEVHSGVCTDPQPLKEQPALNDSRYCLSSRLRVSATFWQNPRNHFRCQVQFYGLSENDEWTQDRAKPVTQIVSAEAWGRADCGFTSESYQQGVLSATILYEILLGKATLYAVLVSALVLMAMVKRKDSRGRAKRSGSGATNFSLLKQAGDVEENPGPSRGGIHTMATYEVLCEVARKLGTDDREVVLFLLNVFIPQPTLAQLIGALRALKEEGRLTFPLLAECLFRAGRRDLLRDLLHLDPRFLERHLAGTMSYFSPYQLTVLHVDGELCARDIRSLIFLSKDTIGSRSTPQTFLHWVYCMENLDLLGPTDVDALMSMLRSLSRVDLQRQVQTLMGLHLSGPSHSQHYRHTP

SEQ ID NO: 21078 - protein, 899 aa, Artificial Sequence
  Synthetic Polypeptide
MALPVTALLLPLALLLHAARPLEGKPIPNPLLGLDSTGSGEDLKNVFPPEVAVFEPSKAEIAHTQKATLVCLATGFYPDHVELSWWVNGKEVHSGVCTDPQPLKEQPALNDSRYCLSSRLRVSATFWQNPRNHFRCQVQFYGLSENDEWTQDRAKPVTQIVSAEAWGRADCGITSASYHQGVLSATILYEILLGKATLYAVLVSALVLMAMVKRKDSRGRAKRSGSGATNFSLLKQAGDVEENPGPTSMALPVTALLLPLALLLHAARPDIQMTQSPSSLSASVGDRVTITCKSSQSVLYSSNQKNYLAWFQQKPGKAPKLLIYWASTRESGVPSRFSGSGSGTDFTLTISSLQPEDFATYFCHQYLSSYTFGQGTKVEIKRGGGGSGGGGSGGGGSEVQLVESGGGLVQPGGSLRLSCAASGFTFTTYWMHWVRQAPGKGLEWVGYIRPSTGYTEYNQKFKDRFTISADTSKNTAYLQMNSLRAEDTAVYYCARSRWLLDYWGQGTLVTVSTREQKLISEEDGSGIQNPDPAVYQLRDSKSSDKSVCLFTDFDSQTNVSQSKDSDVYITDKCVLDMRSMDFKSNSAVAWSNKSDFACANAFNNSIIPEDTFFPSSDVPCDVKLVEKSFETDTNLNFQNLSVIGFRILLLKVAGFNLLMTLRLWSSRAKRSGSGVKQTLNFDLLKLAGDVESNPGPSRGHMTEYKPTVRLATRDDVPRAVRTLAAAFADYPATRHTVDPDRHIERVTELQELFLTRVGLDIGKVWVADDGAAVAVWTTPESVEAGAVFAEIGPRMAELSGSRLAAQQQMEGLLAPHRPKEPAWFLATVGVSPDHQGKGLGSAVVLPGVEAAERAGVPAFLETSAPRNLPFYERLGFTVTADVEVPEGPRTWCMTRKPGA

SEQ ID NO: 21079 - protein, 900 aa, Artificial Sequence
  Synthetic Polypeptide
MALPVTALLLPLALLLHAARPLEQKLISEEDLGSGDRPDPAVYQLRDSKSSDKSVCLFTDFDSQTNVSQSKDSDVYITDKCVLDMRSMDFKSNSAVAWSNKSDFACANAFNNSIIPEDTFFPSPESSCDVKLVEKSFETDTNLNFQNLSVIGFRILLLKVAGFNLLMTLRLWSSSSRAKRSGSGVKQTLNFDLLKLAGDVESNPGPTSMALPVTALLLPLALLLHAARPDIQMTQSPSSLSASVGDRVTITCKSSQSVLYSSNQKNYLAWFQQKPGKAPKLLIYWASTRESGVPSRFSGSGSGTDFTLTISSLQPEDFATYFCHQYLSSYTFGQGTKVEIKRGGGGSGGGGSGGGGSEVQLVESGGGLVQPGGSLRLSCAASGFTFTTYWMHWVRQAPGKGLEWVGYIRPSTGYTEYNQKFKDRFTISADTSKNTAYLQMNSLRAEDTAVYYCARSRWLLDYWGQGTLVTVSTRGKPIPNPLLGLDSTGSGEDLKNVFPPEVAVFEPSEAEISHTQKATLVCLATGFYPDHVELSWWVNGKEVHSGVCTDPQPLKEQPALNDSRYCLSSRLRVSATFWQNPRNHFRCQVQFYGLSENDEWTQDRAKPVTQIVSAEAWGRADCGFTSESYQQGVLSATILYEILLGKATLYAVLVSALVLMAMVKRKDSRGRAKRSGSGATNFSLLKQAGDVEENPGPSRGHMTEYKPTVRLATRDDVPRAVRTLAAAFADYPATRHTVDPDRHIERVTELQELFLTRVGLDIGKVWVADDGAAVAVWTTPESVEAGAVFAEIGPRMAELSGSRLAAQQQMEGLLAPHRPKEPAWFLATVGVSPDHQGKGLGSAVVLPGVEAAERAGVPAFLETSAPRNLPFYERLGFTVTADVEVPEGPRTWCMTRKPGA

SEQ ID NO: 21080 - protein, 854 aa, Artificial Sequence
  Synthetic Polypeptide
MALPVTALLLPLALLLHAARPDIQMTQSPSSLSASVGDRVTITCKSSQSVLYSSNQKNYLAWFQQKPGKAPKLLIYWASTRESGVPSRFSGSGSGTDFTLTISSLQPEDFATYFCHQYLSSYTFGQGTKVEIKRLEDLKNVFPPEVAVFEPSEAEISHTQKATLVCLATGFYPDHVELSWWVNGKEVHSGVSTDPQPLKEQPALNDSRYCLSSRLRVSATFWQNPRNHFRCQVQFYGLSENDEWTQDRAKPVTQIVSAEAWGRADCGFTSESYQQGVLSATILYEILLGKATLYAVLVSALVLMAMVKRKDSRGRAKRSGSGATNFSLLKQAGDVEENPGPTSMDWIWRILFLVGAATGAHSFEEVQLVESGGGLVQPGGSLRLSCAASGFTFTTYWMHWVRQAPGKGLEWVGYIRPSTGYTEYNQKFKDRFTISADTSKNTAYLQMNSLRAEDTAVYYCARSRWLLDYWGQGTLVTVSTRIQNPDPAVYQLRDSKSSDKSVCLFTDFDSQTNVSQSKDSDVYITDKTVLDMRSMDFKSNSAVAWSNKSDFACANAFNNSIIPEDTFFPSPESSCDVKLVEKSFETDTNLNFQNLSVIGFRILLLKVAGFNLLMTLRLWSSRAKRSGSGVKQTLNFDLLKLAGDVESNPGPSRGHMTEYKPTVRLATRDDVPRAVRTLAAAFADYPATRHTVDPDRHIERVTELQELFLTRVGLDIGKVWVADDGAAVAVWTTPESVEAGAVFAEIGPRMAELSGSRLAAQQQMEGLLAPHRPKEPAWFLATVGVSPDHQGKGLGSAVVLPGVEAAERAGVPAFLETSAPRNLPFYERLGFTVTADVEVPEGPRTWCMTRKPGA

SEQ ID NO: 21081 - protein, 936 aa, Artificial Sequence
  Synthetic Polypeptide
MALPVTALLLPLALLLHAARPDIQMTQSPSSLSASVGDRVTITCKSSQSVLYSSNQKNYLAWFQQKPGKAPKLLIYWASTRESGVPSRFSGSGSGTDFTLTISSLQPEDFATYFCHQYLSSYTFGQGTKVEIKRLEDLKNVFPPEVAVFEPSEAEISHTQKATLVCLATGFYPDHVELSWWVNGKEVHSGVSTDPQPLKEQPALNDSRYCLSSRLRVSATFWQNPRNHFRCQVQFYGLSENDEWTQDRAKPVTQIVSAEAWGRADCGFTSESYQQGVLSATILYEILLGKATLYAVLVSALVLMAMVKRKDSRGRAKRSGSGATNFSLLKQAGDVEENPGPTSMDWIWRILFLVGAATGAHSFEEVQLVESGGGLVQPGGSLRLSCAASGFTFTTYWMHWVRQAPGKGLEWVGYIRPSTGYTEYNQKFKDRFTISADTSKNTAYLQMNSLRAEDTAVYYCARSRWLLDYWGQGTLVTVSTREQKLISEEDGSGTPFPSLAPPIMLLVDGKQQMVVVCLVLDVAPPGLDSPIWFSAGNGSALDAFTYGPSPATDGTWTNLAHLSLPSEELASWEPLVCHTGPGAEGHSRSTQPMHLSGEASTARTCPQEPLRGTPGGALWLGVLRLLLFKLLLFDLLLTCSCLCDPAGPLPSPATTTRLRALGSHRLHPATETGGREATSSPRPQPRDRRWGDTPPGRKPGSPVRAKRSGSGVKQTLNFDLLKLAGDVESNPGPSRGHMTEYKPTVRLATRDDVPRAVRTLAAAFADYPATRHTVDPDRHIERVTELQELFLTRVGLDIGKVWVADDGAAVAVWTTPESVEAGAVFAEIGPRMAELSGSRLAAQQQMEGLLAPHRPKEPAWFLATVGVSPDHQGKGLGSAVVLPGVEAAERAGVPAFLETSAPRNLPFYERLGFTVTADVEVPEGPRTWCMTRKPGA

SEQ ID NO: 21082 - protein, 954 aa, Artificial Sequence
  Synthetic Polypeptide
MALPVTALLLPLALLLHAARPLEDLKNVFPPEVAVFEPSEAEISHTQKATLVCLATGFYPDHVELSWWVNGKEVHSGVSTDPQPLKEQPALNDSRYCLSSRLRVSATFWQNPRNHFRCQVQFYGLSENDEWTQDRAKPVTQIVSAEAWGRADCGFTSESYQQGVLSATILYEILLGKATLYAVLVSALVLMAMVKRKDSRGRAKRSGSGATNFSLLKQAGDVEENPGPTSMALPVTALLLPLALLLHAARPDIQMTQSPSSLSASVGDRVTITCKSSQSVLYSSNQKNYLAWFQQKPGKAPKLLIYWASTRESGVPSRFSGSGSGTDFTLTISSLQPEDFATYFCHQYLSSYTFGQGTKVEIKRGGGGSGGGGSGGGGSEVQLVESGGGLVQPGGSLRLSCAASGFTFTTYWMHWVRQAPGKGLEWVGYIRPSTGYTEYNQKFKDRFTISADTSKNTAYLQMNSLRAEDTAVYYCARSRWLLDYWGQGTLVTVSTREQKLISEEDLGSGTPFPSLAPPIMLLVDGKQQMVVVCLVLDVAPPGLDSPIWFSAGNGSALDAFTYGPSPATDGTWTNLAHLSLPSEELASWEPLVCHTGPGAEGHSRSTQPMHLSGEASTARTCPQEPLRGTPGGALWLGVLRLLLFKLLLFDLLLTCSCLCDPAGPLPSPATTTRLRALGSHRLHPATETGGREATSSPRPQPRDRRWGDTPPGRKPGSPVRAKRSGSGVKQTLNFDLLKLAGDVESNPGPSRSRGHMTEYKPTVRLATRDDVPRAVRTLAAAFADYPATRHTVDPDRHIERVTELQELFLTRVGLDIGKVWVADDGAAVAVWTTPESVEAGAVFAEIGPRMAELSGSRLAAQQQMEGLLAPHRPKEPAWFLATVGVSPDHQGKGLGSAVVLPGVEAAERAGVPAFLETSAPRNLPFYERLGFTVTADVEVPEGPRTWCMTRKPGA

SEQ ID NO: 21083 - protein, 891 aa, Artificial Sequence
  Synthetic Polypeptide
MALPVTALLLPLALLLHAARPDIQMTQSPSSLSASVGDRVTITCKSSQSVLYSSNQKNYLAWFQQKPGKAPKLLIYWASTRESGVPSRFSGSGSGTDFTLTISSLQPEDFATYFCHQYLSSYTFGQGTKVEIKRLEGKPIPNPLLGLDSTGSGDKQLDADVSPKPTIFLPSIAETKLQKAGTYLCLLEKFFPDVIKIHWQEKKSNTILGSQEGNTMKTNDTYMKFSWLTVPEKSLDKEHRCIVRHENNKNGVDQEIIFPPIKTDVITMDPKDNCSKDANDTLLLQLTNTSAYYMYLLLLLKSVVYFAIITCCLLRRTAFCCNGEKSRAKRSGSGATNFSLLKQAGDVEENPGPTSMDWIWRILFLVGAATGAHSFEEVQLVESGGGLVQPGGSLRLSCAASGFTFTTYWMHWVRQAPGKGLEWVGYIRPSTGYTEYNQKFKDRFTISADTSKNTAYLQMNSLRAEDTAVYYCARSRWLLDYWGQGTLVTVSTREQKLISEEDGSGSQPHTKPSVFVMKNGTNVACLVKEFYPKDIRINLVSSKKITEFDPAIVISPSGKYNAVKLGKYEDSNSVTCSVQHDNKTVHSTDFEVKTDSTDHVKPKETENTKQPSKSCHKPKAIVHTEKVNMMSLTVLGLRMLFAKTVAVNFLLTAKLFFLRAKRSGSGVKQTLNFDLLKLAGDVESNPGPSRGHMTEYKPTVRLATRDDVPRAVRTLAAAFADYPATRHTVDPDRHIERVTELQELFLTRVGLDIGKVWVADDGAAVAVWTTPESVEAGAVFAEIGPRMAELSGSRLAAQQQMEGLLAPHRPKEPAWFLATVGVSPDHQGKGLGSAVVLPGVEAAERAGVPAFLETSAPRNLPFYERLGFTVTADVEVPEGPRTWCMTRKPGA

SEQ ID NO: 21084 - protein, 629 aa, Artificial Sequence
  Synthetic Polypeptide
MALPVTALLLPLALLLHAARPDIQMTQSPSSLSASVGDRVTITCKSSQSVLYSSNQKNYLAWFQQKPGKAPKLLIYWASTRESGVPSRFSGSGSGTDFTLTISSLQPEDFATYFCHQYLSSYTFGQGTKVEIKRLESQPHTKPSVFVMKNGTNVACLVKEFYPKDIRINLVSSKKITEFDPAIVISPSGKYNAVKLGKYEDSNSVTCSVQHDNKTVHSTDFEVKTDSTDHVKPKETENTKQPSKSCHKPKAIVHTEKVNMMSLTVLGLRMLFAKTVAVNFLLTAKLFFLRAKRSGSGATNFSLLKQAGDVEENPGPTSMDWIWRILFLVGAATGAHSFEEVQLVESGGGLVQPGGSLRLSCAASGFTFTTYWMHWVRQAPGKGLEWVGYIRPSTGYTEYNQKFKDRFTISADTSKNTAYLQMNSLRAEDTAVYYCARSRWLLDYWGQGTLVTVSTRDKQLDADVSPKPTIFLPSIAETKLQKAGTYLCLLEKFFPDVIKIHWQEKKSNTILGSQEGNTMKTNDTYMKFSWLTVPEKSLDKEHRCIVRHENNKNGVDQEIIFPPIKTDVITMDPKDNCSKDANDTLLLQLTNTSAYYMYLLLLLKSVVYFAIITCCLLRRTAFCCNGEKS

SEQ ID NO: 21085 - protein, 906 aa, Artificial Sequence
  Synthetic Polypeptide
MALPVTALLLPLALLLHAARPLEGKPIPNPLLGLDSTGSGDKQLDADVSPKPTIFLPSIAETKLQKAGTYLCLLEKFFPDVIKIHWQEKKSNTILGSQEGNTMKTNDTYMKFSWLTVPEKSLDKEHRCIVRHENNKNGVDQEIIFPPIKTDVITMDPKDNCSKDANDTLLLQLTNTSAYYMYLLLLLKSVVYFAIITCCLLRRTAFCCNGEKSRAKRSGSGATNFSLLKQAGDVEENPGPTSMALPVTALLLPLALLLHAARPDIQMTQSPSSLSASVGDRVTITCKSSQSVLYSSNQKNYLAWFQQKPGKAPKLLIYWASTRESGVPSRFSGSGSGTDFTLTISSLQPEDFATYFCHQYLSSYTFGQGTKVEIKRGGGGSGGGGSGGGGSEVQLVESGGGLVQPGGSLRLSCAASGFTFTTYWMHWVRQAPGKGLEWVGYIRPSTGYTEYNQKFKDRFTISADTSKNTAYLQMNSLRAEDTAVYYCARSRWLLDYWGQGTLVTVSTREQKLISEEDGSGSQPHTKPSVFVMKNGTNVACLVKEFYPKDIRINLVSSKKITEFDPAIVISPSGKYNAVKLGKYEDSNSVTCSVQHDNKTVHSTDFEVKTDSTDHVKPKETENTKQPSKSCHKPKAIVHTEKVNMMSLTVLGLRMLFAKTVAVNFLLTAKLFFLRAKRSGSGVKQTLNFDLLKLAGDVESNPGPSRGHMTEYKPTVRLATRDDVPRAVRTLAAAFADYPATRHTVDPDRHIERVTELQELFLTRVGLDIGKVWVADDGAAVAVWTTPESVEAGAVFAEIGPRMAELSGSRLAAQQQMEGLLAPHRPKEPAWFLATVGVSPDHQGKGLGSAVVLPGVEAAERAGVPAFLETSAPRNLPFYERLGFTVTADVEVPEGPRTWCMTRKPGA

SEQ ID NO: 21086 - protein, 1031 aa, Artificial Sequence
  Synthetic Polypeptide
MALPVTALLLPLALLLHAARPDIQMTQSPSSLSASVGDRVTITCKSSQSVLYSSNQKNYLAWFQQKPGKAPKLLIYWASTRESGVPSRFSGSGSGTDFTLTISSLQPEDFATYFCHQYLSSYTFGQGTKVEIKRGQPKANPTVTLFPPSSEELQANKATLVCLISDFYPGAVTVAWKADGSPVKAGVETTKPSKQSNNKYAASSYLSLTPEQWKSHRSYSCQVTHEGSTVEKTVAPTECSGSQSFGLLDPKLCYLLDGILFIYGVILTALFLRVKFSRSADAPAYQQGQNQLYNELNLGRREEYDVLDKRRGRDPEMGGKPQRRKNPQEGLYNELQKDKMAEAYSEIGMKGERRRGKGHDGLYQGLSTATKDTYDALHMQALPPRRAKRSGSGATNFSLLKQAGDVEENPGPTSMDWIWRILFLVGAATGAHSFEEVQLVESGGGLVQPGGSLRLSCAASGFTFTTYWMHWVRQAPGKGLEWVGYIRPSTGYTEYNQKFKDRFTISADTSKNTAYLQMNSLRAEDTAVYYCARSRWLLDYWGQGTLVTVSASTKGPSVFPLAPSSKSTSGGTAALGCLVKDYFPEPVTVSWNSGALTSGVHTFPAVLQSSGLYSLSSVVTVPSSSLGTQTYICNVNHKPSNTKVDKRVEPKSCGTQSFGLLDPKLCYLLDGILFIYGVILTALFLRVKFSRSADAPAYQQGQNQLYNELNLGRREEYDVLDKRRGRDPEMGGKPQRRKNPQEGLYNELQKDKMAEAYSEIGMKGERRRGKGHDGLYQGLSTATKDTYDALHMQALPPRRAKRSGSGVKQTLNFDLLKLAGDVESNPGPSRGHMTEYKPTVRLATRDDVPRAVRTLAAAFADYPATRHTVDPDRHIERVTELQELFLTRVGLDIGKVWVADDGAAVAVWTTPESVEAGAVFAEIGPRMAELSGSRLAAQQQMEGLLAPHRPKEPAWFLATVGVSPDHQGKGLGSAVVLPGVEAAERAGVPAFLETSAPRNLPFYERLGFTVTADVEVPEGPRTWCMTRKPGA

SEQ ID NO: 21087 - protein, 817 aa, Artificial Sequence
  Synthetic Polypeptide
MALPVTALLLPLALLLHAARPDIQMTQSPSSLSASVGDRVTITCKSSQSVLYSSNQKNYLAWFQQKPGKAPKLLIYWASTRESGVPSRFSGSGSGTDFTLTISSLQPEDFATYFCHQYLSSYTFGQGTKVEIKRLEDLKNVFPPEVAVFEPSEAEISHTQKATLVCLATGFYPDHVELSWWVNGKEVHSGVSTDPQPLKEQPALNDSRYCLSSRLRVSATFWQNPRNHFRCQVQFYGLSENDEWTQDRAKPVTQIVSAEAWGRADCGSQSFGLLDPKLCYLLDGILFIYGVILTALFLRVKFSRSADAPAYQQGQNQLYNELNLGRREEYDVLDKRRGRDPEMGGKPQRRKNPQEGLYNELQKDKMAEAYSEIGMKGERRRGKGHDGLYQGLSTATKDTYDALHMQALPPRRAKRSGSGATNFSLLKQAGDVEENPGPTSMDWIWRILFLVGAATGAHSFEEVQLVESGGGLVQPGGSLRLSCAASGFTFTTYWMHWVRQAPGKGLEWVGYIRPSTGYTEYNQKFKDRFTISADTSKNTAYLQMNSLRAEDTAVYYCARSRWLLDYWGQGTLVTVSTRIQNPDPAVYQLRDSKSSDKSVCLFTDFDSQTNVSQSKDSDVYITDKTVLDMRSMDFKSNSAVAWSNKSDFACANAFNNSIIPEDTFFPSPESSCGTQSFGLLDPKLCYLLDGILFIYGVILTALFLRVKFSRSADAPAYQQGQNQLYNELNLGRREEYDVLDKRRGRDPEMGGKPQRRKNPQEGLYNELQKDKMAEAYSEIGMKGERRRGKGHDGLYQGLSTATKDTYDALHMQALPPR

SEQ ID NO: 21088 - protein, 817 aa, Artificial Sequence
  Synthetic Polypeptide
MALPVTALLLPLALLLHAARPDIQMTQSPSSLSASVGDRVTITCKSSQSVLYSSNQKNYLAWFQQKPGKAPKLLIYWASTRESGVPSRFSGSGSGTDFTLTISSLQPEDFATYFCHQYLSSYTFGQGTKVEIKRLEDLKNVFPPEVAVFEPSKAEIAHTQKATLVCLATGFYPDHVELSWWVNGKEVHSGVCTDPQPLKEQPALNDSRYCLSSRLRVSATFWQNPRNHFRCQVQFYGLSENDEWTQDRAKPVTQIVSAEAWGRADCGSQSFGLLDPKLCYLLDGILFIYGVILTALFLRVKFSRSADAPAYQQGQNQLYNELNLGRREEYDVLDKRRGRDPEMGGKPQRRKNPQEGLYNELQKDKMAEAYSEIGMKGERRRGKGHDGLYQGLSTATKDTYDALHMQALPPRRAKRSGSGATNFSLLKQAGDVEENPGPTSMDWIWRILFLVGAATGAHSFEEVQLVESGGGLVQPGGSLRLSCAASGFTFTTYWMHWVRQAPGKGLEWVGYIRPSTGYTEYNQKFKDRFTISADTSKNTAYLQMNSLRAEDTAVYYCARSRWLLDYWGQGTLVTVSTRIQNPDPAVYQLRDSKSSDKSVCLFTDFDSQTNVSQSKDSDVYITDKCVLDMRSMDFKSNSAVAWSNKSDFACANAFNNSIIPEDTFFPSSDVPCGTQSFGLLDPKLCYLLDGILFIYGVILTALFLRVKFSRSADAPAYQQGQNQLYNELNLGRREEYDVLDKRRGRDPEMGGKPQRRKNPQEGLYNELQKDKMAEAYSEIGMKGERRRGKGHDGLYQGLSTATKDTYDALHMQALPPR

SEQ ID NO: 21089 - protein, 888 aa, Artificial Sequence
  Synthetic Polypeptide
MALPVTALLLPLALLLHAARPDIQMTQSPSSLSASVGDRVTITCKSSQSVLYSSNQKNYLAWFQQKPGKAPKLLIYWASTRESGVPSRFSGSGSGTDFTLTISSLQPEDFATYFCHQYLSSYTFGQGTKVEIKRLEGKPIPNPLLGLDSTGSGEDLKNVFPPEVAVFEPSEAEISHTQKATLVCLATGFYPDHVELSWWVNGKEVHSGVSTDPQPLKEQPALNDSRYCLSSRLRVSATFWQNPRNHFRCQVQFYGLSENDEWTQDRAKPVTQIVSAEAWGRADCGSQSFGLLDPKLCYLLDGILFIYGVILTALFLRVKFSRSADAPAYQQGQNQLYNELNLGRREEYDVLDKRRGRDPEMGGKPQRRKNPQEGLYNELQKDKMAEAYSEIGMKGERRRGKGHDGLYQGLSTATKDTYDALHMQALPPRRAKRSGSGATNFSLLKQAGDVEENPGPTSMDWIWRILFLVGAATGAHSFEEVQLVESGGGLVQPGGSLRLSCAASGFTFTTYWMHWVRQAPGKGLEWVGYIRPSTGYTEYNQKFKDRFTISADTSKNTAYLQMNSLRAEDTAVYYCARSRWLLDYWGQGTLVTVSTREQKLISEEDGSGIQNPDPAVYQLRDSKSSDKSVCLFTDFDSQTNVSQSKDSDVYITDKTVLDMRSMDFKSNSAVAWSNKSDFACANAFNNSIIPEDTFFPSPESSCGTQSFGLLDPKLCYLLDGILFIYGVILTALFLRSKRSRLLHSDYMNMTPRRPGPTRKHYQPYAPPRDFAAYRSRVKFSRSADAPAYQQGQNQLYNELNLGRREEYDVLDKRRGRDPEMGGKPQRRKNPQEGLYNELQKDKMAEAYSEIGMKGERRRGKGHDGLYQGLSTATKDTYDALHMQALPPR

SEQ ID NO: 21090 - protein, 929 aa, Artificial Sequence
  Synthetic Polypeptide
MALPVTALLLPLALLLHAARPDIQMTQSPSSLSASVGDRVTITCKSSQSVLYSSNQKNYLAWFQQKPGKAPKLLIYWASTRESGVPSRFSGSGSGTDFTLTISSLQPEDFATYFCHQYLSSYTFGQGTKVEIKRLEGKPIPNPLLGLDSTGSGEDLKNVFPPEVAVFEPSEAEISHTQKATLVCLATGFYPDHVELSWWVNGKEVHSGVSTDPQPLKEQPALNDSRYCLSSRLRVSATFWQNPRNHFRCQVQFYGLSENDEWTQDRAKPVTQIVSAEAWGRADCGSQSFGLLDPKLCYLLDGILFIYGVILTALFLRSKRSRLLHSDYMNMTPRRPGPTRKHYQPYAPPRDFAAYRSRVKFSRSADAPAYQQGQNQLYNELNLGRREEYDVLDKRRGRDPEMGGKPQRRKNPQEGLYNELQKDKMAEAYSEIGMKGERRRGKGHDGLYQGLSTATKDTYDALHMQALPPRRAKRSGSGATNFSLLKQAGDVEENPGPTSMDWIWRILFLVGAATGAHSFEEVQLVESGGGLVQPGGSLRLSCAASGFTFTTYWMHWVRQAPGKGLEWVGYIRPSTGYTEYNQKFKDRFTISADTSKNTAYLQMNSLRAEDTAVYYCARSRWLLDYWGQGTLVTVSTREQKLISEEDGSGIQNPDPAVYQLRDSKSSDKSVCLFTDFDSQTNVSQSKDSDVYITDKTVLDMRSMDFKSNSAVAWSNKSDFACANAFNNSIIPEDTFFPSPESSCGTQSFGLLDPKLCYLLDGILFIYGVILTALFLRSKRSRLLHSDYMNMTPRRPGPTRKHYQPYAPPRDFAAYRSRVKFSRSADAPAYQQGQNQLYNELNLGRREEYDVLDKRRGRDPEMGGKPQRRKNPQEGLYNELQKDKMAEAYSEIGMKGERRRGKGHDGLYQGLSTATKDTYDALHMQALPPR

SEQ ID NO: 21091 - protein, 890 aa, Artificial Sequence
  Synthetic Polypeptide
MALPVTALLLPLALLLHAARPDIQMTQSPSSLSASVGDRVTITCKSSQSVLYSSNQKNYLAWFQQKPGKAPKLLIYWASTRESGVPSRFSGSGSGTDFTLTISSLQPEDFATYFCHQYLSSYTFGQGTKVEIKRLEGKPIPNPLLGLDSTGSGEDLKNVFPPEVAVFEPSEAEISHTQKATLVCLATGFYPDHVELSWWVNGKEVHSGVSTDPQPLKEQPALNDSRYCLSSRLRVSATFWQNPRNHFRCQVQFYGLSENDEWTQDRAKPVTQIVSAEAWGRADCGSQSFGLLDPKLCYLLDGILFIYGVILTALFLRVKFSRSADAPAYQQGQNQLYNELNLGRREEYDVLDKRRGRDPEMGGKPQRRKNPQEGLYNELQKDKMAEAYSEIGMKGERRRGKGHDGLYQGLSTATKDTYDALHMQALPPRRAKRSGSGATNFSLLKQAGDVEENPGPTSMDWIWRILFLVGAATGAHSFEEVQLVESGGGLVQPGGSLRLSCAASGFTFTTYWMHWVRQAPGKGLEWVGYIRPSTGYTEYNQKFKDRFTISADTSKNTAYLQMNSLRAEDTAVYYCARSRWLLDYWGQGTLVTVSTREQKLISEEDLGSGIQNPDPAVYQLRDSKSSDKSVCLFTDFDSQTNVSQSKDSDVYITDKTVLDMRSMDFKSNSAVAWSNKSDFACANAFNNSIIPEDTFFPSPESSCGTQSFGLLDPKLCYLLDGILFIYGVILTALFLKRGRKKLLYIFKQPFMRPVQTTQEEDGCSCRFPEEEEGGCELRVKFSRSADAPAYQQGQNQLYNELNLGRREEYDVLDKRRGRDPEMGGKPQRRKNPQEGLYNELQKDKMAEAYSEIGMKGERRRGKGHDGLYQGLSTATKDTYDALHMQALPPR

SEQ ID NO: 21092 - protein, 932 aa, Artificial Sequence
  Synthetic Polypeptide
MALPVTALLLPLALLLHAARPDIQMTQSPSSLSASVGDRVTITCKSSQSVLYSSNQKNYLAWFQQKPGKAPKLLIYWASTRESGVPSRFSGSGSGTDFTLTISSLQPEDFATYFCHQYLSSYTFGQGTKVEIKRLEGKPIPNPLLGLDSTGSGEDLKNVFPPEVAVFEPSEAEISHTQKATLVCLATGFYPDHVELSWWVNGKEVHSGVSTDPQPLKEQPALNDSRYCLSSRLRVSATFWQNPRNHFRCQVQFYGLSENDEWTQDRAKPVTQIVSAEAWGRADCGSQSFGLLDPKLCYLLDGILFIYGVILTALFLKRGRKKLLYIFKQPFMRPVQTTQEEDGCSCRFPEEEEGGCELRVKFSRSADAPAYQQGQNQLYNELNLGRREEYDVLDKRRGRDPEMGGKPQRRKNPQEGLYNELQKDKMAEAYSEIGMKGERRRGKGHDGLYQGLSTATKDTYDALHMQALPPRRAKRSGSGATNFSLLKQAGDVEENPGPTSMDWIWRILFLVGAATGAHSFEEVQLVESGGGLVQPGGSLRLSCAASGFTFTTYWMHWVRQAPGKGLEWVGYIRPSTGYTEYNQKFKDRFTISADTSKNTAYLQMNSLRAEDTAVYYCARSRWLLDYWGQGTLVTVSTREQKLISEEDLGSGIQNPDPAVYQLRDSKSSDKSVCLFTDFDSQTNVSQSKDSDVYITDKTVLDMRSMDFKSNSAVAWSNKSDFACANAFNNSIIPEDTFFPSPESSCGTQSFGLLDPKLCYLLDGILFIYGVILTALFLKRGRKKLLYIFKQPFMRPVQTTQEEDGCSCRFPEEEEGGCELRVKFSRSADAPAYQQGQNQLYNELNLGRREEYDVLDKRRGRDPEMGGKPQRRKNPQEGLYNELQKDKMAEAYSEIGMKGERRRGKGHDGLYQGLSTATKDTYDALHMQALPPR

SEQ ID NO: 21093 - protein, 822 aa, Artificial Sequence
  Synthetic Polypeptide
MALPVTALLLPLALLLHAARPDIQMTQSPSSLSASVGDRVTITCKSSQSVLYSSNQKNYLAWFQQKPGKAPKLLIYWASTRESGVPSRFSGSGSGTDFTLTISSLQPEDFATYFCHQYLSSYTFGQGTKVEIKRLEQSFGLLDPKLCYLLDGILFIYGVILTALFLRVKFSRSADAPAYQQGQNQLYNELNLGRREEYDVLDKRRGRDPEMGGKPQRRKNPQEGLYNELQKDKMAEAYSEIGMKGERRRGKGHDGLYQGLSTATKDTYDALHMQALPPRRAKRSGSGATNFSLLKQAGDVEENPGPTSMDWIWRILFLVGAATGAHSFEEVQLVESGGGLVQPGGSLRLSCAASGFTFTTYWMHWVRQAPGKGLEWVGYIRPSTGYTEYNQKFKDRFTISADTSKNTAYLQMNSLRAEDTAVYYCARSRWLLDYWGQGTLVTVSTRQSFGLLDPKLCYLLDGILFIYGVILTALFLRVKFSRSADAPAYQQGQNQLYNELNLGRREEYDVLDKRRGRDPEMGGKPQRRKNPQEGLYNELQKDKMAEAYSEIGMKGERRRGKGHDGLYQGLSTATKDTYDALHMQALPPRRAKRSGSGVKQTLNFDLLKLAGDVESNPGPSRGHMTEYKPTVRLATRDDVPRAVRTLAAAFADYPATRHTVDPDRHIERVTELQELFLTRVGLDIGKVWVADDGAAVAVWTTPESVEAGAVFAEIGPRMAELSGSRLAAQQQMEGLLAPHRPKEPAWFLATVGVSPDHQGKGLGSAVVLPGVEAAERAGVPAFLETSAPRNLPFYERLGFTVTADVEVPEGPRTWCMTRKPGA

SEQ ID NO: 21094 - protein, 647 aa, Artificial Sequence
  Synthetic Polypeptide
MALPVTALLLPLALLLHAARPDIQMTQSPSSLSASVGDRVTITCKSSQSVLYSSNQKNYLAWFQQKPGKAPKLLIYWASTRESGVPSRFSGSGSGTDFTLTISSLQPEDFATYFCHQYLSSYTFGQGTKVEIKRLEGQPKANPTVTLFPPSSEELQANKATLVCLISDFYPGAVTVAWKADGSPVKAGVETTKPSKQSNNKYAASSYLSLTPEQWKSHRSYSCQVTHEGSTVEKTVAPTECSPIKTDVITMDPKDNCSKDANDTLLLQLTNTSAYYMYLLLLLKSVVYFAIITCCLLRRTAFCCNGEKSRAKRSGSGATNFSLLKQAGDVEENPGPTSMDWIWRILFLVGAATGAHSFEEVQLVESGGGLVQPGGSLRLSCAASGFTFTTYWMHWVRQAPGKGLEWVGYIRPSTGYTEYNQKFKDRFTISADTSKNTAYLQMNSLRAEDTAVYYCARSRWLLDYWGQGTLVTVSTRASTKGPSVFPLAPSSKSTSGGTAALGCLVKDYFPEPVTVSWNSGALTSGVHTFPAVLQSSGLYSLSSVVTVPSSSLGTQTYICNVNHKPSNTKVDKRVEPKSCEVKTDSTDHVKPKETENTKQPSKSCHKPKAIVHTEKVNMMSLTVLGLRMLFAKTVAVNFLLTAKLFFL

SEQ ID NO: 21095 - protein, 625 aa, Artificial Sequence
  Synthetic Polypeptide
MALPVTALLLPLALLLHAARPDIQMTQSPSSLSASVGDRVTITCKSSQSVLYSSNQKNYLAWFQQKPGKAPKLLIYWASTRESGVPSRFSGSGSGTDFTLTISSLQPEDFATYFCHQYLSSYTFGQGTKVEIKRLEGQPKANPTVTLFPPSSEELQANKATLVCLISDFYPGAVTVAWKADGSPVKAGVETTKPSKQSNNKYAASSYLSLTPEQWKSHRSYSCQVTHEGSTVEKTVAPTECSGRADCGITSASYHQGVLSATILYEILLGKATLYAVLVSALVLMAMVKRKDSRGRAKRSGSGATNFSLLKQAGDVEENPGPTSMDWIWRILFLVGAATGAHSFEEVQLVESGGGLVQPGGSLRLSCAASGFTFTTYWMHWVRQAPGKGLEWVGYIRPSTGYTEYNQKFKDRFTISADTSKNTAYLQMNSLRAEDTAVYYCARSRWLLDYWGQGTLVTVSTRASTKGPSVFPLAPSSKSTSGGTAALGCLVKDYFPEPVTVSWNSGALTSGVHTFPAVLQSSGLYSLSSVVTVPSSSLGTQTYICNVNHKPSNTKVDKRVEPKSCIPEDTFFPSSDVPCDVKLVEKSFETDTNLNFQNLSVIGFRILLLKVAGFNLLMTLRLWSS

SEQ ID NO: 21096 - protein, 625 aa, Artificial Sequence
  Synthetic Polypeptide
MALPVTALLLPLALLLHAARPDIQMTQSPSSLSASVGDRVTITCKSSQSVLYSSNQKNYLAWFQQKPGKAPKLLIYWASTRESGVPSRFSGSGSGTDFTLTISSLQPEDFATYFCHQYLSSYTFGQGTKVEIKRLEGQPKANPTVTLFPPSSEELQANKATLVCLISDFYPGAVTVAWKADGSPVKAGVETTKPSKQSNNKYAASSYLSLTPEQWKSHRSYSCQVTHEGSTVEKTVAPTECSGRADCGFTSESYQQGVLSATILYEILLGKATLYAVLVSALVLMAMVKRKDSRGRAKRSGSGATNFSLLKQAGDVEENPGPTSMDWIWRILFLVGAATGAHSFEEVQLVESGGGLVQPGGSLRLSCAASGFTFTTYWMHWVRQAPGKGLEWVGYIRPSTGYTEYNQKFKDRFTISADTSKNTAYLQMNSLRAEDTAVYYCARSRWLLDYWGQGTLVTVSTRASTKGPSVFPLAPSSKSTSGGTAALGCLVKDYFPEPVTVSWNSGALTSGVHTFPAVLQSSGLYSLSSVVTVPSSSLGTQTYICNVNHKPSNTKVDKRVEPKSCIPEDTFFPSPESSCDVKLVEKSFETDTNLNFQNLSVIGFRILLLKVAGFNLLMTLRLWSS

SEQ ID NO: 21097 - protein, 451 aa, Artificial Sequence
  Synthetic Polypeptide
MALPVTALLLPLALLLHAARPDIQMTQSPSSLSASVGDRVTITCKSSQSVLYSSNQKNYLAWFQQKPGKAPKLLIYWASTRESGVPSRFSGSGSGTDFTLTISSLQPEDFATYFCHQYLSSYTFGQGTKVEIKRGGGGSGGGGSGGGGSEVQLVESGGGLVQPGGSLRLSCAASGFTFTTYWMHWVRQAPGKGLEWVGYIRPSTGYTEYNQKFKDRFTISADTSKNTAYLQMNSLRAEDTAVYYCARSRWLLDYWGQGTLVTVSTRDGNEEMGGITQTPYKVSISGTTVILTCPQYPGSEILWQHNDKNIGGDEDDKNIGSDEDHLSLKEFSELEQSGYYVCYPRGSKPEDANFYLYLRARVCENCMEMDVMSVATIVIVDICITGGLLLLVYYWSKNRKAKAKPVTRGAGAGGRQRGQNKERPPPVPNPDYEPIRKGQRDLYSGLNQRRI

SEQ ID NO: 21098 - protein, 416 aa, Artificial Sequence
  Synthetic Polypeptide
MALPVTALLLPLALLLHAARPDIQMTQSPSSLSASVGDRVTITCKSSQSVLYSSNQKNYLAWFQQKPGKAPKLLIYWASTRESGVPSRFSGSGSGTDFTLTISSLQPEDFATYFCHQYLSSYTFGQGTKVEIKRGGGGSGGGGSGGGGSEVQLVESGGGLVQPGGSLRLSCAASGFTFTTYWMHWVRQAPGKGLEWVGYIRPSTGYTEYNQKFKDRFTISADTSKNTAYLQMNSLRAEDTAVYYCARSRWLLDYWGQGTLVTVSTRFKIPIEELEDRVFVNCNTSITWVEGTVGTLLSDITRLDLGKRILDPRGIYRCNGTDIYKDKESTVQVHYRMCQSCVELDPATVAGIIVTDVIATLLLALGVFCFAGHETGRLSGAADTQALLRNDQVYQPLRDRDDAQYSHLGGNWARNK

SEQ ID NO: 21099 - protein, 426 aa, Artificial Sequence
  Synthetic Polypeptide
MALPVTALLLPLALLLHAARPDIQMTQSPSSLSASVGDRVTITCKSSQSVLYSSNQKNYLAWFQQKPGKAPKLLIYWASTRESGVPSRFSGSGSGTDFTLTISSLQPEDFATYFCHQYLSSYTFGQGTKVEIKRGGGGSGGGGSGGGGSEVQLVESGGGLVQPGGSLRLSCAASGFTFTTYWMHWVRQAPGKGLEWVGYIRPSTGYTEYNQKFKDRFTISADTSKNTAYLQMNSLRAEDTAVYYCARSRWLLDYWGQGTLVTVSTRQSIKGNHLVKVYDYQEDGSVLLTCDAEAKNITWFKDGKMIGFLTEDKKKWNLGSNAKDPRGMYQCKGSQNKSKPLQVYYRMCQNCIELNAATISGFLFAEIVSIFVLAVGVYFIAGQDGVRQSRASDKQTLLPNDQLYQPLKDREDDQYSHLQGNQLRRN

SEQ ID NO: 21100 - protein, 409 aa, Artificial Sequence
  Synthetic Polypeptide
MALPVTALLLPLALLLHAARPDIQMTQSPSSLSASVGDRVTITCKSSQSVLYSSNQKNYLAWFQQKPGKAPKLLIYWASTRESGVPSRFSGSGSGTDFTLTISSLQPEDFATYFCHQYLSSYTFGQGTKVEIKRGGGGSGGGGSGGGGSEVQLVESGGGLVQPGGSLRLSCAASGFTFTTYWMHWVRQAPGKGLEWVGYIRPSTGYTEYNQKFKDRFTISADTSKNTAYLQMNSLRAEDTAVYYCARSRWLLDYWGQGTLVTVSTRQSFGLLDPKLCYLLDGILFIYGVILTALFLRVKFSRSADAPAYQQGQNQLYNELNLGRREEYDVLDKRRGRDPEMGGKPQRRKNPQEGLYNELQKDKMAEAYSEIGMKGERRRGKGHDGLYQGLSTATKDTYDALHMQALPPR

SEQ ID NO: 21101 - protein, 451 aa, Artificial Sequence
  Synthetic Polypeptide
MALPVTALLLPLALLLHAARPEVQLVESGGGLVQPGGSLRLSCAASGFTFTTYWMHWVRQAPGKGLEWVGYIRPSTGYTEYNQKFKDRFTISADTSKNTAYLQMNSLRAEDTAVYYCARSRWLLDYWGQGTLVTVSGGGGSGGGGSGGGGSDIQMTQSPSSLSASVGDRVTITCKSSQSVLYSSNQKNYLAWFQQKPGKAPKLLIYWASTRESGVPSRFSGSGSGTDFTLTISSLQPEDFATYFCHQYLSSYTFGQGTKVEIKRTRDGNEEMGGITQTPYKVSISGTTVILTCPQYPGSEILWQHNDKNIGGDEDDKNIGSDEDHLSLKEFSELEQSGYYVCYPRGSKPEDANFYLYLRARVCENCMEMDVMSVATIVIVDICITGGLLLLVYYWSKNRKAKAKPVTRGAGAGGRQRGQNKERPPPVPNPDYEPIRKGQRDLYSGLNQRRI

SEQ ID NO: 21102 - protein, 416 aa, Artificial Sequence
  Synthetic Polypeptide
MALPVTALLLPLALLLHAARPEVQLVESGGGLVQPGGSLRLSCAASGFTFTTYWMHWVRQAPGKGLEWVGYIRPSTGYTEYNQKFKDRFTISADTSKNTAYLQMNSLRAEDTAVYYCARSRWLLDYWGQGTLVTVSGGGGSGGGGSGGGGSDIQMTQSPSSLSASVGDRVTITCKSSQSVLYSSNQKNYLAWFQQKPGKAPKLLIYWASTRESGVPSRFSGSGSGTDFTLTISSLQPEDFATYFCHQYLSSYTFGQGTKVEIKRTRFKIPIEELEDRVFVNCNTSITWVEGTVGTLLSDITRLDLGKRILDPRGIYRCNGTDIYKDKESTVQVHYRMCQSCVELDPATVAGIIVTDVIATLLLALGVFCFAGHETGRLSGAADTQALLRNDQVYQPLRDRDDAQYSHLGGNWARNK

SEQ ID NO: 21103 - protein, 426 aa, Artificial Sequence
  Synthetic Polypeptide
MALPVTALLLPLALLLHAARPEVQLVESGGGLVQPGGSLRLSCAASGFTFTTYWMHWVRQAPGKGLEWVGYIRPSTGYTEYNQKFKDRFTISADTSKNTAYLQMNSLRAEDTAVYYCARSRWLLDYWGQGTLVTVSGGGGSGGGGSGGGGSDIQMTQSPSSLSASVGDRVTITCKSSQSVLYSSNQKNYLAWFQQKPGKAPKLLIYWASTRESGVPSRFSGSGSGTDFTLTISSLQPEDFATYFCHQYLSSYTFGQGTKVEIKRTRQSIKGNHLVKVYDYQEDGSVLLTCDAEAKNITWFKDGKMIGFLTEDKKKWNLGSNAKDPRGMYQCKGSQNKSKPLQVYYRMCQNCIELNAATISGFLFAEIVSIFVLAVGVYFIAGQDGVRQSRASDKQTLLPNDQLYQPLKDREDDQYSHLQGNQLRRN

SEQ ID NO: 21104 - protein, 409 aa, Artificial Sequence
  Synthetic Polypeptide
MALPVTALLLPLALLLHAARPEVQLVESGGGLVQPGGSLRLSCAASGFTFTTYWMHWVRQAPGKGLEWVGYIRPSTGYTEYNQKFKDRFTISADTSKNTAYLQMNSLRAEDTAVYYCARSRWLLDYWGQGTLVTVSGGGGSGGGGSGGGGSDIQMTQSPSSLSASVGDRVTITCKSSQSVLYSSNQKNYLAWFQQKPGKAPKLLIYWASTRESGVPSRFSGSGSGTDFTLTISSLQPEDFATYFCHQYLSSYTFGQGTKVEIKRTRQSFGLLDPKLCYLLDGILFIYGVILTALFLRVKFSRSADAPAYQQGQNQLYNELNLGRREEYDVLDKRRGRDPEMGGKPQRRKNPQEGLYNELQKDKMAEAYSEIGMKGERRRGKGHDGLYQGLSTATKDTYDALHMQALPPR

SEQ ID NO: 21105 - protein, 642 aa, Artificial Sequence
  Synthetic Polypeptide
MALPVTALLLPLALLLHAARPDIQMTQSPSSLSASVGDRVTITCKSSQSVLYSSNQKNYLAWFQQKPGKAPKLLIYWASTRESGVPSRFSGSGSGTDFTLTISSLQPEDFATYFCHQYLSSYTFGQGTKVEIKRGGGGSGGGGSGGGGSEVQLVESGGGLVQPGGSLRLSCAASGFTFTTYWMHWVRQAPGKGLEWVGYIRPSTGYTEYNQKFKDRFTISADTSKNTAYLQMNSLRAEDTAVYYCARSRWLLDYWGQGTLVTVSTRGSGIQNPDPAVYQLRDSKSSDKSVCLFTDFDSQTNVSQSKDSDVYITDKTVLDMRSMDFKSNSAVAWSNKSDFACANAFNNSIIPEDTFFPSPESSCDVKLVEKSFETDTNLNFQNLSVIGFRILLLKVAGFNLLMTLRLWSSRAKRSGSGVKQTLNFDLLKLAGDVESNPGPSRGHMTEYKPTVRLATRDDVPRAVRTLAAAFADYPATRHTVDPDRHIERVTELQELFLTRVGLDIGKVWVADDGAAVAVWTTPESVEAGAVFAEIGPRMAELSGSRLAAQQQMEGLLAPHRPKEPAWFLATVGVSPDHQGKGLGSAVVLPGVEAAERAGVPAFLETSAPRNLPFYERLGFTVTADVEVPEGPRTWCMTRKPGA

SEQ ID NO: 21106 - protein, 674 aa, Artificial Sequence
  Synthetic Polypeptide
MALPVTALLLPLALLLHAARPDIQMTQSPSSLSASVGDRVTITCKSSQSVLYSSNQKNYLAWFQQKPGKAPKLLIYWASTRESGVPSRFSGSGSGTDFTLTISSLQPEDFATYFCHQYLSSYTFGQGTKVEIKRGGGGSGGGGSGGGGSEVQLVESGGGLVQPGGSLRLSCAASGFTFTTYWMHWVRQAPGKGLEWVGYIRPSTGYTEYNQKFKDRFTISADTSKNTAYLQMNSLRAEDTAVYYCARSRWLLDYWGQGTLVTVSLEDLKNVFPPEVAVFEPSEAEISHTQKATLVCLATGFYPDHVELSWWVNGKEVHSGVSTDPQPLKEQPALNDSRYCLSSRLRVSATFWQNPRNHFRCQVQFYGLSENDEWTQDRAKPVTQIVSAEAWGRADCGFTSESYQQGVLSATILYEILLGKATLYAVLVSALVLMAMVKRKDSRGRAKRSGSGATNFSLLKQAGDVEENPGPTRGHMTEYKPTVRLATRDDVPRAVRTLAAAFADYPATRHTVDPDRHIERVTELQELFLTRVGLDIGKVWVADDGAAVAVWTTPESVEAGAVFAEIGPRMAELSGSRLAAQQQMEGLLAPHRPKEPAWFLATVGVSPDHQGKGLGSAVVLPGVEAAERAGVPAFLETSAPRNLPFYERLGFTVTADVEVPEGPRTWCMTRKPGA

SEQ ID NO: 21107 - protein, 724 aa, Artificial Sequence
  Synthetic Polypeptide
MALPVTALLLPLALLLHAARPDIQMTQSPSSLSASVGDRVTITCKSSQSVLYSSNQKNYLAWFQQKPGKAPKLLIYWASTRESGVPSRFSGSGSGTDFTLTISSLQPEDFATYFCHQYLSSYTFGQGTKVEIKRGGGGSGGGGSGGGGSEVQLVESGGGLVQPGGSLRLSCAASGFTFTTYWMHWVRQAPGKGLEWVGYIRPSTGYTEYNQKFKDRFTISADTSKNTAYLQMNSLRAEDTAVYYCARSRWLLDYWGQGTLVTVSTREQKLISEEDLGSGTPFPSLAPPIMLLVDGKQQMVVVCLVLDVAPPGLDSPIWFSAGNGSALDAFTYGPSPATDGTWTNLAHLSLPSEELASWEPLVCHTGPGAEGHSRSTQPMHLSGEASTARTCPQEPLRGTPGGALWLGVLRLLLFKLLLFDLLLTCSCLCDPAGPLPSPATTTRLRALGSHRLHPATETGGREATSSPRPQPRDRRWGDTPPGRKPGSPVRAKRSGSGVKQTLNFDLLKLAGDVESNPGPSRSRGHMTEYKPTVRLATRDDVPRAVRTLAAAFADYPATRHTVDPDRHIERVTELQELFLTRVGLDIGKVWVADDGAAVAVWTTPESVEAGAVFAEIGPRMAELSGSRLAAQQQMEGLLAPHRPKEPAWFLATVGVSPDHQGKGLGSAVVLPGVEAAERAGVPAFLETSAPRNLPFYERLGFTVTADVEVPEGPRTWCMTRKPGA

SEQ ID NO: 21108 - protein, 544 aa, Artificial Sequence
  Synthetic Polypeptide
MALPVTALLLPLALLLHAARPDIQMTQSPSSLSASVGDRVTITCKSSQSVLYSSNQKNYLAWFQQKPGKAPKLLIYWASTRESGVPSRFSGSGSGTDFTLTISSLQPEDFATYFCHQYLSSYTFGQGTKVEIKRLEDLKNVFPPEVAVFEPSEAEISHTQKATLVCLATGFYPDHVELSWWVNGKEVHSGVSTDPQPLKEQPALNDSRYCLSSRLRVSATFWQNPRNHFRCQVQFYGLSENDEWTQDRAKPVTQIVSAEAWGRADCGFTSESYQQGVLSATILYEILLGKATLYAVLVSALVLMAMVKRKDSRGRAKRSGSGATNFSLLKQAGDVEENPGPTRGHMTEYKPTVRLATRDDVPRAVRTLAAAFADYPATRHTVDPDRHIERVTELQELFLTRVGLDIGKVWVADDGAAVAVWTTPESVEAGAVFAEIGPRMAELSGSRLAAQQQMEGLLAPHRPKEPAWFLATVGVSPDHQGKGLGSAVVLPGVEAAERAGVPAFLETSAPRNLPFYERLGFTVTADVEVPEGPRTWCMTRKPGA

SEQ ID NO: 21109 - protein, 314 aa, Artificial Sequence
  Synthetic Polypeptide
MALPVTALLLPLALLLHAARPDIQMTQSPSSLSASVGDRVTITCKSSQSVLYSSNQKNYLAWFQQKPGKAPKLLIYWASTRESGVPSRFSGSGSGTDFTLTISSLQPEDFATYFCHQYLSSYTFGQGTKVEIKRLEDLKNVFPPEVAVFEPSEAEISHTQKATLVCLATGFYPDHVELSWWVNGKEVHSGVSTDPQPLKEQPALNDSRYCLSSRLRVSATFWQNPRNHFRCQVQFYGLSENDEWTQDRAKPVTQIVSAEAWGRADCGFTSESYQQGVLSATILYEILLGKATLYAVLVSALVLMAMVKRKDSRG

SEQ ID NO: 21110 - protein, 444 aa, Artificial Sequence
  Synthetic Polypeptide
MDWIWRILFLVGAATGAHSFEEVQLVESGGGLVQPGGSLRLSCAASGFTFTTYWMHWVRQAPGKGLEWVGYIRPSTGYTEYNQKFKDRFTISADTSKNTAYLQMNSLRAEDTAVYYCARSRWLLDYWGQGTLVTVSTRIQNPDPAVYQLRDSKSSDKSVCLFTDFDSQTNVSQSKDSDVYITDKTVLDMRSMDFKSNSAVAWSNKSDFACANAFNNSIIPEDTFFPSPESSCDVKLVEKSFETDTNLNFQNLSVIGFRILLLKVAGFNLLMTLRLWSSRAKRSGSGVKQTLNFDLLKLAGDVESNPGPSRGHMAKPLSQEESTLIERATATINSIPISEDYSVASAALSSDGRIFTGVNVYHFTGGPCAELVVLGTAAAAAAGNLTCIVAIGNENRGILSPCGRCRQVLLDLHPGIKAIVKDSDGQPTAVGIRELLPSGYVWEG

SEQ ID NO: 21111 - protein, 278 aa, Artificial Sequence
  Synthetic Polypeptide
MDWIWRILFLVGAATGAHSFEEVQLVESGGGLVQPGGSLRLSCAASGFTFTTYWMHWVRQAPGKGLEWVGYIRPSTGYTEYNQKFKDRFTISADTSKNTAYLQMNSLRAEDTAVYYCARSRWLLDYWGQGTLVTVSTRIQNPDPAVYQLRDSKSSDKSVCLFTDFDSQTNVSQSKDSDVYITDKTVLDMRSMDFKSNSAVAWSNKSDFACANAFNNSIIPEDTFFPSPESSCDVKLVEKSFETDTNLNFQNLSVIGFRILLLKVAGFNLLMTLRLWSS

SEQ ID NO: 21112 - protein, 562 aa, Artificial Sequence
  Synthetic Polypeptide
MALPVTALLLPLALLLHAARPDIQMTQSPSSLSASVGDRVTITCKSSQSVLYSSNQKNYLAWFQQKPGKAPKLLIYWASTRESGVPSRFSGSGSGTDFTLTISSLQPEDFATYFCHQYLSSYTFGQGTKVEIKRLEGKPIPNPLLGLDSTGSGEDLKNVFPPEVAVFEPSEAEISHTQKATLVCLATGFYPDHVELSWWVNGKEVHSGVCTDPQPLKEQPALNDSRYCLSSRLRVSATFWQNPRNHFRCQVQFYGLSENDEWTQDRAKPVTQIVSAEAWGRADCGFTSESYQQGVLSATILYEILLGKATLYAVLVSALVLMAMVKRKDSRGRAKRSGSGATNFSLLKQAGDVEENPGPTRGHMTEYKPTVRLATRDDVPRAVRTLAAAFADYPATRHTVDPDRHIERVTELQELFLTRVGLDIGKVWVADDGAAVAVWTTPESVEAGAVFAEIGPRMAELSGSRLAAQQQMEGLLAPHRPKEPAWFLATVGVSPDHQGKGLGSAVVLPGVEAAERAGVPAFLETSAPRNLPFYERLGFTVTADVEVPEGPRTWCMTRKPGA

SEQ ID NO: 21113 - protein, 332 aa, Artificial Sequence
  Synthetic Polypeptide
MALPVTALLLPLALLLHAARPDIQMTQSPSSLSASVGDRVTITCKSSQSVLYSSNQKNYLAWFQQKPGKAPKLLIYWASTRESGVPSRFSGSGSGTDFTLTISSLQPEDFATYFCHQYLSSYTFGQGTKVEIKRLEGKPIPNPLLGLDSTGSGEDLKNVFPPEVAVFEPSEAEISHTQKATLVCLATGFYPDHVELSWWVNGKEVHSGVCTDPQPLKEQPALNDSRYCLSSRLRVSATFWQNPRNHFRCQVQFYGLSENDEWTQDRAKPVTQIVSAEAWGRADCGFTSESYQQGVLSATILYEILLGKATLYAVLVSALVLMAMVKRKDSRG

SEQ ID NO: 21114 - protein, 456 aa, Artificial Sequence
  Synthetic Polypeptide
MDWIWRILFLVGAATGAHSFEEVQLVESGGGLVQPGGSLRLSCAASGFTFTTYWMHWVRQAPGKGLEWVGYIRPSTGYTEYNQKFKDRFTISADTSKNTAYLQMNSLRAEDTAVYYCARSRWLLDYWGQGTLVTVSTREQKLISEEDGSGIQNPDPAVYQLRDSKSSDKSVCLFTDFDSQTNVSQSKDSDVYITDKCVLDMRSMDFKSNSAVAWSNKSDFACANAFNNSIIPEDTFFPSPESSCDVKLVEKSFETDTNLNFQNLSVIGFRILLLKVAGFNLLMTLRLWSSRAKRSGSGVKQTLNFDLLKLAGDVESNPGPSRGHMAKPLSQEESTLIERATATINSIPISEDYSVASAALSSDGRIFTGVNVYHFTGGPCAELVVLGTAAAAAAGNLTCIVAIGNENRGILSPCGRCRQVLLDLHPGIKAIVKDSDGQPTAVGIRELLPSGYVWEG

SEQ ID NO: 21115 - protein, 290 aa, Artificial Sequence
  Synthetic Polypeptide
MDWIWRILFLVGAATGAHSFEEVQLVESGGGLVQPGGSLRLSCAASGFTFTTYWMHWVRQAPGKGLEWVGYIRPSTGYTEYNQKFKDRFTISADTSKNTAYLQMNSLRAEDTAVYYCARSRWLLDYWGQGTLVTVSTREQKLISEEDGSGIQNPDPAVYQLRDSKSSDKSVCLFTDFDSQTNVSQSKDSDVYITDKCVLDMRSMDFKSNSAVAWSNKSDFACANAFNNSIIPEDTFFPSPESSCDVKLVEKSFETDTNLNFQNLSVIGFRILLLKVAGFNLLMTLRLWSS

SEQ ID NO: 21116 - protein, 642 aa, Artificial Sequence
  Synthetic Polypeptide
MALPVTALLLPLALLLHAARPDIQMTQSPSSLSASVGDRVTITCKSSQSVLYSSNQKNYLAWFQQKPGKAPKLLIYWASTRESGVPSRFSGSGSGTDFTLTISSLQPEDFATYFCHQYLSSYTFGQGTKVEIKRGGGGSGGGGSGGGGSEVQLVESGGGLVQPGGSLRLSCAASGFTFTTYWMHWVRQAPGKGLEWVGYIRPSTGYTEYNQKFKDRFTISADTSKNTAYLQMNSLRAEDTAVYYCARSRWLLDYWGQGTLVTVSTRGSGIQNPDPAVYQLRDSKSSDKSVCLFTDFDSQTNVSQSKDSDVYITDKTVLDMRSMDFKSNSAVAWSNKSDFACANAFNNSIIPEDTFFPSSDVPCDVKLVEKSFETDTNLNFQNLSVIGFRILLLKVAGFNLLMTLRLWSSRAKRSGSGVKQTLNFDLLKLAGDVESNPGPSRGHMTEYKPTVRLATRDDVPRAVRTLAAAFADYPATRHTVDPDRHIERVTELQELFLTRVGLDIGKVWVADDGAAVAVWTTPESVEAGAVFAEIGPRMAELSGSRLAAQQQMEGLLAPHRPKEPAWFLATVGVSPDHQGKGLGSAVVLPGVEAAERAGVPAFLETSAPRNLPFYERLGFTVTADVEVPEGPRTWCMTRKPGA

SEQ ID NO: 21117 - protein, 674 aa, Artificial Sequence
  Synthetic Polypeptide
MALPVTALLLPLALLLHAARPDIQMTQSPSSLSASVGDRVTITCKSSQSVLYSSNQKNYLAWFQQKPGKAPKLLIYWASTRESGVPSRFSGSGSGTDFTLTISSLQPEDFATYFCHQYLSSYTFGQGTKVEIKRGGGGSGGGGSGGGGSEVQLVESGGGLVQPGGSLRLSCAASGFTFTTYWMHWVRQAPGKGLEWVGYIRPSTGYTEYNQKFKDRFTISADTSKNTAYLQMNSLRAEDTAVYYCARSRWLLDYWGQGTLVTVSLEDLKNVFPPEVAVFEPSKAEIAHTQKATLVCLATGFYPDHVELSWWVNGKEVHSGVSTDPQPLKEQPALNDSRYCLSSRLRVSATFWQNPRNHFRCQVQFYGLSENDEWTQDRAKPVTQIVSAEAWGRADCGITSASYHQGVLSATILYEILLGKATLYAVLVSALVLMAMVKRKDSRGRAKRSGSGATNFSLLKQAGDVEENPGPTRGHMTEYKPTVRLATRDDVPRAVRTLAAAFADYPATRHTVDPDRHIERVTELQELFLTRVGLDIGKVWVADDGAAVAVWTTPESVEAGAVFAEIGPRMAELSGSRLAAQQQMEGLLAPHRPKEPAWFLATVGVSPDHQGKGLGSAVVLPGVEAAERAGVPAFLETSAPRNLPFYERLGFTVTADVEVPEGPRTWCMTRKPGA

SEQ ID NO: 21118 - protein, 697 aa, Artificial Sequence
  Synthetic Polypeptide
MALPVTALLLPLALLLHAARPDIQMTQSPSSLSASVGDRVTITCKSSQSVLYSSNQKNYLAWFQQKPGKAPKLLIYWASTRESGVPSRFSGSGSGTDFTLTISSLQPEDFATYFCHQYLSSYTFGQGTKVEIKRGGGGSGGGGSGGGGSEVQLVESGGGLVQPGGSLRLSCAASGFTFTTYWMHWVRQAPGKGLEWVGYIRPSTGYTEYNQKFKDRFTISADTSKNTAYLQMNSLRAEDTAVYYCARSRWLLDYWGQGTLVTVSTRGSGGGGSGGGGSGDGNEEMGGITQTPYKVSISGTTVILTCPQYPGSEILWQHNDKNIGGDEDDKNIGSDEDHLSLKEFSELEQSGYYVCYPRGSKPEDANFYLYLRARVCENCMEMDVMSVATIVIVDICITGGLLLLVYYWSKNRKAKAKPVTRGAGAGGRQRGQNKERPPPVPNPDYEPIRKGQRDLYSGLNQRRIRAKRSGSGVKQTLNFDLLKLAGDVESNPGPSRGHMTEYKPTVRLATRDDVPRAVRTLAAAFADYPATRHTVDPDRHIERVTELQELFLTRVGLDIGKVWVADDGAAVAVWTTPESVEAGAVFAEIGPRMAELSGSRLAAQQQMEGLLAPHRPKEPAWFLATVGVSPDHQGKGLGSAVVLPGVEAAERAGVPAFLETSAPRNLPFYERLGFTVTADVEVPEGPRTWCMTRKPGA

SEQ ID NO: 21119 - protein, 662 aa, Artificial Sequence
  Synthetic Polypeptide
MALPVTALLLPLALLLHAARPDIQMTQSPSSLSASVGDRVTITCKSSQSVLYSSNQKNYLAWFQQKPGKAPKLLIYWASTRESGVPSRFSGSGSGTDFTLTISSLQPEDFATYFCHQYLSSYTFGQGTKVEIKRGGGGSGGGGSGGGGSEVQLVESGGGLVQPGGSLRLSCAASGFTFTTYWMHWVRQAPGKGLEWVGYIRPSTGYTEYNQKFKDRFTISADTSKNTAYLQMNSLRAEDTAVYYCARSRWLLDYWGQGTLVTVSTRGSGGGGSGGGGSGFKIPIEELEDRVFVNCNTSITWVEGTVGTLLSDITRLDLGKRILDPRGIYRCNGTDIYKDKESTVQVHYRMCQSCVELDPATVAGIIVTDVIATLLLALGVFCFAGHETGRLSGAADTQALLRNDQVYQPLRDRDDAQYSHLGGNWARNKRAKRSGSGVKQTLNFDLLKLAGDVESNPGPSRGHMTEYKPTVRLATRDDVPRAVRTLAAAFADYPATRHTVDPDRHIERVTELQELFLTRVGLDIGKVWVADDGAAVAVWTTPESVEAGAVFAEIGPRMAELSGSRLAAQQQMEGLLAPHRPKEPAWFLATVGVSPDHQGKGLGSAVVLPGVEAAERAGVPAFLETSAPRNLPFYERLGFTVTADVEVPEGPRTWCMTRKPGA

SEQ ID NO: 21120 - protein, 672 aa, Artificial Sequence
  Synthetic Polypeptide
MALPVTALLLPLALLLHAARPDIQMTQSPSSLSASVGDRVTITCKSSQSVLYSSNQKNYLAWFQQKPGKAPKLLIYWASTRESGVPSRFSGSGSGTDFTLTISSLQPEDFATYFCHQYLSSYTFGQGTKVEIKRGGGGSGGGGSGGGGSEVQLVESGGGLVQPGGSLRLSCAASGFTFTTYWMHWVRQAPGKGLEWVGYIRPSTGYTEYNQKFKDRFTISADTSKNTAYLQMNSLRAEDTAVYYCARSRWLLDYWGQGTLVTVSTRGSGGGGSGGGGSGQSIKGNHLVKVYDYQEDGSVLLTCDAEAKNITWFKDGKMIGFLTEDKKKWNLGSNAKDPRGMYQCKGSQNKSKPLQVYYRMCQNCIELNAATISGFLFAEIVSIFVLAVGVYFIAGQDGVRQSRASDKQTLLPNDQLYQPLKDREDDQYSHLQGNQLRRNRAKRSGSGVKQTLNFDLLKLAGDVESNPGPSRGHMTEYKPTVRLATRDDVPRAVRTLAAAFADYPATRHTVDPDRHIERVTELQELFLTRVGLDIGKVWVADDGAAVAVWTTPESVEAGAVFAEIGPRMAELSGSRLAAQQQMEGLLAPHRPKEPAWFLATVGVSPDHQGKGLGSAVVLPGVEAAERAGVPAFLETSAPRNLPFYERLGFTVTADVEVPEGPRTWCMTRKPGA

SEQ ID NO: 21121 - protein, 655 aa, Artificial Sequence
  Synthetic Polypeptide
MALPVTALLLPLALLLHAARPDIQMTQSPSSLSASVGDRVTITCKSSQSVLYSSNQKNYLAWFQQKPGKAPKLLIYWASTRESGVPSRFSGSGSGTDFTLTISSLQPEDFATYFCHQYLSSYTFGQGTKVEIKRGGGGSGGGGSGGGGSEVQLVESGGGLVQPGGSLRLSCAASGFTFTTYWMHWVRQAPGKGLEWVGYIRPSTGYTEYNQKFKDRFTISADTSKNTAYLQMNSLRAEDTAVYYCARSRWLLDYWGQGTLVTVSTRGSGGGGSGGGGSGQSFGLLDPKLCYLLDGILFIYGVILTALFLRVKFSRSADAPAYQQGQNQLYNELNLGRREEYDVLDKRRGRDPEMGGKPQRRKNPQEGLYNELQKDKMAEAYSEIGMKGERRRGKGHDGLYQGLSTATKDTYDALHMQALPPRRAKRSGSGVKQTLNFDLLKLAGDVESNPGPSRGHMTEYKPTVRLATRDDVPRAVRTLAAAFADYPATRHTVDPDRHIERVTELQELFLTRVGLDIGKVWVADDGAAVAVWTTPESVEAGAVFAEIGPRMAELSGSRLAAQQQMEGLLAPHRPKEPAWFLATVGVSPDHQGKGLGSAVVLPGVEAAERAGVPAFLETSAPRNLPFYERLGFTVTADVEVPEGPRTWCMTRKPGA

SEQ ID NO: 21122 - protein, 756 aa, Artificial Sequence
  Synthetic Polypeptide
MALPVTALLLPLALLLHAARPEVQLVESGGGLVQPGGSLRLSCAASGFSFSDFWMSWVRQAPGKGLEWVATISQAGSEKDYVDSVKGRFTISRDNAKKSLYLQMNSLRAEDTAVYYCASGVYSFDYRGQGTLVTVSSGTGGGGSGGGGSGGGGSEFDIQMTQSPSSLSASVGDRVTITCKSSQSVLYSSNQKNYLAWFQQKPGKAPKLLIYWASTRESGVPSRFSGSGSGTDFTLTISSLQPEDFATYFCHQYLSSYTFGQGTKVEIKRLEDLKNVFPPEVAVFEPSEAEISHTQKATLVCLATGFYPDHVELSWWVNGKEVHSGVCTDPQPLKEQPALNDSRYCLSSRLRVSATFWQNPRNHFRCQVQFYGLSENDEWTQDRAKPVTQIVSAEAWGRADCGFTSESYQQGVLSATILYEILLGKATLYAVLVSALVLMAMVKRKDSRGRAKRSGSGATNFSLLKQAGDVEENPGPTSMDWIWRILFLVGAATGAHSFEEVQLVESGGGLVQPGGSLRLSCAASGFTFTTYWMHWVRQAPGKGLEWVGYIRPSTGYTEYNQKFKDRFTISADTSKNTAYLQMNSLRAEDTAVYYCARSRWLLDYWGQGTLVTVSTRIQNPDPAVYQLRDSKSSDKSVCLFTDFDSQTNVSQSKDSDVYITDKCVLDMRSMDFKSNSAVAWSNKSDFACANAFNNSIIPEDTFFPSPESSCDVKLVEKSFETDTNLNFQNLSVIGFRILLLKVAGFNLLMTLRLWSS

SEQ ID NO: 21123 - protein, 760 aa, Artificial Sequence
  Synthetic Polypeptide
MALPVTALLLPLALLLHAARPEVQLVESGGGLVQPGGSLRLSCAASGFSFSDFWMSWVRQAPGKGLEWVATISQAGSEKDYVDSVKGRFTISRDNAKKSLYLQMNSLRAEDTAVYYCASGVYSFDYRGQGTLVTVSSGTGGGGSGGGGSGGGGSEFDIQMTQSPSSLSASVGDRVTITCKSSQSVLYSSNQKNYLAWFQQKPGKAPKLLIYWASTRESGVPSRFSGSGSGTDFTLTISSLQPEDFATYFCHQYLSSYTFGQGTKVEIKRLEIQNPDPAVYQLRDSKSSDKSVCLFTDFDSQTNVSQSKDSDVYITDKCVLDMRSMDFKSNSAVAWSNKSDFACANAFNNSIIPEDTFFPSPESSCDVKLVEKSFETDTNLNFQNLSVIGFRILLLKVAGFNLLMTLRLWSSRAKRSGSGVKQTLNFDLLKLAGDVESNPGPTSMDWIWRILFLVGAATGAHSFEEVQLVESGGGLVQPGGSLRLSCAASGFTFTTYWMHWVRQAPGKGLEWVGYIRPSTGYTEYNQKFKDRFTISADTSKNTAYLQMNSLRAEDTAVYYCARSRWLLDYWGQGTLVTVSTREDLKNVFPPEVAVFEPSEAEISHTQKATLVCLATGFYPDHVELSWWVNGKEVHSGVCTDPQPLKEQPALNDSRYCLSSRLRVSATFWQNPRNHFRCQVQFYGLSENDEWTQDRAKPVTQIVSAEAWGRADCGFTSESYQQGVLSATILYEILLGKATLYAVLVSALVLMAMVKRKDSRG

SEQ ID NO: 21124 - protein, 952 aa, Artificial Sequence
  Synthetic Polypeptide
MALPVTALLLPLALLLHAARPEVQLVESGGGLVQPGGSLRLSCAASGFSFSDFWMSWVRQAPGKGLEWVATISQAGSEKDYVDSVKGRFTISRDNAKKSLYLQMNSLRAEDTAVYYCASGVYSFDYRGQGTLVTVSSGTGGGGSGGGGSGGGGSEFDIQMTQSPSSLSASVGDRVTITCKSSQSVLYSSNQKNYLAWFQQKPGKAPKLLIYWASTRESGVPSRFSGSGSGTDFTLTISSLQPEDFATYFCHQYLSSYTFGQGTKVEIKRLEDLKNVFPPEVAVFEPSEAEISHTQKATLVCLATGFYPDHVELSWWVNGKEVHSGVSTDPQPLKEQPALNDSRYCLSSRLRVSATFWQNPRNHFRCQVQFYGLSENDEWTQDRAKPVTQIVSAEAWGRADCGSQSFGLLDPKLCYLLDGILFIYGVILTALFLRVKFSRSADAPAYQQGQNQLYNELNLGRREEYDVLDKRRGRDPEMGGKPQRRKNPQEGLYNELQKDKMAEAYSEIGMKGERRRGKGHDGLYQGLSTATKDTYDALHMQALPPRRAKRSGSGATNFSLLKQAGDVEENPGPTSMDWIWRILFLVGAATGAHSFEEVQLVESGGGLVQPGGSLRLSCAASGFTFTTYWMHWVRQAPGKGLEWVGYIRPSTGYTEYNQKFKDRFTISADTSKNTAYLQMNSLRAEDTAVYYCARSRWLLDYWGQGTLVTVSTRIQNPDPAVYQLRDSKSSDKSVCLFTDFDSQTNVSQSKDSDVYITDKTVLDMRSMDFKSNSAVAWSNKSDFACANAFNNSIIPEDTFFPSPESSCGTQSFGLLDPKLCYLLDGILFIYGVILTALFLRVKFSRSADAPAYQQGQNQLYNELNLGRREEYDVLDKRRGRDPEMGGKPQRRKNPQEGLYNELQKDKMAEAYSEIGMKGERRRGKGHDGLYQGLSTATKDTYDALHMQALPPR

SEQ ID NO: 21125 - protein, 782 aa, Artificial Sequence
  Synthetic Polypeptide
MALPVTALLLPLALLLHAARPEVQLVESGGGLVQPGGSLRLSCAASGFSFSDFWMSWVRQAPGKGLEWVATISQAGSEKDYVDSVKGRFTISRDNAKKSLYLQMNSLRAEDTAVYYCASGVYSFDYRGQGTLVTVSSGTGGGGSGGGGSGGGGSEFDIQMTQSPSSLSASVGDRVTITCKSSQSVLYSSNQKNYLAWFQQKPGKAPKLLIYWASTRESGVPSRFSGSGSGTDFTLTISSLQPEDFATYFCHQYLSSYTFGQGTKVEIKRLEGQPKANPTVTLFPPSSEELQANKATLVCLISDFYPGAVTVAWKADGSPVKAGVETTKPSKQSNNKYAASSYLSLTPEQWKSHRSYSCQVTHEGSTVEKTVAPTECSPIKTDVITMDPKDNCSKDANDTLLLQLTNTSAYYMYLLLLLKSVVYFAIITCCLLRRTAFCCNGEKSRAKRSGSGATNFSLLKQAGDVEENPGPTSMDWIWRILFLVGAATGAHSFEEVQLVESGGGLVQPGGSLRLSCAASGFTFTTYWMHWVRQAPGKGLEWVGYIRPSTGYTEYNQKFKDRFTISADTSKNTAYLQMNSLRAEDTAVYYCARSRWLLDYWGQGTLVTVSTRASTKGPSVFPLAPSSKSTSGGTAALGCLVKDYFPEPVTVSWNSGALTSGVHTFPAVLQSSGLYSLSSVVTVPSSSLGTQTYICNVNHKPSNTKVDKRVEPKSCEVKTDSTDHVKPKETENTKQPSKSCHKPKAIVHTEKVNMMSLTVLGLRMLFAKTVAVNFLLTAKLFFL

SEQ ID NO: 21126 - protein, 763 aa, Artificial Sequence
  Synthetic Polypeptide
MALPVTALLLPLALLLHAARPEVQLVESGGGLVQPGGSLRLSCAASGFSFSDFWMSWVRQAPGKGLEWVATISQAGSEKDYVDSVKGRFTISRDNAKKSLYLQMNSLRAEDTAVYYCASGVYSFDYRGQGTLVTVSSGTGGGGSGGGGSGGGGSEFDIQMTQSPSSLSASVGDRVTITCKSSQSVLYSSNQKNYLAWFQQKPGKAPKLLIYWASTRESGVPSRFSGSGSGTDFTLTISSLQPEDFATYFCHQYLSSYTFGQGTKVEIKRLEGQPKANPTVTLFPPSSEELQANKATLVCLISDFYPGAVTVAWKADGSPVKAGVETTKPSKQSNNKYAASSYLSLTPEQWKSHRSYSCQVTHEGSTVEKTVAPTECSGRADCGFTSESYQQGVLSATILYEILLGKATLYAVLVSALVLMAMVKRKDSRGRAKRSGSGVKQTLNFDLLKLAGDVESNPGPTSMDWIWRILFLVGAATGAHSFEEVQLVESGGGLVQPGGSLRLSCAASGFTFTTYWMHWVRQAPGKGLEWVGYIRPSTGYTEYNQKFKDRFTISADTSKNTAYLQMNSLRAEDTAVYYCARSRWLLDYWGQGTLVTVSTRASTKGPSVFPLAPSSKSTSGGTAALGCLVKDYFPEPVTVSWNSGALTSGVHTFPAVLQSSGLYSLSSVVTVPSSSLGTQTYICNVNHKPSNTKVDKRVEPKSCIPEDTFFPSPESSCDVKLVEKSFETDTNLNFQNLSVIGFRILLLKVAGFNLLMTLRLWSS

SEQ ID NO: 21127 - protein, 897 aa, Artificial Sequence
  Synthetic Polypeptide
MALPVTALLLPLALLLHAARPEVQLVESGGGLVQPGGSLRLSCAASGFSFSDFWMSWVRQAPGKGLEWVATISQAGSEKDYVDSVKGRFTISRDNAKKSLYLQMNSLRAEDTAVYYCASGVYSFDYRGQGTLVTVSSGTGGGGSGGGGSGGGGSEFDIQMTQSPSSLSASVGDRVTITCKSSQSVLYSSNQKNYLAWFQQKPGKAPKLLIYWASTRESGVPSRFSGSGSGTDFTLTISSLQPEDFATYFCHQYLSSYTFGQGTKVEIKRLEIQNPDPAVYQLRDSKSSDKSVCLFTDFDSQTNVSQSKDSDVYITDKCVLDMRSMDFKSNSAVAWSNKSDFACANAFNNSIIPEDTFFPSPESSCDVKLVEKSFETDTNLNFQNLSVIGFRILLLKVAGFNLLMTLRLWSSRAKRSGSGVKQTLNFDLLKLAGDVESNPGPTSMDWIWRILFLVGAATGAHSGPQLQLQESGPGLVKPSETLSLTCTVSGDSISSGDYYWGWIRQPPGKGLEWIGHIYYSGVTYYNPSLKSRVTISVDTSRNQFSLKLSSVTAADTAVYYCTREDSSNWRSRGQGTLVTVSSGSGGGGSGGGGSGGGGSFEEVQLVESGGGLVQPGGSLRLSCAASGFTFTTYWMHWVRQAPGKGLEWVGYIRPSTGYTEYNQKFKDRFTISADTSKNTAYLQMNSLRAEDTAVYYCARSRWLLDYWGQGTLVTVSTREDLKNVFPPEVAVFEPSEAEISHTQKATLVCLATGFYPDHVELSWWVNGKEVHSGVCTDPQPLKEQPALNDSRYCLSSRLRVSATFWQNPRNHFRCQVQFYGLSENDEWTQDRAKPVTQIVSAEAWGRADCGFTSESYQQGVLSATILYEILLGKATLYAVLVSALVLMAMVKRKDSRG

SEQ ID NO: 21128 - protein, 1089 aa, Artificial Sequence
  Synthetic Polypeptide
MALPVTALLLPLALLLHAARPEVQLVESGGGLVQPGGSLRLSCAASGFSFSDFWMSWVRQAPGKGLEWVATISQAGSEKDYVDSVKGRFTISRDNAKKSLYLQMNSLRAEDTAVYYCASGVYSFDYRGQGTLVTVSSGTGGGGSGGGGSGGGGSEFDIQMTQSPSSLSASVGDRVTITCKSSQSVLYSSNQKNYLAWFQQKPGKAPKLLIYWASTRESGVPSRFSGSGSGTDFTLTISSLQPEDFATYFCHQYLSSYTFGQGTKVEIKRLEDLKNVFPPEVAVFEPSEAEISHTQKATLVCLATGFYPDHVELSWWVNGKEVHSGVSTDPQPLKEQPALNDSRYCLSSRLRVSATFWQNPRNHFRCQVQFYGLSENDEWTQDRAKPVTQIVSAEAWGRADCGSQSFGLLDPKLCYLLDGILFIYGVILTALFLRVKFSRSADAPAYQQGQNQLYNELNLGRREEYDVLDKRRGRDPEMGGKPQRRKNPQEGLYNELQKDKMAEAYSEIGMKGERRRGKGHDGLYQGLSTATKDTYDALHMQALPPRRAKRSGSGATNFSLLKQAGDVEENPGPTSMDWIWRILFLVGAATGAHSGPQLQLQESGPGLVKPSETLSLTCTVSGDSISSGDYYWGWIRQPPGKGLEWIGHIYYSGVTYYNPSLKSRVTISVDTSRNQFSLKLSSVTAADTAVYYCTREDSSNWRSRGQGTLVTVSSGSGGGGSGGGGSGGGGSFEEVQLVESGGGLVQPGGSLRLSCAASGFTFTTYWMHWVRQAPGKGLEWVGYIRPSTGYTEYNQKFKDRFTISADTSKNTAYLQMNSLRAEDTAVYYCARSRWLLDYWGQGTLVTVSTRIQNPDPAVYQLRDSKSSDKSVCLFTDFDSQTNVSQSKDSDVYITDKTVLDMRSMDFKSNSAVAWSNKSDFACANAFNNSIIPEDTFFPSPESSCGTQSFGLLDPKLCYLLDGILFIYGVILTALFLRVKFSRSADAPAYQQGQNQLYNELNLGRREEYDVLDKRRGRDPEMGGKPQRRKNPQEGLYNELQKDKMAEAYSEIGMKGERRRGKGHDGLYQGLSTATKDTYDALHMQALPPR

SEQ ID NO: 21129 - protein, 919 aa, Artificial Sequence
  Synthetic Polypeptide
MALPVTALLLPLALLLHAARPEVQLVESGGGLVQPGGSLRLSCAASGFSFSDFWMSWVRQAPGKGLEWVATISQAGSEKDYVDSVKGRFTISRDNAKKSLYLQMNSLRAEDTAVYYCASGVYSFDYRGQGTLVTVSSGTGGGGSGGGGSGGGGSEFDIQMTQSPSSLSASVGDRVTITCKSSQSVLYSSNQKNYLAWFQQKPGKAPKLLIYWASTRESGVPSRFSGSGSGTDFTLTISSLQPEDFATYFCHQYLSSYTFGQGTKVEIKRLEGQPKANPTVTLFPPSSEELQANKATLVCLISDFYPGAVTVAWKADGSPVKAGVETTKPSKQSNNKYAASSYLSLTPEQWKSHRSYSCQVTHEGSTVEKTVAPTECSPIKTDVITMDPKDNCSKDANDTLLLQLTNTSAYYMYLLLLLKSVVYFAIITCCLLRRTAFCCNGEKSRAKRSGSGATNFSLLKQAGDVEENPGPTSMDWIWRILFLVGAATGAHSGPQLQLQESGPGLVKPSETLSLTCTVSGDSISSGDYYWGWIRQPPGKGLEWIGHIYYSGVTYYNPSLKSRVTISVDTSRNQFSLKLSSVTAADTAVYYCTREDSSNWRSRGQGTLVTVSSGSGGGGSGGGGSGGGGSFEEVQLVESGGGLVQPGGSLRLSCAASGFTFTTYWMHWVRQAPGKGLEWVGYIRPSTGYTEYNQKFKDRFTISADTSKNTAYLQMNSLRAEDTAVYYCARSRWLLDYWGQGTLVTVSTRASTKGPSVFPLAPSSKSTSGGTAALGCLVKDYFPEPVTVSWNSGALTSGVHTFPAVLQSSGLYSLSSVVTVPSSSLGTQTYICNVNHKPSNTKVDKRVEPKSCEVKTDSTDHVKPKETENTKQPSKSCHKPKAIVHTEKVNMMSLTVLGLRMLFAKTVAVNFLLTAKLFFL

SEQ ID NO: 21130 - protein, 900 aa, Artificial Sequence
  Synthetic Polypeptide
MALPVTALLLPLALLLHAARPEVQLVESGGGLVQPGGSLRLSCAASGFSFSDFWMSWVRQAPGKGLEWVATISQAGSEKDYVDSVKGRFTISRDNAKKSLYLQMNSLRAEDTAVYYCASGVYSFDYRGQGTLVTVSSGTGGGGSGGGGSGGGGSEFDIQMTQSPSSLSASVGDRVTITCKSSQSVLYSSNQKNYLAWFQQKPGKAPKLLIYWASTRESGVPSRFSGSGSGTDFTLTISSLQPEDFATYFCHQYLSSYTFGQGTKVEIKRLEGQPKANPTVTLFPPSSEELQANKATLVCLISDFYPGAVTVAWKADGSPVKAGVETTKPSKQSNNKYAASSYLSLTPEQWKSHRSYSCQVTHEGSTVEKTVAPTECSGRADCGFTSESYQQGVLSATILYEILLGKATLYAVLVSALVLMAMVKRKDSRGRAKRSGSGVKQTLNFDLLKLAGDVESNPGPTSMDWIWRILFLVGAATGAHSGPQLQLQESGPGLVKPSETLSLTCTVSGDSISSGDYYWGWIRQPPGKGLEWIGHIYYSGVTYYNPSLKSRVTISVDTSRNQFSLKLSSVTAADTAVYYCTREDSSNWRSRGQGTLVTVSSGSGGGGSGGGGSGGGGSFEEVQLVESGGGLVQPGGSLRLSCAASGFTFTTYWMHWVRQAPGKGLEWVGYIRPSTGYTEYNQKFKDRFTISADTSKNTAYLQMNSLRAEDTAVYYCARSRWLLDYWGQGTLVTVSTRASTKGPSVFPLAPSSKSTSGGTAALGCLVKDYFPEPVTVSWNSGALTSGVHTFPAVLQSSGLYSLSSVVTVPSSSLGTQTYICNVNHKPSNTKVDKRVEPKSCIPEDTFFPSPESSCDVKLVEKSFETDTNLNFQNLSVIGFRILLLKVAGFNLLMTLRLWSS

SEQ ID NO: 21131 - protein, 757 aa, Artificial Sequence
  Synthetic Polypeptide
MALPVTALLLPLALLLHAARPEVQVLESGGGLVQPGGSLRLSCAASGFTFSNFAMSWVRQAPGKGLEWVSTISGSAGTTDYADSVKGRFTISRDNSKKTLYLQMNSLRVEDTAVYYCADGRGPFFDYRGQGTLVTVSSGTGGGGSGGGGSGGGGSEFDIQMTQSPSSLSASVGDRVTITCKSSQSVLYSSNQKNYLAWFQQKPGKAPKLLIYWASTRESGVPSRFSGSGSGTDFTLTISSLQPEDFATYFCHQYLSSYTFGQGTKVEIKRLEDLKNVFPPEVAVFEPSEAEISHTQKATLVCLATGFYPDHVELSWWVNGKEVHSGVCTDPQPLKEQPALNDSRYCLSSRLRVSATFWQNPRNHFRCQVQFYGLSENDEWTQDRAKPVTQIVSAEAWGRADCGFTSESYQQGVLSATILYEILLGKATLYAVLVSALVLMAMVKRKDSRGRAKRSGSGATNFSLLKQAGDVEENPGPTSMDWIWRILFLVGAATGAHSFEEVQLVESGGGLVQPGGSLRLSCAASGFTFTTYWMHWVRQAPGKGLEWVGYIRPSTGYTEYNQKFKDRFTISADTSKNTAYLQMNSLRAEDTAVYYCARSRWLLDYWGQGTLVTVSTRIQNPDPAVYQLRDSKSSDKSVCLFTDFDSQTNVSQSKDSDVYITDKCVLDMRSMDFKSNSAVAWSNKSDFACANAFNNSIIPEDTFFPSPESSCDVKLVEKSFETDTNLNFQNLSVIGFRILLLKVAGFNLLMTLRLWSS

SEQ ID NO: 21132 - protein, 758 aa, Artificial Sequence
  Synthetic Polypeptide
MALPVTALLLPLALLLHAARPDIQMTQSPSSLSASVGDRVTITCKSSQSVLYSSNQKNYLAWFQQKPGKAPKLLIYWASTRESGVPSRFSGSGSGTDFTLTISSLQPEDFATYFCHQYLSSYTFGQGTKVEIKRLEDLKNVFPPEVAVFEPSEAEISHTQKATLVCLATGFYPDHVELSWWVNGKEVHSGVCTDPQPLKEQPALNDSRYCLSSRLRVSATFWQNPRNHFRCQVQFYGLSENDEWTQDRAKPVTQIVSAEAWGRADCGFTSESYQQGVLSATILYEILLGKATLYAVLVSALVLMAMVKRKDSRGRAKRSGSGATNFSLLKQAGDVEENPGPTSMDWIWRILFLVGAATGAHSGPEVQLVESGGGLVQAGGSLRLSCAASGRTFSMGWFRQAPGKEREFVAAITYSGGSPYYADSVKGRFTISRDNAKNTVYLQMNSLKPEDTAVYYCAANPTYGSDWNAENWGQGTQVTVSSGSGGGGSGGGGSGGGGSFEEVQLVESGGGLVQPGGSLRLSCAASGFTFTTYWMHWVRQAPGKGLEWVGYIRPSTGYTEYNQKFKDRFTISADTSKNTAYLQMNSLRAEDTAVYYCARSRWLLDYWGQGTLVTVSTRIQNPDPAVYQLRDSKSSDKSVCLFTDFDSQTNVSQSKDSDVYITDKCVLDMRSMDFKSNSAVAWSNKSDFACANAFNNSIIPEDTFFPSPESSCDVKLVEKSFETDTNLNFQNLSVIGFRILLLKVAGFNLLMTLRLWSS

SEQ ID NO: 21133 - protein, 885 aa, Artificial Sequence
  Synthetic Polypeptide
MALPVTALLLPLALLLHAARPDIQMTQSPSSLSASVGDRVTITCKSSQSVLYSSNQKNYLAWFQQKPGKAPKLLIYWASTRESGVPSRFSGSGSGTDFTLTISSLQPEDFATYFCHQYLSSYTFGQGTKVEIKRLEDLKNVFPPEVAVFEPSEAEISHTQKATLVCLATGFYPDHVELSWWVNGKEVHSGVCTDPQPLKEQPALNDSRYCLSSRLRVSATFWQNPRNHFRCQVQFYGLSENDEWTQDRAKPVTQIVSAEAWGRADCGFTSESYQQGVLSATILYEILLGKATLYAVLVSALVLMAMVKRKDSRGRAKRSGSGATNFSLLKQAGDVEENPGPTSMDWIWRILFLVGAATGAHSQLQLQESGPGLVKPSETLSLTCTVSGGSISSGDYYWGWIRQPPGKGLEWIGSISYSGSTYYNPSLKSRVTISVDTSRNQFSLKLSSVTAADTAVYYCTREDSSNWRSRGQGTLVTVSSSGGGGSGGGGSEVQLVESGGGLVQAGGSLRLSCAASGRTFSMGWFRQAPGKEREFVAAITYSGGSPYYADSVKGRFTISRDNAKNTVYLQMNSLKPEDTAVYYCAANPTYGSDWNAENWGQGTQVTVSSGSGGGGSGGGGSGGGGSFEEVQLVESGGGLVQPGGSLRLSCAASGFTFTTYWMHWVRQAPGKGLEWVGYIRPSTGYTEYNQKFKDRFTISADTSKNTAYLQMNSLRAEDTAVYYCARSRWLLDYWGQGTLVTVSTRIQNPDPAVYQLRDSKSSDKSVCLFTDFDSQTNVSQSKDSDVYITDKCVLDMRSMDFKSNSAVAWSNKSDFACANAFNNSIIPEDTFFPSPESSCDVKLVEKSFETDTNLNFQNLSVIGFRILLLKVAGFNLLMTLRLWSS

SEQ ID NO: 21134 - protein, 894 aa, Artificial Sequence
  Synthetic Polypeptide
MALPVTALLLPLALLLHAARPEVQVLESGGGLVQPGGSLRLSCAASGFTFSNFAMSWVRQAPGKGLEWVSTISGSAGTTDYADSVKGRFTISRDNSKKTLYLQMNSLRVEDTAVYYCADGRGPFFDYRGQGTLVTVSSGTGGGGSGGGGSGGGGSEFDIQMTQSPSSLSASVGDRVTITCKSSQSVLYSSNQKNYLAWFQQKPGKAPKLLIYWASTRESGVPSRFSGSGSGTDFTLTISSLQPEDFATYFCHQYLSSYTFGQGTKVEIKRLEDLKNVFPPEVAVFEPSEAEISHTQKATLVCLATGFYPDHVELSWWVNGKEVHSGVCTDPQPLKEQPALNDSRYCLSSRLRVSATFWQNPRNHFRCQVQFYGLSENDEWTQDRAKPVTQIVSAEAWGRADCGFTSESYQQGVLSATILYEILLGKATLYAVLVSALVLMAMVKRKDSRGRAKRSGSGATNFSLLKQAGDVEENPGPTSMDWIWRILFLVGAATGAHSGPEVQLVESGGGLVQAGGSLRLSCAASGRTFSMGWFRQAPGKEREFVAAITYSGGSPYYASSVRGRFTISRDNAKNTVYLQMNSLKPEDTAVYYCAANPTYGSDWNAENWGQGTQVTVSSGSGGGGSGGGGSGGGGSFEEVQLVESGGGLVQPGGSLRLSCAASGFTFTTYWMHWVRQAPGKGLEWVGYIRPSTGYTEYNQKFKDRFTISADTSKNTAYLQMNSLRAEDTAVYYCARSRWLLDYWGQGTLVTVSTRIQNPDPAVYQLRDSKSSDKSVCLFTDFDSQTNVSQSKDSDVYITDKCVLDMRSMDFKSNSAVAWSNKSDFACANAFNNSIIPEDTFFPSPESSCDVKLVEKSFETDTNLNFQNLSVIGFRILLLKVAGFNLLMTLRLWSS

SEQ ID NO: 21135 - protein, 725 aa, Artificial Sequence
  Synthetic Polypeptide
MALPVTALLLPLALLLHAARPEVQLVESGGGLVQPGGSLRLSCAASGYTFTTYWMHWVRQAPGKGLEWVGYIRPSTGYTEYNQKFKDRFTISADTSKNTAYLQMNSLRAEDTAVYYCARSRWLLDYWGQGTLVTVSGGGGSGGGGSGGGGSDIQMTQSPSSLSASVGDRVTITCKSSQSLLYSSNQKNYLAWFQQKPGKAPKLLIYWASTRESGVPSRFSGSGSGTDFTLTISSLQPEDFATYFCHQYLSSYTFGQGTKVEIKRTREQKLISEEDLAKPTTTPAPRPPTPAPTIASQPLSLRPEACRPAAGGAVHTRGLDFACDIYIWAPLAGTCGVLLLSLVITLYCKRGRKKLLYIFKQPFMRPVQTTQEEDGCSCRFPEEEEGGCELRVKFSRSADAPAYQQGQNQLYNELNLGRREEYDVLDKRRGRDPEMGGKPRRKNPQEGLYNELQKDKMAEAYSEIGMKGERRRGKGHDGLYQGLSTATKDTYDALHMQALPPRSSGSGEGRGSLLTCGDVEENPGPHMTEYKPTVRLATRDDVPRAVRTLAAAFADYPATRHTVDPDRHIERVTELQELFLTRVGLDIGKVWVADDGAAVAVWTTPESVEAGAVFAEIGPRMAELSGSRLAAQQQMEGLLAPHRPKEPAWFLATVGVSPDHQGKGLGSAVVLPGVEAAERAGVPAFLETSAPRNLPFYERLGFTVTADVEVPEGPRTWCMTRKPGA

SEQ ID NO: 21136 - protein, 719 aa, Artificial Sequence
  Synthetic Polypeptide
MALPVTALLLPLALLLHAARPEVQLVESGGGLVQPGGSLRLSCAASGYTFTTYWMHWVRQAPGKGLEWVGYIRPSTGYTEYNQKFKDRFTISADTSKNTAYLQMNSLRAEDTAVYYCARSRWLLDYWGQGTLVTVSGGGGSGGGGSGGGGSDIQMTQSPSSLSASVGDRVTITCKSSQSLLYSSNQKNYLAWFQQKPGKAPKLLIYWASTRESGVPSRFSGSGSGTDFTLTISSLQPEDFATYFCHQYLSSYTFGQGTKVEIKRTREQKLISEEDLKIEVMYPPPYLDNEKSNGTIIHVKGKHLCPSPLFPGPSKPFWVLVVVGGVLACYSLLVTVAFIIFWVRSKRSRLLHSDYMNMTPRRPGPTRKHYQPYAPPRDFAAYRSRVKFSRSADAPAYQQGQNQLYNELNLGRREEYDVLDKRRGRDPEMGGKPRRKNPQEGLYNELQKDKMAEAYSEIGMKGERRRGKGHDGLYQGLSTATKDTYDALHMQALPPRSSGSGEGRGSLLTCGDVEENPGPHMTEYKPTVRLATRDDVPRAVRTLAAAFADYPATRHTVDPDRHIERVTELQELFLTRVGLDIGKVWVADDGAAVAVWTTPESVEAGAVFAEIGPRMAELSGSRLAAQQQMEGLLAPHRPKEPAWFLATVGVSPDHQGKGLGSAVVLPGVEAAERAGVPAFLETSAPRNLPFYERLGFTVTADVEVPEGPRTWCMTRKPGA

SEQ ID NO: 21137 - protein, 496 aa, Artificial Sequence
  Synthetic Polypeptide
MALPVTALLLPLALLLHAARPEVQLVESGGGLVQPGGSLRLSCAASGYTFTTYWMHWVRQAPGKGLEWVGYIRPSTGYTEYNQKFKDRFTISADTSKNTAYLQMNSLRAEDTAVYYCARSRWLLDYWGQGTLVTVSGGGGSGGGGSGGGGSDIQMTQSPSSLSASVGDRVTITCKSSQSLLYSSNQKNYLAWFQQKPGKAPKLLIYWASTRESGVPSRFSGSGSGTDFTLTISSLQPEDFATYFCHQYLSSYTFGQGTKVEIKRTREQKLISEEDLKIEVMYPPPYLDNEKSNGTIIHVKGKHLCPSPLFPGPSKPFWVLVVVGGVLACYSLLVTVAFIIFWVRSKRSRLLHSDYMNMTPRRPGPTRKHYQPYAPPRDFAAYRSRVKFSRSADAPAYQQGQNQLYNELNLGRREEYDVLDKRRGRDPEMGGKPRRKNPQEGLYNELQKDKMAEAYSEIGMKGERRRGKGHDGLYQGLSTATKDTYDALHMQALPPR

SEQ ID NO: 21138 - protein, 502 aa, Artificial Sequence
  Synthetic Polypeptide
MALPVTALLLPLALLLHAARPEVQLVESGGGLVQPGGSLRLSCAASGYTFTTYWMHWVRQAPGKGLEWVGYIRPSTGYTEYNQKFKDRFTISADTSKNTAYLQMNSLRAEDTAVYYCARSRWLLDYWGQGTLVTVSGGGGSGGGGSGGGGSDIQMTQSPSSLSASVGDRVTITCKSSQSLLYSSNQKNYLAWFQQKPGKAPKLLIYWASTRESGVPSRFSGSGSGTDFTLTISSLQPEDFATYFCHQYLSSYTFGQGTKVEIKRTREQKLISEEDLAKPTTTPAPRPPTPAPTIASQPLSLRPEACRPAAGGAVHTRGLDFACDIYIWAPLAGTCGVLLLSLVITLYCKRGRKKLLYIFKQPFMRPVQTTQEEDGCSCRFPEEEEGGCELRVKFSRSADAPAYQQGQNQLYNELNLGRREEYDVLDKRRGRDPEMGGKPRRKNPQEGLYNELQKDKMAEAYSEIGMKGERRRGKGHDGLYQGLSTATKDTYDALHMQALPPR

SEQ ID NO: 21139 - protein, 502 aa, Artificial Sequence
  Synthetic Polypeptide
MALPVTALLLPLALLLHAARPDIQMTQSPSSLSASVGDRVTITCKSSQSLLYSSNQKNYLAWFQQKPGKAPKLLIYWASTRESGVPSRFSGSGSGTDFTLTISSLQPEDFATYFCHQYLSSYTFGQGTKVEIKRGGGGSGGGGSGGGGSEVQLVESGGGLVQPGGSLRLSCAASGYTFTTYWMHWVRQAPGKGLEWVGYIRPSTGYTEYNQKFKDRFTISADTSKNTAYLQMNSLRAEDTAVYYCARSRWLLDYWGQGTLVTVSTREQKLISEEDLAKPTTTPAPRPPTPAPTIASQPLSLRPEACRPAAGGAVHTRGLDFACDIYIWAPLAGTCGVLLLSLVITLYCKRGRKKLLYIFKQPFMRPVQTTQEEDGCSCRFPEEEEGGCELRVKFSRSADAPAYQQGQNQLYNELNLGRREEYDVLDKRRGRDPEMGGKPRRKNPQEGLYNELQKDKMAEAYSEIGMKGERRRGKGHDGLYQGLSTATKDTYDALHMQALPPR

SEQ ID NO: 21140 - protein, 915 aa, Artificial Sequence
  Synthetic Polypeptide
MALPVTALLLPLALLLHAARPEVQLVESGGGLVQPGGSLRLSCAASGYTFTTYWMHWVRQAPGKGLEWVGYIRPSTGYTEYNQKFKDRFTISADTSKNTAYLQMNSLRAEDTAVYYCARSRWLLDYWGQGTLVTVSGGGGSGGGGSGGGGSDIQMTQSPSSLSASVGDRVTITCKSSQSLLYSSNQKNYLAWFQQKPGKAPKLLIYWASTRESGVPSRFSGSGSGTDFTLTISSLQPEDFATYFCHQYLSSYTFGQGTKVEIKRTREQKLISEEDLAKPTTTPAPRPPTPAPTIASQPLSLRPEACRPAAGGAVHTRGLDFACDIYIWAPLAGTCGVLLLSLVITLYCGRARVKFSRSADAPAYQQGQNQLYNELNLGRREEYDVLDKRRGRDPEMGGKPRRKNPQEGLYNELQKDKMAEAYSEIGMKGERRRGKGHDGLYQGLSTATKDTYDALHMQALPPRSRGSGATNFSLLKQAGDVEENPGPGIHMATYEVLCEVARKLGTDDREVVLFLLNVFIPQPTLAQLIGALRALKEEGRLTFPLLAECLFRAGRRDLLRDLLHLDPRFLERHLAGTMSYFSPYQLTVLHVDGELCARDIRSLIFLSKDTIGSRSTPQTFLHWVYCMENLDLLGPTDVDALMSMLRSLSRVDLQRQVQTLMGLHLSGPSHSQHYRHTPLETDFYDYKDDDDKTSGSGEGRGSLLTCGDVEENPGPHMTEYKPTVRLATRDDVPRAVRTLAAAFADYPATRHTVDPDRHIERVTELQELFLTRVGLDIGKVWVADDGAAVAVWTTPESVEAGAVFAEIGPRMAELSGSRLAAQQQMEGLLAPHRPKEPAWFLATVGVSPDHQGKGLGSAVVLPGVEAAERAGVPAFLETSAPRNLPFYERLGFTVTADVEVPEGPRTWCMTRKPGA

SEQ ID NO: 21141 - protein, 855 aa, Artificial Sequence
  Synthetic Polypeptide
MALPVTALLLPLALLLHAARPEVQLVESGGGLVQPGGSLRLSCAASGYTFTTYWMHWVRQAPGKGLEWVGYIRPSTGYTEYNQKFKDRFTISADTSKNTAYLQMNSLRAEDTAVYYCARSRWLLDYWGQGTLVTVSLEIQNPDPAVYQLRDSKSSDKSVCLFTDFDSQTNVSQSKDSDVYITDKCVLDMRSMDFKSNSAVAWSNKSDFACANAFNNSIIPEDTFFPSSDVPCDVKLVEKSFETDTNLNFQNLSVIGFRILLLKVAGFNLLMTLRLWSSRAKRSGSGVKQTLNFDLLKLAGDVESNPGPTSMDWIWRILFLVGAATGAHSFEDIQMTQSPSSLSASVGDRVTITCKSSQSLLYSSNQKNYLAWFQQKPGKAPKLLIYWASTRESGVPSRFSGSGSGTDFTLTISSLQPEDFATYFCHQYLSSYTFGQGTKVEIKRTREDLKNVFPPEVAVFEPSKAEIAHTQKATLVCLATGFYPDHVELSWWVNGKEVHSGVCTDPQPLKEQPALNDSRYCLSSRLRVSATFWQNPRNHFRCQVQFYGLSENDEWTQDRAKPVTQIVSAEAWGRADCGITSASYHQGVLSATILYEILLGKATLYAVLVSALVLMAMVKRKDSRGRAKRSGSGATNFSLLKQAGDVEENPGPSRGHMTEYKPTVRLATRDDVPRAVRTLAAAFADYPATRHTVDPDRHIERVTELQELFLTRVGLDIGKVWVADDGAAVAVWTTPESVEAGAVFAEIGPRMAELSGSRLAAQQQMEGLLAPHRPKEPAWFLATVGVSPDHQGKGLGSAVVLPGVEAAERAGVPAFLETSAPRNLPFYERLGFTVTADVEVPEGPRTWCMTRKPGA

SEQ ID NO: 21142 - protein, 854 aa, Artificial Sequence
  Synthetic Polypeptide
MALPVTALLLPLALLLHAARPEVQLVESGGGLVQPGGSLRLSCAASGYTFTTYWMHWVRQAPGKGLEWVGYIRPSTGYTEYNQKFKDRFTISADTSKNTAYLQMNSLRAEDTAVYYCARSRWLLDYWGQGTLVTVSLEDLKNVFPPEVAVFEPSKAEIAHTQKATLVCLATGFYPDHVELSWWVNGKEVHSGVCTDPQPLKEQPALNDSRYCLSSRLRVSATFWQNPRNHFRCQVQFYGLSENDEWTQDRAKPVTQIVSAEAWGRADCGITSASYHQGVLSATILYEILLGKATLYAVLVSALVLMAMVKRKDSRGRAKRSGSGATNFSLLKQAGDVEENPGPTSMDWIWRILFLVGAATGAHSFEDIQMTQSPSSLSASVGDRVTITCKSSQSLLYSSNQKNYLAWFQQKPGKAPKLLIYWASTRESGVPSRFSGSGSGTDFTLTISSLQPEDFATYFCHQYLSSYTFGQGTKVEIKRTRIQNPDPAVYQLRDSKSSDKSVCLFTDFDSQTNVSQSKDSDVYITDKCVLDMRSMDFKSNSAVAWSNKSDFACANAFNNSIIPEDTFFPSSDVPCDVKLVEKSFETDTNLNFQNLSVIGFRILLLKVAGFNLLMTLRLWSSRAKRSGSGVKQTLNFDLLKLAGDVESNPGPSRGHMTEYKPTVRLATRDDVPRAVRTLAAAFADYPATRHTVDPDRHIERVTELQELFLTRVGLDIGKVWVADDGAAVAVWTTPESVEAGAVFAEIGPRMAELSGSRLAAQQQMEGLLAPHRPKEPAWFLATVGVSPDHQGKGLGSAVVLPGVEAAERAGVPAFLETSAPRNLPFYERLGFTVTADVEVPEGPRTWCMTRKPGA

SEQ ID NO: 21143 - protein, 621 aa, Artificial Sequence
  Synthetic Polypeptide
MALPVTALLLPLALLLHAARPEVQLVESGGGLVQPGGSLRLSCAASGYTFTTYWMHWVRQAPGKGLEWVGYIRPSTGYTEYNQKFKDRFTISADTSKNTAYLQMNSLRAEDTAVYYCARSRWLLDYWGQGTLVTVSLEDLKNVFPPEVAVFEPSEAEISHTQKATLVCLATGFYPDHVELSWWVNGKEVHSGVCTDPQPLKEQPALNDSRYCLSSRLRVSATFWQNPRNHFRCQVQFYGLSENDEWTQDRAKPVTQIVSAEAWGRADCGFTSESYQQGVLSATILYEILLGKATLYAVLVSALVLMAMVKRKDSRGRAKRSGSGATNFSLLKQAGDVEENPGPTSMDWIWRILFLVGAATGAHSFEDIQMTQSPSSLSASVGDRVTITCKSSQSLLYSSNQKNYLAWFQQKPGKAPKLLIYWASTRESGVPSRFSGSGSGTDFTLTISSLQPEDFATYFCHQYLSSYTFGQGTKVEIKRTRIQNPDPAVYQLRDSKSSDKSVCLFTDFDSQTNVSQSKDSDVYITDKCVLDMRSMDFKSNSAVAWSNKSDFACANAFNNSIIPEDTFFPSPESSCDVKLVEKSFETDTNLNFQNLSVIGFRILLLKVAGFNLLMTLRLWSS

SEQ ID NO: 21144 - protein, 846 aa, Artificial Sequence
  Synthetic Polypeptide
MALPVTALLLPLALLLHAARPEVQLVESGGGLVQPGGSLRLSCAASGYTFTTYWMHWVRQAPGKGLEWVGYIRPSTGYTEYNQKFKDRFTISADTSKNTAYLQMNSLRAEDTAVYYCARSRWLLDYWGQGTLVTVSLEDLKNVFPPEVAVFEPSEAEISHTQKATLVCLATGFYPDHVELSWWVNGKEVHSGVCTDPQPLKEQPALNDSRYCLSSRLRVSATFWQNPRNHFRCQVQFYGLSENDEWTQDRAKPVTQIVSAEAWGRADCGFTSESYQQGVLSATILYEILLGKATLYAVLVSALVLMAMVKRKDSRGRAKRSGSGATNFSLLKQAGDVEENPGPTSMDWIWRILFLVGAATGAHSFEDIQMTQSPSSLSASVGDRVTITCKSSQSLLYSSNQKNYLAWFQQKPGKAPKLLIYWASTRESGVPSRFSGSGSGTDFTLTISSLQPEDFATYFCHQYLSSYTFGQGTKVEIKRTRIQNPDPAVYQLRDSKSSDKSVCLFTDFDSQTNVSQSKDSDVYITDKCVLDMRSMDFKSNSAVAWSNKSDFACANAFNNSIIPEDTFFPSPESSCDVKLVEKSFETDTNLNFQNLSVIGFRILLLKVAGFNLLMTLRLWSSRAKRSGSGVKQTLNFDLLKLAGDVESNPGPSRGGIHTMATYEVLCEVARKLGTDDREVVLFLLNVFIPQPTLAQLIGALRALKEEGRLTFPLLAECLFRAGRRDLLRDLLHLDPRFLERHLAGTMSYFSPYQLTVLHVDGELCARDIRSLIFLSKDTIGSRSTPQTFLHWVYCMENLDLLGPTDVDALMSMLRSLSRVDLQRQVQTLMGLHLSGPSHSQHYRHTP

SEQ ID NO: 21145 - protein, 625 aa, Artificial Sequence
  Synthetic Polypeptide
MALPVTALLLPLALLLHAARPEVQLVESGGGLVQPGGSLRLSCAASGYTFTTYWMHWVRQAPGKGLEWVGYIRPSTGYTEYNQKFKDRFTISADTSKNTAYLQMNSLRAEDTAVYYCARSRWLLDYWGQGTLVTVSLEIQNPDPAVYQLRDSKSSDKSVCLFTDFDSQTNVSQSKDSDVYITDKCVLDMRSMDFKSNSAVAWSNKSDFACANAFNNSIIPEDTFFPSPESSCDVKLVEKSFETDTNLNFQNLSVIGFRILLLKVAGFNLLMTLRLWSSRAKRSGSGVKQTLNFDLLKLAGDVESNPGPTSMDWIWRILFLVGAATGAHSFEDIQMTQSPSSLSASVGDRVTITCKSSQSLLYSSNQKNYLAWFQQKPGKAPKLLIYWASTRESGVPSRFSGSGSGTDFTLTISSLQPEDFATYFCHQYLSSYTFGQGTKVEIKRTREDLKNVFPPEVAVFEPSEAEISHTQKATLVCLATGFYPDHVELSWWVNGKEVHSGVCTDPQPLKEQPALNDSRYCLSSRLRVSATFWQNPRNHFRCQVQFYGLSENDEWTQDRAKPVTQIVSAEAWGRADCGFTSESYQQGVLSATILYEILLGKATLYAVLVSALVLMAMVKRKDSRG

SEQ ID NO: 21146 - protein, 847 aa, Artificial Sequence
  Synthetic Polypeptide
MALPVTALLLPLALLLHAARPEVQLVESGGGLVQPGGSLRLSCAASGYTFTTYWMHWVRQAPGKGLEWVGYIRPSTGYTEYNQKFKDRFTISADTSKNTAYLQMNSLRAEDTAVYYCARSRWLLDYWGQGTLVTVSLEIQNPDPAVYQLRDSKSSDKSVCLFTDFDSQTNVSQSKDSDVYITDKCVLDMRSMDFKSNSAVAWSNKSDFACANAFNNSIIPEDTFFPSPESSCDVKLVEKSFETDTNLNFQNLSVIGFRILLLKVAGFNLLMTLRLWSSRAKRSGSGVKQTLNFDLLKLAGDVESNPGPTSMDWIWRILFLVGAATGAHSFEDIQMTQSPSSLSASVGDRVTITCKSSQSLLYSSNQKNYLAWFQQKPGKAPKLLIYWASTRESGVPSRFSGSGSGTDFTLTISSLQPEDFATYFCHQYLSSYTFGQGTKVEIKRTREDLKNVFPPEVAVFEPSEAEISHTQKATLVCLATGFYPDHVELSWWVNGKEVHSGVCTDPQPLKEQPALNDSRYCLSSRLRVSATFWQNPRNHFRCQVQFYGLSENDEWTQDRAKPVTQIVSAEAWGRADCGFTSESYQQGVLSATILYEILLGKATLYAVLVSALVLMAMVKRKDSRGRAKRSGSGATNFSLLKQAGDVEENPGPSRGGIHTMATYEVLCEVARKLGTDDREVVLFLLNVFIPQPTLAQLIGALRALKEEGRLTFPLLAECLFRAGRRDLLRDLLHLDPRFLERHLAGTMSYFSPYQLTVLHVDGELCARDIRSLIFLSKDTIGSRSTPQTFLHWVYCMENLDLLGPTDVDALMSMLRSLSRVDLQRQVQTLMGLHLSGPSHSQHYRHTP

SEQ ID NO: 21147 - protein, 899 aa, Artificial Sequence
  Synthetic Polypeptide
MALPVTALLLPLALLLHAARPLEGKPIPNPLLGLDSTGSGEDLKNVFPPEVAVFEPSKAEIAHTQKATLVCLATGFYPDHVELSWWVNGKEVHSGVCTDPQPLKEQPALNDSRYCLSSRLRVSATFWQNPRNHFRCQVQFYGLSENDEWTQDRAKPVTQIVSAEAWGRADCGITSASYHQGVLSATILYEILLGKATLYAVLVSALVLMAMVKRKDSRGRAKRSGSGATNFSLLKQAGDVEENPGPTSMALPVTALLLPLALLLHAARPEVQLVESGGGLVQPGGSLRLSCAASGYTFTTYWMHWVRQAPGKGLEWVGYIRPSTGYTEYNQKFKDRFTISADTSKNTAYLQMNSLRAEDTAVYYCARSRWLLDYWGQGTLVTVSGGGGSGGGGSGGGGSDIQMTQSPSSLSASVGDRVTITCKSSQSLLYSSNQKNYLAWFQQKPGKAPKLLIYWASTRESGVPSRFSGSGSGTDFTLTISSLQPEDFATYFCHQYLSSYTFGQGTKVEIKRTREQKLISEEDGSGIQNPDPAVYQLRDSKSSDKSVCLFTDFDSQTNVSQSKDSDVYITDKCVLDMRSMDFKSNSAVAWSNKSDFACANAFNNSIIPEDTFFPSSDVPCDVKLVEKSFETDTNLNFQNLSVIGFRILLLKVAGFNLLMTLRLWSSRAKRSGSGVKQTLNFDLLKLAGDVESNPGPSRGHMTEYKPTVRLATRDDVPRAVRTLAAAFADYPATRHTVDPDRHIERVTELQELFLTRVGLDIGKVWVADDGAAVAVWTTPESVEAGAVFAEIGPRMAELSGSRLAAQQQMEGLLAPHRPKEPAWFLATVGVSPDHQGKGLGSAVVLPGVEAAERAGVPAFLETSAPRNLPFYERLGFTVTADVEVPEGPRTWCMTRKPGA

SEQ ID NO: 21148 - protein, 900 aa, Artificial Sequence
  Synthetic Polypeptide
MALPVTALLLPLALLLHAARPLEQKLISEEDLGSGDRPDPAVYQLRDSKSSDKSVCLFTDFDSQTNVSQSKDSDVYITDKCVLDMRSMDFKSNSAVAWSNKSDFACANAFNNSIIPEDTFFPSPESSCDVKLVEKSFETDTNLNFQNLSVIGFRILLLKVAGFNLLMTLRLWSSSSRAKRSGSGVKQTLNFDLLKLAGDVESNPGPTSMALPVTALLLPLALLLHAARPEVQLVESGGGLVQPGGSLRLSCAASGYTFTTYWMHWVRQAPGKGLEWVGYIRPSTGYTEYNQKFKDRFTISADTSKNTAYLQMNSLRAEDTAVYYCARSRWLLDYWGQGTLVTVSGGGGSGGGGSGGGGSDIQMTQSPSSLSASVGDRVTITCKSSQSLLYSSNQKNYLAWFQQKPGKAPKLLIYWASTRESGVPSRFSGSGSGTDFTLTISSLQPEDFATYFCHQYLSSYTFGQGTKVEIKRTRGKPIPNPLLGLDSTGSGEDLKNVFPPEVAVFEPSEAEISHTQKATLVCLATGFYPDHVELSWWVNGKEVHSGVCTDPQPLKEQPALNDSRYCLSSRLRVSATFWQNPRNHFRCQVQFYGLSENDEWTQDRAKPVTQIVSAEAWGRADCGFTSESYQQGVLSATILYEILLGKATLYAVLVSALVLMAMVKRKDSRGRAKRSGSGATNFSLLKQAGDVEENPGPSRGHMTEYKPTVRLATRDDVPRAVRTLAAAFADYPATRHTVDPDRHIERVTELQELFLTRVGLDIGKVWVADDGAAVAVWTTPESVEAGAVFAEIGPRMAELSGSRLAAQQQMEGLLAPHRPKEPAWFLATVGVSPDHQGKGLGSAVVLPGVEAAERAGVPAFLETSAPRNLPFYERLGFTVTADVEVPEGPRTWCMTRKPGA

SEQ ID NO: 21149 - protein, 854 aa, Artificial Sequence
  Synthetic Polypeptide
MALPVTALLLPLALLLHAARPEVQLVESGGGLVQPGGSLRLSCAASGYTFTTYWMHWVRQAPGKGLEWVGYIRPSTGYTEYNQKFKDRFTISADTSKNTAYLQMNSLRAEDTAVYYCARSRWLLDYWGQGTLVTVSLEDLKNVFPPEVAVFEPSEAEISHTQKATLVCLATGFYPDHVELSWWVNGKEVHSGVSTDPQPLKEQPALNDSRYCLSSRLRVSATFWQNPRNHFRCQVQFYGLSENDEWTQDRAKPVTQIVSAEAWGRADCGFTSESYQQGVLSATILYEILLGKATLYAVLVSALVLMAMVKRKDSRGRAKRSGSGATNFSLLKQAGDVEENPGPTSMDWIWRILFLVGAATGAHSFEDIQMTQSPSSLSASVGDRVTITCKSSQSLLYSSNQKNYLAWFQQKPGKAPKLLIYWASTRESGVPSRFSGSGSGTDFTLTISSLQPEDFATYFCHQYLSSYTFGQGTKVEIKRTRIQNPDPAVYQLRDSKSSDKSVCLFTDFDSQTNVSQSKDSDVYITDKTVLDMRSMDFKSNSAVAWSNKSDFACANAFNNSIIPEDTFFPSPESSCDVKLVEKSFETDTNLNFQNLSVIGFRILLLKVAGFNLLMTLRLWSSRAKRSGSGVKQTLNFDLLKLAGDVESNPGPSRGHMTEYKPTVRLATRDDVPRAVRTLAAAFADYPATRHTVDPDRHIERVTELQELFLTRVGLDIGKVWVADDGAAVAVWTTPESVEAGAVFAEIGPRMAELSGSRLAAQQQMEGLLAPHRPKEPAWFLATVGVSPDHQGKGLGSAVVLPGVEAAERAGVPAFLETSAPRNLPFYERLGFTVTADVEVPEGPRTWCMTRKPGA

SEQ ID NO: 21150 - protein, 936 aa, Artificial Sequence
  Synthetic Polypeptide
MALPVTALLLPLALLLHAARPEVQLVESGGGLVQPGGSLRLSCAASGYTFTTYWMHWVRQAPGKGLEWVGYIRPSTGYTEYNQKFKDRFTISADTSKNTAYLQMNSLRAEDTAVYYCARSRWLLDYWGQGTLVTVSLEDLKNVFPPEVAVFEPSEAEISHTQKATLVCLATGFYPDHVELSWWVNGKEVHSGVSTDPQPLKEQPALNDSRYCLSSRLRVSATFWQNPRNHFRCQVQFYGLSENDEWTQDRAKPVTQIVSAEAWGRADCGFTSESYQQGVLSATILYEILLGKATLYAVLVSALVLMAMVKRKDSRGRAKRSGSGATNFSLLKQAGDVEENPGPTSMDWIWRILFLVGAATGAHSFEDIQMTQSPSSLSASVGDRVTITCKSSQSLLYSSNQKNYLAWFQQKPGKAPKLLIYWASTRESGVPSRFSGSGSGTDFTLTISSLQPEDFATYFCHQYLSSYTFGQGTKVEIKRTREQKLISEEDGSGTPFPSLAPPIMLLVDGKQQMVVVCLVLDVAPPGLDSPIWFSAGNGSALDAFTYGPSPATDGTWTNLAHLSLPSEELASWEPLVCHTGPGAEGHSRSTQPMHLSGEASTARTCPQEPLRGTPGGALWLGVLRLLLFKLLLFDLLLTCSCLCDPAGPLPSPATTTRLRALGSHRLHPATETGGREATSSPRPQPRDRRWGDTPPGRKPGSPVRAKRSGSGVKQTLNFDLLKLAGDVESNPGPSRGHMTEYKPTVRLATRDDVPRAVRTLAAAFADYPATRHTVDPDRHIERVTELQELFLTRVGLDIGKVWVADDGAAVAVWTTPESVEAGAVFAEIGPRMAELSGSRLAAQQQMEGLLAPHRPKEPAWFLATVGVSPDHQGKGLGSAVVLPGVEAAERAGVPAFLETSAPRNLPFYERLGFTVTADVEVPEGPRTWCMTRKPGA

SEQ ID NO: 21151 - protein, 954 aa, Artificial Sequence
  Synthetic Polypeptide
MALPVTALLLPLALLLHAARPLEDLKNVFPPEVAVFEPSEAEISHTQKATLVCLATGFYPDHVELSWWVNGKEVHSGVSTDPQPLKEQPALNDSRYCLSSRLRVSATFWQNPRNHFRCQVQFYGLSENDEWTQDRAKPVTQIVSAEAWGRADCGFTSESYQQGVLSATILYEILLGKATLYAVLVSALVLMAMVKRKDSRGRAKRSGSGATNFSLLKQAGDVEENPGPTSMALPVTALLLPLALLLHAARPEVQLVESGGGLVQPGGSLRLSCAASGYTFTTYWMHWVRQAPGKGLEWVGYIRPSTGYTEYNQKFKDRFTISADTSKNTAYLQMNSLRAEDTAVYYCARSRWLLDYWGQGTLVTVSGGGGSGGGGSGGGGSDIQMTQSPSSLSASVGDRVTITCKSSQSLLYSSNQKNYLAWFQQKPGKAPKLLIYWASTRESGVPSRFSGSGSGTDFTLTISSLQPEDFATYFCHQYLSSYTFGQGTKVEIKRTREQKLISEEDLGSGTPFPSLAPPIMLLVDGKQQMVVVCLVLDVAPPGLDSPIWFSAGNGSALDAFTYGPSPATDGTWTNLAHLSLPSEELASWEPLVCHTGPGAEGHSRSTQPMHLSGEASTARTCPQEPLRGTPGGALWLGVLRLLLFKLLLFDLLLTCSCLCDPAGPLPSPATTTRLRALGSHRLHPATETGGREATSSPRPQPRDRRWGDTPPGRKPGSPVRAKRSGSGVKQTLNFDLLKLAGDVESNPGPSRSRGHMTEYKPTVRLATRDDVPRAVRTLAAAFADYPATRHTVDPDRHIERVTELQELFLTRVGLDIGKVWVADDGAAVAVWTTPESVEAGAVFAEIGPRMAELSGSRLAAQQQMEGLLAPHRPKEPAWFLATVGVSPDHQGKGLGSAVVLPGVEAAERAGVPAFLETSAPRNLPFYERLGFTVTADVEVPEGPRTWCMTRKPGA

SEQ ID NO: 21152 - protein, 891 aa, Artificial Sequence
  Synthetic Polypeptide
MALPVTALLLPLALLLHAARPEVQLVESGGGLVQPGGSLRLSCAASGYTFTTYWMHWVRQAPGKGLEWVGYIRPSTGYTEYNQKFKDRFTISADTSKNTAYLQMNSLRAEDTAVYYCARSRWLLDYWGQGTLVTVSLEGKPIPNPLLGLDSTGSGDKQLDADVSPKPTIFLPSIAETKLQKAGTYLCLLEKFFPDVIKIHWQEKKSNTILGSQEGNTMKTNDTYMKFSWLTVPEKSLDKEHRCIVRHENNKNGVDQEIIFPPIKTDVITMDPKDNCSKDANDTLLLQLTNTSAYYMYLLLLLKSVVYFAIITCCLLRRTAFCCNGEKSRAKRSGSGATNFSLLKQAGDVEENPGPTSMDWIWRILFLVGAATGAHSFEDIQMTQSPSSLSASVGDRVTITCKSSQSLLYSSNQKNYLAWFQQKPGKAPKLLIYWASTRESGVPSRFSGSGSGTDFTLTISSLQPEDFATYFCHQYLSSYTFGQGTKVEIKRTREQKLISEEDGSGSQPHTKPSVFVMKNGTNVACLVKEFYPKDIRINLVSSKKITEFDPAIVISPSGKYNAVKLGKYEDSNSVTCSVQHDNKTVHSTDFEVKTDSTDHVKPKETENTKQPSKSCHKPKAIVHTEKVNMMSLTVLGLRMLFAKTVAVNFLLTAKLFFLRAKRSGSGVKQTLNFDLLKLAGDVESNPGPSRGHMTEYKPTVRLATRDDVPRAVRTLAAAFADYPATRHTVDPDRHIERVTELQELFLTRVGLDIGKVWVADDGAAVAVWTTPESVEAGAVFAEIGPRMAELSGSRLAAQQQMEGLLAPHRPKEPAWFLATVGVSPDHQGKGLGSAVVLPGVEAAERAGVPAFLETSAPRNLPFYERLGFTVTADVEVPEGPRTWCMTRKPGA

SEQ ID NO: 21153 - protein, 629 aa, Artificial Sequence
  Synthetic Polypeptide
MALPVTALLLPLALLLHAARPEVQLVESGGGLVQPGGSLRLSCAASGYTFTTYWMHWVRQAPGKGLEWVGYIRPSTGYTEYNQKFKDRFTISADTSKNTAYLQMNSLRAEDTAVYYCARSRWLLDYWGQGTLVTVSLESQPHTKPSVFVMKNGTNVACLVKEFYPKDIRINLVSSKKITEFDPAIVISPSGKYNAVKLGKYEDSNSVTCSVQHDNKTVHSTDFEVKTDSTDHVKPKETENTKQPSKSCHKPKAIVHTEKVNMMSLTVLGLRMLFAKTVAVNFLLTAKLFFLRAKRSGSGATNFSLLKQAGDVEENPGPTSMDWIWRILFLVGAATGAHSFEDIQMTQSPSSLSASVGDRVTITCKSSQSLLYSSNQKNYLAWFQQKPGKAPKLLIYWASTRESGVPSRFSGSGSGTDFTLTISSLQPEDFATYFCHQYLSSYTFGQGTKVEIKRTRDKQLDADVSPKPTIFLPSIAETKLQKAGTYLCLLEKFFPDVIKIHWQEKKSNTILGSQEGNTMKTNDTYMKFSWLTVPEKSLDKEHRCIVRHENNKNGVDQEIIFPPIKTDVITMDPKDNCSKDANDTLLLQLTNTSAYYMYLLLLLKSVVYFAIITCCLLRRTAFCCNGEKS

SEQ ID NO: 21154 - protein, 906 aa, Artificial Sequence
  Synthetic Polypeptide
MALPVTALLLPLALLLHAARPLEGKPIPNPLLGLDSTGSGDKQLDADVSPKPTIFLPSIAETKLQKAGTYLCLLEKFFPDVIKIHWQEKKSNTILGSQEGNTMKTNDTYMKFSWLTVPEKSLDKEHRCIVRHENNKNGVDQEIIFPPIKTDVITMDPKDNCSKDANDTLLLQLTNTSAYYMYLLLLLKSVVYFAIITCCLLRRTAFCCNGEKSRAKRSGSGATNFSLLKQAGDVEENPGPTSMALPVTALLLPLALLLHAARPEVQLVESGGGLVQPGGSLRLSCAASGYTFTTYWMHWVRQAPGKGLEWVGYIRPSTGYTEYNQKFKDRFTISADTSKNTAYLQMNSLRAEDTAVYYCARSRWLLDYWGQGTLVTVSGGGGSGGGGSGGGGSDIQMTQSPSSLSASVGDRVTITCKSSQSLLYSSNQKNYLAWFQQKPGKAPKLLIYWASTRESGVPSRFSGSGSGTDFTLTISSLQPEDFATYFCHQYLSSYTFGQGTKVEIKRTREQKLISEEDGSGSQPHTKPSVFVMKNGTNVACLVKEFYPKDIRINLVSSKKITEFDPAIVISPSGKYNAVKLGKYEDSNSVTCSVQHDNKTVHSTDFEVKTDSTDHVKPKETENTKQPSKSCHKPKAIVHTEKVNMMSLTVLGLRMLFAKTVAVNFLLTAKLFFLRAKRSGSGVKQTLNFDLLKLAGDVESNPGPSRGHMTEYKPTVRLATRDDVPRAVRTLAAAFADYPATRHTVDPDRHIERVTELQELFLTRVGLDIGKVWVADDGAAVAVWTTPESVEAGAVFAEIGPRMAELSGSRLAAQQQMEGLLAPHRPKEPAWFLATVGVSPDHQGKGLGSAVVLPGVEAAERAGVPAFLETSAPRNLPFYERLGFTVTADVEVPEGPRTWCMTRKPGA

SEQ ID NO: 21155 - protein, 1031 aa, Artificial Sequence
  Synthetic Polypeptide
MALPVTALLLPLALLLHAARPEVQLVESGGGLVQPGGSLRLSCAASGYTFTTYWMHWVRQAPGKGLEWVGYIRPSTGYTEYNQKFKDRFTISADTSKNTAYLQMNSLRAEDTAVYYCARSRWLLDYWGQGTLVTVSGQPKANPTVTLFPPSSEELQANKATLVCLISDFYPGAVTVAWKADGSPVKAGVETTKPSKQSNNKYAASSYLSLTPEQWKSHRSYSCQVTHEGSTVEKTVAPTECSGSQSFGLLDPKLCYLLDGILFIYGVILTALFLRVKFSRSADAPAYQQGQNQLYNELNLGRREEYDVLDKRRGRDPEMGGKPQRRKNPQEGLYNELQKDKMAEAYSEIGMKGERRRGKGHDGLYQGLSTATKDTYDALHMQALPPRRAKRSGSGATNFSLLKQAGDVEENPGPTSMDWIWRILFLVGAATGAHSFEDIQMTQSPSSLSASVGDRVTITCKSSQSLLYSSNQKNYLAWFQQKPGKAPKLLIYWASTRESGVPSRFSGSGSGTDFTLTISSLQPEDFATYFCHQYLSSYTFGQGTKVEIKRASTKGPSVFPLAPSSKSTSGGTAALGCLVKDYFPEPVTVSWNSGALTSGVHTFPAVLQSSGLYSLSSVVTVPSSSLGTQTYICNVNHKPSNTKVDKRVEPKSCGTQSFGLLDPKLCYLLDGILFIYGVILTALFLRVKFSRSADAPAYQQGQNQLYNELNLGRREEYDVLDKRRGRDPEMGGKPQRRKNPQEGLYNELQKDKMAEAYSEIGMKGERRRGKGHDGLYQGLSTATKDTYDALHMQALPPRRAKRSGSGVKQTLNFDLLKLAGDVESNPGPSRGHMTEYKPTVRLATRDDVPRAVRTLAAAFADYPATRHTVDPDRHIERVTELQELFLTRVGLDIGKVWVADDGAAVAVWTTPESVEAGAVFAEIGPRMAELSGSRLAAQQQMEGLLAPHRPKEPAWFLATVGVSPDHQGKGLGSAVVLPGVEAAERAGVPAFLETSAPRNLPFYERLGFTVTADVEVPEGPRTWCMTRKPGA

SEQ ID NO: 21156 - protein, 817 aa, Artificial Sequence
  Synthetic Polypeptide
MALPVTALLLPLALLLHAARPEVQLVESGGGLVQPGGSLRLSCAASGYTFTTYWMHWVRQAPGKGLEWVGYIRPSTGYTEYNQKFKDRFTISADTSKNTAYLQMNSLRAEDTAVYYCARSRWLLDYWGQGTLVTVSLEDLKNVFPPEVAVFEPSEAEISHTQKATLVCLATGFYPDHVELSWWVNGKEVHSGVSTDPQPLKEQPALNDSRYCLSSRLRVSATFWQNPRNHFRCQVQFYGLSENDEWTQDRAKPVTQIVSAEAWGRADCGSQSFGLLDPKLCYLLDGILFIYGVILTALFLRVKFSRSADAPAYQQGQNQLYNELNLGRREEYDVLDKRRGRDPEMGGKPQRRKNPQEGLYNELQKDKMAEAYSEIGMKGERRRGKGHDGLYQGLSTATKDTYDALHMQALPPRRAKRSGSGATNFSLLKQAGDVEENPGPTSMDWIWRILFLVGAATGAHSFEDIQMTQSPSSLSASVGDRVTITCKSSQSLLYSSNQKNYLAWFQQKPGKAPKLLIYWASTRESGVPSRFSGSGSGTDFTLTISSLQPEDFATYFCHQYLSSYTFGQGTKVEIKRTRIQNPDPAVYQLRDSKSSDKSVCLFTDFDSQTNVSQSKDSDVYITDKTVLDMRSMDFKSNSAVAWSNKSDFACANAFNNSIIPEDTFFPSPESSCGTQSFGLLDPKLCYLLDGILFIYGVILTALFLRVKFSRSADAPAYQQGQNQLYNELNLGRREEYDVLDKRRGRDPEMGGKPQRRKNPQEGLYNELQKDKMAEAYSEIGMKGERRRGKGHDGLYQGLSTATKDTYDALHMQALPPR

SEQ ID NO: 21157 - protein, 817 aa, Artificial Sequence
  Synthetic Polypeptide
MALPVTALLLPLALLLHAARPEVQLVESGGGLVQPGGSLRLSCAASGYTFTTYWMHWVRQAPGKGLEWVGYIRPSTGYTEYNQKFKDRFTISADTSKNTAYLQMNSLRAEDTAVYYCARSRWLLDYWGQGTLVTVSLEDLKNVFPPEVAVFEPSKAEIAHTQKATLVCLATGFYPDHVELSWWVNGKEVHSGVCTDPQPLKEQPALNDSRYCLSSRLRVSATFWQNPRNHFRCQVQFYGLSENDEWTQDRAKPVTQIVSAEAWGRADCGSQSFGLLDPKLCYLLDGILFIYGVILTALFLRVKFSRSADAPAYQQGQNQLYNELNLGRREEYDVLDKRRGRDPEMGGKPQRRKNPQEGLYNELQKDKMAEAYSEIGMKGERRRGKGHDGLYQGLSTATKDTYDALHMQALPPRRAKRSGSGATNFSLLKQAGDVEENPGPTSMDWIWRILFLVGAATGAHSFEDIQMTQSPSSLSASVGDRVTITCKSSQSLLYSSNQKNYLAWFQQKPGKAPKLLIYWASTRESGVPSRFSGSGSGTDFTLTISSLQPEDFATYFCHQYLSSYTFGQGTKVEIKRTRIQNPDPAVYQLRDSKSSDKSVCLFTDFDSQTNVSQSKDSDVYITDKCVLDMRSMDFKSNSAVAWSNKSDFACANAFNNSIIPEDTFFPSSDVPCGTQSFGLLDPKLCYLLDGILFIYGVILTALFLRVKFSRSADAPAYQQGQNQLYNELNLGRREEYDVLDKRRGRDPEMGGKPQRRKNPQEGLYNELQKDKMAEAYSEIGMKGERRRGKGHDGLYQGLSTATKDTYDALHMQALPPR

SEQ ID NO: 21158 - protein, 888 aa, Artificial Sequence
  Synthetic Polypeptide
MALPVTALLLPLALLLHAARPEVQLVESGGGLVQPGGSLRLSCAASGYTFTTYWMHWVRQAPGKGLEWVGYIRPSTGYTEYNQKFKDRFTISADTSKNTAYLQMNSLRAEDTAVYYCARSRWLLDYWGQGTLVTVSLEGKPIPNPLLGLDSTGSGEDLKNVFPPEVAVFEPSEAEISHTQKATLVCLATGFYPDHVELSWWVNGKEVHSGVSTDPQPLKEQPALNDSRYCLSSRLRVSATFWQNPRNHFRCQVQFYGLSENDEWTQDRAKPVTQIVSAEAWGRADCGSQSFGLLDPKLCYLLDGILFIYGVILTALFLRVKFSRSADAPAYQQGQNQLYNELNLGRREEYDVLDKRRGRDPEMGGKPQRRKNPQEGLYNELQKDKMAEAYSEIGMKGERRRGKGHDGLYQGLSTATKDTYDALHMQALPPRRAKRSGSGATNFSLLKQAGDVEENPGPTSMDWIWRILFLVGAATGAHSFEDIQMTQSPSSLSASVGDRVTITCKSSQSLLYSSNQKNYLAWFQQKPGKAPKLLIYWASTRESGVPSRFSGSGSGTDFTLTISSLQPEDFATYFCHQYLSSYTFGQGTKVEIKRTREQKLISEEDGSGIQNPDPAVYQLRDSKSSDKSVCLFTDFDSQTNVSQSKDSDVYITDKTVLDMRSMDFKSNSAVAWSNKSDFACANAFNNSIIPEDTFFPSPESSCGTQSFGLLDPKLCYLLDGILFIYGVILTALFLRSKRSRLLHSDYMNMTPRRPGPTRKHYQPYAPPRDFAAYRSRVKFSRSADAPAYQQGQNQLYNELNLGRREEYDVLDKRRGRDPEMGGKPQRRKNPQEGLYNELQKDKMAEAYSEIGMKGERRRGKGHDGLYQGLSTATKDTYDALHMQALPPR

SEQ ID NO: 21159 - protein, 929 aa, Artificial Sequence
  Synthetic Polypeptide
MALPVTALLLPLALLLHAARPEVQLVESGGGLVQPGGSLRLSCAASGYTFTTYWMHWVRQAPGKGLEWVGYIRPSTGYTEYNQKFKDRFTISADTSKNTAYLQMNSLRAEDTAVYYCARSRWLLDYWGQGTLVTVSLEGKPIPNPLLGLDSTGSGEDLKNVFPPEVAVFEPSEAEISHTQKATLVCLATGFYPDHVELSWWVNGKEVHSGVSTDPQPLKEQPALNDSRYCLSSRLRVSATFWQNPRNHFRCQVQFYGLSENDEWTQDRAKPVTQIVSAEAWGRADCGSQSFGLLDPKLCYLLDGILFIYGVILTALFLRSKRSRLLHSDYMNMTPRRPGPTRKHYQPYAPPRDFAAYRSRVKFSRSADAPAYQQGQNQLYNELNLGRREEYDVLDKRRGRDPEMGGKPQRRKNPQEGLYNELQKDKMAEAYSEIGMKGERRRGKGHDGLYQGLSTATKDTYDALHMQALPPRRAKRSGSGATNFSLLKQAGDVEENPGPTSMDWIWRILFLVGAATGAHSFEDIQMTQSPSSLSASVGDRVTITCKSSQSLLYSSNQKNYLAWFQQKPGKAPKLLIYWASTRESGVPSRFSGSGSGTDFTLTISSLQPEDFATYFCHQYLSSYTFGQGTKVEIKRTREQKLISEEDGSGIQNPDPAVYQLRDSKSSDKSVCLFTDFDSQTNVSQSKDSDVYITDKTVLDMRSMDFKSNSAVAWSNKSDFACANAFNNSIIPEDTFFPSPESSCGTQSFGLLDPKLCYLLDGILFIYGVILTALFLRSKRSRLLHSDYMNMTPRRPGPTRKHYQPYAPPRDFAAYRSRVKFSRSADAPAYQQGQNQLYNELNLGRREEYDVLDKRRGRDPEMGGKPQRRKNPQEGLYNELQKDKMAEAYSEIGMKGERRRGKGHDGLYQGLSTATKDTYDALHMQALPPR

SEQ ID NO: 21160 - protein, 890 aa, Artificial Sequence
  Synthetic Polypeptide
MALPVTALLLPLALLLHAARPEVQLVESGGGLVQPGGSLRLSCAASGYTFTTYWMHWVRQAPGKGLEWVGYIRPSTGYTEYNQKFKDRFTISADTSKNTAYLQMNSLRAEDTAVYYCARSRWLLDYWGQGTLVTVSLEGKPIPNPLLGLDSTGSGEDLKNVFPPEVAVFEPSEAEISHTQKATLVCLATGFYPDHVELSWWVNGKEVHSGVSTDPQPLKEQPALNDSRYCLSSRLRVSATFWQNPRNHFRCQVQFYGLSENDEWTQDRAKPVTQIVSAEAWGRADCGSQSFGLLDPKLCYLLDGILFIYGVILTALFLRVKFSRSADAPAYQQGQNQLYNELNLGRREEYDVLDKRRGRDPEMGGKPQRRKNPQEGLYNELQKDKMAEAYSEIGMKGERRRGKGHDGLYQGLSTATKDTYDALHMQALPPRRAKRSGSGATNFSLLKQAGDVEENPGPTSMDWIWRILFLVGAATGAHSFEDIQMTQSPSSLSASVGDRVTITCKSSQSLLYSSNQKNYLAWFQQKPGKAPKLLIYWASTRESGVPSRFSGSGSGTDFTLTISSLQPEDFATYFCHQYLSSYTFGQGTKVEIKRTREQKLISEEDLGSGIQNPDPAVYQLRDSKSSDKSVCLFTDFDSQTNVSQSKDSDVYITDKTVLDMRSMDFKSNSAVAWSNKSDFACANAFNNSIIPEDTFFPSPESSCGTQSFGLLDPKLCYLLDGILFIYGVILTALFLKRGRKKLLYIFKQPFMRPVQTTQEEDGCSCRFPEEEEGGCELRVKFSRSADAPAYQQGQNQLYNELNLGRREEYDVLDKRRGRDPEMGGKPQRRKNPQEGLYNELQKDKMAEAYSEIGMKGERRRGKGHDGLYQGLSTATKDTYDALHMQALPPR

SEQ ID NO: 21161 - protein, 932 aa, Artificial Sequence
  Synthetic Polypeptide
MALPVTALLLPLALLLHAARPEVQLVESGGGLVQPGGSLRLSCAASGYTFTTYWMHWVRQAPGKGLEWVGYIRPSTGYTEYNQKFKDRFTISADTSKNTAYLQMNSLRAEDTAVYYCARSRWLLDYWGQGTLVTVSLEGKPIPNPLLGLDSTGSGEDLKNVFPPEVAVFEPSEAEISHTQKATLVCLATGFYPDHVELSWWVNGKEVHSGVSTDPQPLKEQPALNDSRYCLSSRLRVSATFWQNPRNHFRCQVQFYGLSENDEWTQDRAKPVTQIVSAEAWGRADCGSQSFGLLDPKLCYLLDGILFIYGVILTALFLKRGRKKLLYIFKQPFMRPVQTTQEEDGCSCRFPEEEEGGCELRVKFSRSADAPAYQQGQNQLYNELNLGRREEYDVLDKRRGRDPEMGGKPQRRKNPQEGLYNELQKDKMAEAYSEIGMKGERRRGKGHDGLYQGLSTATKDTYDALHMQALPPRRAKRSGSGATNFSLLKQAGDVEENPGPTSMDWIWRILFLVGAATGAHSFEDIQMTQSPSSLSASVGDRVTITCKSSQSLLYSSNQKNYLAWFQQKPGKAPKLLIYWASTRESGVPSRFSGSGSGTDFTLTISSLQPEDFATYFCHQYLSSYTFGQGTKVEIKRTREQKLISEEDLGSGIQNPDPAVYQLRDSKSSDKSVCLFTDFDSQTNVSQSKDSDVYITDKTVLDMRSMDFKSNSAVAWSNKSDFACANAFNNSIIPEDTFFPSPESSCGTQSFGLLDPKLCYLLDGILFIYGVILTALFLKRGRKKLLYIFKQPFMRPVQTTQEEDGCSCRFPEEEEGGCELRVKFSRSADAPAYQQGQNQLYNELNLGRREEYDVLDKRRGRDPEMGGKPQRRKNPQEGLYNELQKDKMAEAYSEIGMKGERRRGKGHDGLYQGLSTATKDTYDALHMQALPPR

SEQ ID NO: 21162 - protein, 822 aa, Artificial Sequence
  Synthetic Polypeptide
MALPVTALLLPLALLLHAARPEVQLVESGGGLVQPGGSLRLSCAASGYTFTTYWMHWVRQAPGKGLEWVGYIRPSTGYTEYNQKFKDRFTISADTSKNTAYLQMNSLRAEDTAVYYCARSRWLLDYWGQGTLVTVSLEQSFGLLDPKLCYLLDGILFIYGVILTALFLRVKFSRSADAPAYQQGQNQLYNELNLGRREEYDVLDKRRGRDPEMGGKPQRRKNPQEGLYNELQKDKMAEAYSEIGMKGERRRGKGHDGLYQGLSTATKDTYDALHMQALPPRRAKRSGSGATNFSLLKQAGDVEENPGPTSMDWIWRILFLVGAATGAHSFEDIQMTQSPSSLSASVGDRVTITCKSSQSLLYSSNQKNYLAWFQQKPGKAPKLLIYWASTRESGVPSRFSGSGSGTDFTLTISSLQPEDFATYFCHQYLSSYTFGQGTKVEIKRTRQSFGLLDPKLCYLLDGILFIYGVILTALFLRVKFSRSADAPAYQQGQNQLYNELNLGRREEYDVLDKRRGRDPEMGGKPQRRKNPQEGLYNELQKDKMAEAYSEIGMKGERRRGKGHDGLYQGLSTATKDTYDALHMQALPPRRAKRSGSGVKQTLNFDLLKLAGDVESNPGPSRGHMTEYKPTVRLATRDDVPRAVRTLAAAFADYPATRHTVDPDRHIERVTELQELFLTRVGLDIGKVWVADDGAAVAVWTTPESVEAGAVFAEIGPRMAELSGSRLAAQQQMEGLLAPHRPKEPAWFLATVGVSPDHQGKGLGSAVVLPGVEAAERAGVPAFLETSAPRNLPFYERLGFTVTADVEVPEGPRTWCMTRKPGA

SEQ ID NO: 21163 - protein, 647 aa, Artificial Sequence
  Synthetic Polypeptide
MALPVTALLLPLALLLHAARPEVQLVESGGGLVQPGGSLRLSCAASGYTFTTYWMHWVRQAPGKGLEWVGYIRPSTGYTEYNQKFKDRFTISADTSKNTAYLQMNSLRAEDTAVYYCARSRWLLDYWGQGTLVTVSLEGQPKANPTVTLFPPSSEELQANKATLVCLISDFYPGAVTVAWKADGSPVKAGVETTKPSKQSNNKYAASSYLSLTPEQWKSHRSYSCQVTHEGSTVEKTVAPTECSPIKTDVITMDPKDNCSKDANDTLLLQLTNTSAYYMYLLLLLKSVVYFAIITCCLLRRTAFCCNGEKSRAKRSGSGATNFSLLKQAGDVEENPGPTSMDWIWRILFLVGAATGAHSFEDIQMTQSPSSLSASVGDRVTITCKSSQSLLYSSNQKNYLAWFQQKPGKAPKLLIYWASTRESGVPSRFSGSGSGTDFTLTISSLQPEDFATYFCHQYLSSYTFGQGTKVEIKRTRASTKGPSVFPLAPSSKSTSGGTAALGCLVKDYFPEPVTVSWNSGALTSGVHTFPAVLQSSGLYSLSSVVTVPSSSLGTQTYICNVNHKPSNTKVDKRVEPKSCEVKTDSTDHVKPKETENTKQPSKSCHKPKAIVHTEKVNMMSLTVLGLRMLFAKTVAVNFLLTAKLFFL

SEQ ID NO: 21164 - protein, 625 aa, Artificial Sequence
  Synthetic Polypeptide
MALPVTALLLPLALLLHAARPEVQLVESGGGLVQPGGSLRLSCAASGYTFTTYWMHWVRQAPGKGLEWVGYIRPSTGYTEYNQKFKDRFTISADTSKNTAYLQMNSLRAEDTAVYYCARSRWLLDYWGQGTLVTVSLEGQPKANPTVTLFPPSSEELQANKATLVCLISDFYPGAVTVAWKADGSPVKAGVETTKPSKQSNNKYAASSYLSLTPEQWKSHRSYSCQVTHEGSTVEKTVAPTECSGRADCGITSASYHQGVLSATILYEILLGKATLYAVLVSALVLMAMVKRKDSRGRAKRSGSGATNFSLLKQAGDVEENPGPTSMDWIWRILFLVGAATGAHSFEDIQMTQSPSSLSASVGDRVTITCKSSQSLLYSSNQKNYLAWFQQKPGKAPKLLIYWASTRESGVPSRFSGSGSGTDFTLTISSLQPEDFATYFCHQYLSSYTFGQGTKVEIKRTRASTKGPSVFPLAPSSKSTSGGTAALGCLVKDYFPEPVTVSWNSGALTSGVHTFPAVLQSSGLYSLSSVVTVPSSSLGTQTYICNVNHKPSNTKVDKRVEPKSCIPEDTFFPSSDVPCDVKLVEKSFETDTNLNFQNLSVIGFRILLLKVAGFNLLMTLRLWSS

SEQ ID NO: 21165 - protein, 625 aa, Artificial Sequence
  Synthetic Polypeptide
MALPVTALLLPLALLLHAARPEVQLVESGGGLVQPGGSLRLSCAASGYTFTTYWMHWVRQAPGKGLEWVGYIRPSTGYTEYNQKFKDRFTISADTSKNTAYLQMNSLRAEDTAVYYCARSRWLLDYWGQGTLVTVSLEGQPKANPTVTLFPPSSEELQANKATLVCLISDFYPGAVTVAWKADGSPVKAGVETTKPSKQSNNKYAASSYLSLTPEQWKSHRSYSCQVTHEGSTVEKTVAPTECSGRADCGFTSESYQQGVLSATILYEILLGKATLYAVLVSALVLMAMVKRKDSRGRAKRSGSGATNFSLLKQAGDVEENPGPTSMDWIWRILFLVGAATGAHSFEDIQMTQSPSSLSASVGDRVTITCKSSQSLLYSSNQKNYLAWFQQKPGKAPKLLIYWASTRESGVPSRFSGSGSGTDFTLTISSLQPEDFATYFCHQYLSSYTFGQGTKVEIKRTRASTKGPSVFPLAPSSKSTSGGTAALGCLVKDYFPEPVTVSWNSGALTSGVHTFPAVLQSSGLYSLSSVVTVPSSSLGTQTYICNVNHKPSNTKVDKRVEPKSCIPEDTFFPSPESSCDVKLVEKSFETDTNLNFQNLSVIGFRILLLKVAGFNLLMTLRLWSS

SEQ ID NO: 21166 - protein, 451 aa, Artificial Sequence
  Synthetic Polypeptide
MALPVTALLLPLALLLHAARPEVQLVESGGGLVQPGGSLRLSCAASGYTFTTYWMHWVRQAPGKGLEWVGYIRPSTGYTEYNQKFKDRFTISADTSKNTAYLQMNSLRAEDTAVYYCARSRWLLDYWGQGTLVTVSGGGGSGGGGSGGGGSDIQMTQSPSSLSASVGDRVTITCKSSQSLLYSSNQKNYLAWFQQKPGKAPKLLIYWASTRESGVPSRFSGSGSGTDFTLTISSLQPEDFATYFCHQYLSSYTFGQGTKVEIKRTRDGNEEMGGITQTPYKVSISGTTVILTCPQYPGSEILWQHNDKNIGGDEDDKNIGSDEDHLSLKEFSELEQSGYYVCYPRGSKPEDANFYLYLRARVCENCMEMDVMSVATIVIVDICITGGLLLLVYYWSKNRKAKAKPVTRGAGAGGRQRGQNKERPPPVPNPDYEPIRKGQRDLYSGLNQRRI

SEQ ID NO: 21167 - protein, 416 aa, Artificial Sequence
  Synthetic Polypeptide
MALPVTALLLPLALLLHAARPEVQLVESGGGLVQPGGSLRLSCAASGYTFTTYWMHWVRQAPGKGLEWVGYIRPSTGYTEYNQKFKDRFTISADTSKNTAYLQMNSLRAEDTAVYYCARSRWLLDYWGQGTLVTVSGGGGSGGGGSGGGGSDIQMTQSPSSLSASVGDRVTITCKSSQSLLYSSNQKNYLAWFQQKPGKAPKLLIYWASTRESGVPSRFSGSGSGTDFTLTISSLQPEDFATYFCHQYLSSYTFGQGTKVEIKRTRFKIPIEELEDRVFVNCNTSITWVEGTVGTLLSDITRLDLGKRILDPRGIYRCNGTDIYKDKESTVQVHYRMCQSCVELDPATVAGIIVTDVIATLLLALGVFCFAGHETGRLSGAADTQALLRNDQVYQPLRDRDDAQYSHLGGNWARNK

SEQ ID NO: 21168 - protein, 426 aa, Artificial Sequence
  Synthetic Polypeptide
MALPVTALLLPLALLLHAARPEVQLVESGGGLVQPGGSLRLSCAASGYTFTTYWMHWVRQAPGKGLEWVGYIRPSTGYTEYNQKFKDRFTISADTSKNTAYLQMNSLRAEDTAVYYCARSRWLLDYWGQGTLVTVSGGGGSGGGGSGGGGSDIQMTQSPSSLSASVGDRVTITCKSSQSLLYSSNQKNYLAWFQQKPGKAPKLLIYWASTRESGVPSRFSGSGSGTDFTLTISSLQPEDFATYFCHQYLSSYTFGQGTKVEIKRTRQSIKGNHLVKVYDYQEDGSVLLTCDAEAKNITWFKDGKMIGFLTEDKKKWNLGSNAKDPRGMYQCKGSQNKSKPLQVYYRMCQNCIELNAATISGFLFAEIVSIFVLAVGVYFIAGQDGVRQSRASDKQTLLPNDQLYQPLKDREDDQYSHLQGNQLRRN

SEQ ID NO: 21169 - protein, 409 aa, Artificial Sequence
  Synthetic Polypeptide
MALPVTALLLPLALLLHAARPEVQLVESGGGLVQPGGSLRLSCAASGYTFTTYWMHWVRQAPGKGLEWVGYIRPSTGYTEYNQKFKDRFTISADTSKNTAYLQMNSLRAEDTAVYYCARSRWLLDYWGQGTLVTVSGGGGSGGGGSGGGGSDIQMTQSPSSLSASVGDRVTITCKSSQSLLYSSNQKNYLAWFQQKPGKAPKLLIYWASTRESGVPSRFSGSGSGTDFTLTISSLQPEDFATYFCHQYLSSYTFGQGTKVEIKRTRQSFGLLDPKLCYLLDGILFIYGVILTALFLRVKFSRSADAPAYQQGQNQLYNELNLGRREEYDVLDKRRGRDPEMGGKPQRRKNPQEGLYNELQKDKMAEAYSEIGMKGERRRGKGHDGLYQGLSTATKDTYDALHMQALPPR

SEQ ID NO: 21170 - protein, 451 aa, Artificial Sequence
  Synthetic Polypeptide
MALPVTALLLPLALLLHAARPDIQMTQSPSSLSASVGDRVTITCKSSQSLLYSSNQKNYLAWFQQKPGKAPKLLIYWASTRESGVPSRFSGSGSGTDFTLTISSLQPEDFATYFCHQYLSSYTFGQGTKVEIKRGGGGSGGGGSGGGGSEVQLVESGGGLVQPGGSLRLSCAASGYTFTTYWMHWVRQAPGKGLEWVGYIRPSTGYTEYNQKFKDRFTISADTSKNTAYLQMNSLRAEDTAVYYCARSRWLLDYWGQGTLVTVSTRDGNEEMGGITQTPYKVSISGTTVILTCPQYPGSEILWQHNDKNIGGDEDDKNIGSDEDHLSLKEFSELEQSGYYVCYPRGSKPEDANFYLYLRARVCENCMEMDVMSVATIVIVDICITGGLLLLVYYWSKNRKAKAKPVTRGAGAGGRQRGQNKERPPPVPNPDYEPIRKGQRDLYSGLNQRRI

SEQ ID NO: 21171 - protein, 416 aa, Artificial Sequence
  Synthetic Polypeptide
MALPVTALLLPLALLLHAARPDIQMTQSPSSLSASVGDRVTITCKSSQSLLYSSNQKNYLAWFQQKPGKAPKLLIYWASTRESGVPSRFSGSGSGTDFTLTISSLQPEDFATYFCHQYLSSYTFGQGTKVEIKRGGGGSGGGGSGGGGSEVQLVESGGGLVQPGGSLRLSCAASGYTFTTYWMHWVRQAPGKGLEWVGYIRPSTGYTEYNQKFKDRFTISADTSKNTAYLQMNSLRAEDTAVYYCARSRWLLDYWGQGTLVTVSTRFKIPIEELEDRVFVNCNTSITWVEGTVGTLLSDITRLDLGKRILDPRGIYRCNGTDIYKDKESTVQVHYRMCQSCVELDPATVAGIIVTDVIATLLLALGVFCFAGHETGRLSGAADTQALLRNDQVYQPLRDRDDAQYSHLGGNWARNK

SEQ ID NO: 21172 - protein, 426 aa, Artificial Sequence
  Synthetic Polypeptide
MALPVTALLLPLALLLHAARPDIQMTQSPSSLSASVGDRVTITCKSSQSLLYSSNQKNYLAWFQQKPGKAPKLLIYWASTRESGVPSRFSGSGSGTDFTLTISSLQPEDFATYFCHQYLSSYTFGQGTKVEIKRGGGGSGGGGSGGGGSEVQLVESGGGLVQPGGSLRLSCAASGYTFTTYWMHWVRQAPGKGLEWVGYIRPSTGYTEYNQKFKDRFTISADTSKNTAYLQMNSLRAEDTAVYYCARSRWLLDYWGQGTLVTVSTRQSIKGNHLVKVYDYQEDGSVLLTCDAEAKNITWFKDGKMIGFLTEDKKKWNLGSNAKDPRGMYQCKGSQNKSKPLQVYYRMCQNCIELNAATISGFLFAEIVSIFVLAVGVYFIAGQDGVRQSRASDKQTLLPNDQLYQPLKDREDDQYSHLQGNQLRRN

SEQ ID NO: 21173 - protein, 409 aa, Artificial Sequence
  Synthetic Polypeptide
MALPVTALLLPLALLLHAARPDIQMTQSPSSLSASVGDRVTITCKSSQSLLYSSNQKNYLAWFQQKPGKAPKLLIYWASTRESGVPSRFSGSGSGTDFTLTISSLQPEDFATYFCHQYLSSYTFGQGTKVEIKRGGGGSGGGGSGGGGSEVQLVESGGGLVQPGGSLRLSCAASGYTFTTYWMHWVRQAPGKGLEWVGYIRPSTGYTEYNQKFKDRFTISADTSKNTAYLQMNSLRAEDTAVYYCARSRWLLDYWGQGTLVTVSTRQSFGLLDPKLCYLLDGILFIYGVILTALFLRVKFSRSADAPAYQQGQNQLYNELNLGRREEYDVLDKRRGRDPEMGGKPQRRKNPQEGLYNELQKDKMAEAYSEIGMKGERRRGKGHDGLYQGLSTATKDTYDALHMQALPPR

SEQ ID NO: 21174 - protein, 642 aa, Artificial Sequence
  Synthetic Polypeptide
MALPVTALLLPLALLLHAARPEVQLVESGGGLVQPGGSLRLSCAASGYTFTTYWMHWVRQAPGKGLEWVGYIRPSTGYTEYNQKFKDRFTISADTSKNTAYLQMNSLRAEDTAVYYCARSRWLLDYWGQGTLVTVSGGGGSGGGGSGGGGSDIQMTQSPSSLSASVGDRVTITCKSSQSLLYSSNQKNYLAWFQQKPGKAPKLLIYWASTRESGVPSRFSGSGSGTDFTLTISSLQPEDFATYFCHQYLSSYTFGQGTKVEIKRTRGSGIQNPDPAVYQLRDSKSSDKSVCLFTDFDSQTNVSQSKDSDVYITDKTVLDMRSMDFKSNSAVAWSNKSDFACANAFNNSIIPEDTFFPSPESSCDVKLVEKSFETDTNLNFQNLSVIGFRILLLKVAGFNLLMTLRLWSSRAKRSGSGVKQTLNFDLLKLAGDVESNPGPSRGHMTEYKPTVRLATRDDVPRAVRTLAAAFADYPATRHTVDPDRHIERVTELQELFLTRVGLDIGKVWVADDGAAVAVWTTPESVEAGAVFAEIGPRMAELSGSRLAAQQQMEGLLAPHRPKEPAWFLATVGVSPDHQGKGLGSAVVLPGVEAAERAGVPAFLETSAPRNLPFYERLGFTVTADVEVPEGPRTWCMTRKPGA

SEQ ID NO: 21175 - protein, 674 aa, Artificial Sequence
  Synthetic Polypeptide
MALPVTALLLPLALLLHAARPEVQLVESGGGLVQPGGSLRLSCAASGYTFTTYWMHWVRQAPGKGLEWVGYIRPSTGYTEYNQKFKDRFTISADTSKNTAYLQMNSLRAEDTAVYYCARSRWLLDYWGQGTLVTVSGGGGSGGGGSGGGGSDIQMTQSPSSLSASVGDRVTITCKSSQSLLYSSNQKNYLAWFQQKPGKAPKLLIYWASTRESGVPSRFSGSGSGTDFTLTISSLQPEDFATYFCHQYLSSYTFGQGTKVEIKRLEDLKNVFPPEVAVFEPSEAEISHTQKATLVCLATGFYPDHVELSWWVNGKEVHSGVSTDPQPLKEQPALNDSRYCLSSRLRVSATFWQNPRNHFRCQVQFYGLSENDEWTQDRAKPVTQIVSAEAWGRADCGFTSESYQQGVLSATILYEILLGKATLYAVLVSALVLMAMVKRKDSRGRAKRSGSGATNFSLLKQAGDVEENPGPTRGHMTEYKPTVRLATRDDVPRAVRTLAAAFADYPATRHTVDPDRHIERVTELQELFLTRVGLDIGKVWVADDGAAVAVWTTPESVEAGAVFAEIGPRMAELSGSRLAAQQQMEGLLAPHRPKEPAWFLATVGVSPDHQGKGLGSAVVLPGVEAAERAGVPAFLETSAPRNLPFYERLGFTVTADVEVPEGPRTWCMTRKPGA

SEQ ID NO: 21176 - protein, 724 aa, Artificial Sequence
  Synthetic Polypeptide
MALPVTALLLPLALLLHAARPEVQLVESGGGLVQPGGSLRLSCAASGYTFTTYWMHWVRQAPGKGLEWVGYIRPSTGYTEYNQKFKDRFTISADTSKNTAYLQMNSLRAEDTAVYYCARSRWLLDYWGQGTLVTVSGGGGSGGGGSGGGGSDIQMTQSPSSLSASVGDRVTITCKSSQSLLYSSNQKNYLAWFQQKPGKAPKLLIYWASTRESGVPSRFSGSGSGTDFTLTISSLQPEDFATYFCHQYLSSYTFGQGTKVEIKRTREQKLISEEDLGSGTPFPSLAPPIMLLVDGKQQMVVVCLVLDVAPPGLDSPIWFSAGNGSALDAFTYGPSPATDGTWTNLAHLSLPSEELASWEPLVCHTGPGAEGHSRSTQPMHLSGEASTARTCPQEPLRGTPGGALWLGVLRLLLFKLLLFDLLLTCSCLCDPAGPLPSPATTTRLRALGSHRLHPATETGGREATSSPRPQPRDRRWGDTPPGRKPGSPVRAKRSGSGVKQTLNFDLLKLAGDVESNPGPSRSRGHMTEYKPTVRLATRDDVPRAVRTLAAAFADYPATRHTVDPDRHIERVTELQELFLTRVGLDIGKVWVADDGAAVAVWTTPESVEAGAVFAEIGPRMAELSGSRLAAQQQMEGLLAPHRPKEPAWFLATVGVSPDHQGKGLGSAVVLPGVEAAERAGVPAFLETSAPRNLPFYERLGFTVTADVEVPEGPRTWCMTRKPGA

SEQ ID NO: 21177 - protein, 546 aa, Artificial Sequence
  Synthetic Polypeptide
MALPVTALLLPLALLLHAARPEVQLVESGGGLVQPGGSLRLSCAASGYTFTTYWMHWVRQAPGKGLEWVGYIRPSTGYTEYNQKFKDRFTISADTSKNTAYLQMNSLRAEDTAVYYCARSRWLLDYWGQGTLVTVSLEDLKNVFPPEVAVFEPSEAEISHTQKATLVCLATGFYPDHVELSWWVNGKEVHSGVSTDPQPLKEQPALNDSRYCLSSRLRVSATFWQNPRNHFRCQVQFYGLSENDEWTQDRAKPVTQIVSAEAWGRADCGFTSESYQQGVLSATILYEILLGKATLYAVLVSALVLMAMVKRKDSRGRAKRSGSGATNFSLLKQAGDVEENPGPTRGHMTEYKPTVRLATRDDVPRAVRTLAAAFADYPATRHTVDPDRHIERVTELQELFLTRVGLDIGKVWVADDGAAVAVWTTPESVEAGAVFAEIGPRMAELSGSRLAAQQQMEGLLAPHRPKEPAWFLATVGVSPDHQGKGLGSAVVLPGVEAAERAGVPAFLETSAPRNLPFYERLGFTVTADVEVPEGPRTWCMTRKPGA

SEQ ID NO: 21178 - protein, 316 aa, Artificial Sequence
  Synthetic Polypeptide
MALPVTALLLPLALLLHAARPEVQLVESGGGLVQPGGSLRLSCAASGYTFTTYWMHWVRQAPGKGLEWVGYIRPSTGYTEYNQKFKDRFTISADTSKNTAYLQMNSLRAEDTAVYYCARSRWLLDYWGQGTLVTVSLEDLKNVFPPEVAVFEPSEAEISHTQKATLVCLATGFYPDHVELSWWVNGKEVHSGVSTDPQPLKEQPALNDSRYCLSSRLRVSATFWQNPRNHFRCQVQFYGLSENDEWTQDRAKPVTQIVSAEAWGRADCGFTSESYQQGVLSATILYEILLGKATLYAVLVSALVLMAMVKRKDSRG

SEQ ID NO: 21179 - protein, 442 aa, Artificial Sequence
  Synthetic Polypeptide
MDWIWRILFLVGAATGAHSFEDIQMTQSPSSLSASVGDRVTITCKSSQSLLYSSNQKNYLAWFQQKPGKAPKLLIYWASTRESGVPSRFSGSGSGTDFTLTISSLQPEDFATYFCHQYLSSYTFGQGTKVEIKRTRIQNPDPAVYQLRDSKSSDKSVCLFTDFDSQTNVSQSKDSDVYITDKTVLDMRSMDFKSNSAVAWSNKSDFACANAFNNSIIPEDTFFPSPESSCDVKLVEKSFETDTNLNFQNLSVIGFRILLLKVAGFNLLMTLRLWSSRAKRSGSGVKQTLNFDLLKLAGDVESNPGPSRGHMAKPLSQEESTLIERATATINSIPISEDYSVASAALSSDGRIFTGVNVYHFTGGPCAELVVLGTAAAAAAGNLTCIVAIGNENRGILSPCGRCRQVLLDLHPGIKAIVKDSDGQPTAVGIRELLPSGYVWEG

SEQ ID NO: 21180 - protein, 276 aa, Artificial Sequence
  Synthetic Polypeptide
MDWIWRILFLVGAATGAHSFEDIQMTQSPSSLSASVGDRVTITCKSSQSLLYSSNQKNYLAWFQQKPGKAPKLLIYWASTRESGVPSRFSGSGSGTDFTLTISSLQPEDFATYFCHQYLSSYTFGQGTKVEIKRTRIQNPDPAVYQLRDSKSSDKSVCLFTDFDSQTNVSQSKDSDVYITDKTVLDMRSMDFKSNSAVAWSNKSDFACANAFNNSIIPEDTFFPSPESSCDVKLVEKSFETDTNLNFQNLSVIGFRILLLKVAGFNLLMTLRLWSS

SEQ ID NO: 21181 - protein, 564 aa, Artificial Sequence
  Synthetic Polypeptide
MALPVTALLLPLALLLHAARPEVQLVESGGGLVQPGGSLRLSCAASGYTFTTYWMHWVRQAPGKGLEWVGYIRPSTGYTEYNQKFKDRFTISADTSKNTAYLQMNSLRAEDTAVYYCARSRWLLDYWGQGTLVTVSLEGKPIPNPLLGLDSTGSGEDLKNVFPPEVAVFEPSEAEISHTQKATLVCLATGFYPDHVELSWWVNGKEVHSGVCTDPQPLKEQPALNDSRYCLSSRLRVSATFWQNPRNHFRCQVQFYGLSENDEWTQDRAKPVTQIVSAEAWGRADCGFTSESYQQGVLSATILYEILLGKATLYAVLVSALVLMAMVKRKDSRGRAKRSGSGATNFSLLKQAGDVEENPGPTRGHMTEYKPTVRLATRDDVPRAVRTLAAAFADYPATRHTVDPDRHIERVTELQELFLTRVGLDIGKVWVADDGAAVAVWTTPESVEAGAVFAEIGPRMAELSGSRLAAQQQMEGLLAPHRPKEPAWFLATVGVSPDHQGKGLGSAVVLPGVEAAERAGVPAFLETSAPRNLPFYERLGFTVTADVEVPEGPRTWCMTRKPGA

SEQ ID NO: 21182 - protein, 334 aa, Artificial Sequence
  Synthetic Polypeptide
MALPVTALLLPLALLLHAARPEVQLVESGGGLVQPGGSLRLSCAASGYTFTTYWMHWVRQAPGKGLEWVGYIRPSTGYTEYNQKFKDRFTISADTSKNTAYLQMNSLRAEDTAVYYCARSRWLLDYWGQGTLVTVSLEGKPIPNPLLGLDSTGSGEDLKNVFPPEVAVFEPSEAEISHTQKATLVCLATGFYPDHVELSWWVNGKEVHSGVCTDPQPLKEQPALNDSRYCLSSRLRVSATFWQNPRNHFRCQVQFYGLSENDEWTQDRAKPVTQIVSAEAWGRADCGFTSESYQQGVLSATILYEILLGKATLYAVLVSALVLMAMVKRKDSRG

SEQ ID NO: 21183 - protein, 454 aa, Artificial Sequence
  Synthetic Polypeptide
MDWIWRILFLVGAATGAHSFEDIQMTQSPSSLSASVGDRVTITCKSSQSLLYSSNQKNYLAWFQQKPGKAPKLLIYWASTRESGVPSRFSGSGSGTDFTLTISSLQPEDFATYFCHQYLSSYTFGQGTKVEIKRTREQKLISEEDGSGIQNPDPAVYQLRDSKSSDKSVCLFTDFDSQTNVSQSKDSDVYITDKCVLDMRSMDFKSNSAVAWSNKSDFACANAFNNSIIPEDTFFPSPESSCDVKLVEKSFETDTNLNFQNLSVIGFRILLLKVAGFNLLMTLRLWSSRAKRSGSGVKQTLNFDLLKLAGDVESNPGPSRGHMAKPLSQEESTLIERATATINSIPISEDYSVASAALSSDGRIFTGVNVYHFTGGPCAELVVLGTAAAAAAGNLTCIVAIGNENRGILSPCGRCRQVLLDLHPGIKAIVKDSDGQPTAVGIRELLPSGYVWEG

SEQ ID NO: 21184 - protein, 288 aa, Artificial Sequence
  Synthetic Polypeptide
MDWIWRILFLVGAATGAHSFEDIQMTQSPSSLSASVGDRVTITCKSSQSLLYSSNQKNYLAWFQQKPGKAPKLLIYWASTRESGVPSRFSGSGSGTDFTLTISSLQPEDFATYFCHQYLSSYTFGQGTKVEIKRTREQKLISEEDGSGIQNPDPAVYQLRDSKSSDKSVCLFTDFDSQTNVSQSKDSDVYITDKCVLDMRSMDFKSNSAVAWSNKSDFACANAFNNSIIPEDTFFPSPESSCDVKLVEKSFETDTNLNFQNLSVIGFRILLLKVAGFNLLMTLRLWSS

SEQ ID NO: 21185 - protein, 642 aa, Artificial Sequence
  Synthetic Polypeptide
MALPVTALLLPLALLLHAARPEVQLVESGGGLVQPGGSLRLSCAASGYTFTTYWMHWVRQAPGKGLEWVGYIRPSTGYTEYNQKFKDRFTISADTSKNTAYLQMNSLRAEDTAVYYCARSRWLLDYWGQGTLVTVSGGGGSGGGGSGGGGSDIQMTQSPSSLSASVGDRVTITCKSSQSLLYSSNQKNYLAWFQQKPGKAPKLLIYWASTRESGVPSRFSGSGSGTDFTLTISSLQPEDFATYFCHQYLSSYTFGQGTKVEIKRTRGSGIQNPDPAVYQLRDSKSSDKSVCLFTDFDSQTNVSQSKDSDVYITDKTVLDMRSMDFKSNSAVAWSNKSDFACANAFNNSIIPEDTFFPSSDVPCDVKLVEKSFETDTNLNFQNLSVIGFRILLLKVAGFNLLMTLRLWSSRAKRSGSGVKQTLNFDLLKLAGDVESNPGPSRGHMTEYKPTVRLATRDDVPRAVRTLAAAFADYPATRHTVDPDRHIERVTELQELFLTRVGLDIGKVWVADDGAAVAVWTTPESVEAGAVFAEIGPRMAELSGSRLAAQQQMEGLLAPHRPKEPAWFLATVGVSPDHQGKGLGSAVVLPGVEAAERAGVPAFLETSAPRNLPFYERLGFTVTADVEVPEGPRTWCMTRKPGA

SEQ ID NO: 21186 - protein, 674 aa, Artificial Sequence
  Synthetic Polypeptide
MALPVTALLLPLALLLHAARPEVQLVESGGGLVQPGGSLRLSCAASGYTFTTYWMHWVRQAPGKGLEWVGYIRPSTGYTEYNQKFKDRFTISADTSKNTAYLQMNSLRAEDTAVYYCARSRWLLDYWGQGTLVTVSGGGGSGGGGSGGGGSDIQMTQSPSSLSASVGDRVTITCKSSQSLLYSSNQKNYLAWFQQKPGKAPKLLIYWASTRESGVPSRFSGSGSGTDFTLTISSLQPEDFATYFCHQYLSSYTFGQGTKVEIKRLEDLKNVFPPEVAVFEPSKAEIAHTQKATLVCLATGFYPDHVELSWWVNGKEVHSGVSTDPQPLKEQPALNDSRYCLSSRLRVSATFWQNPRNHFRCQVQFYGLSENDEWTQDRAKPVTQIVSAEAWGRADCGITSASYHQGVLSATILYEILLGKATLYAVLVSALVLMAMVKRKDSRGRAKRSGSGATNFSLLKQAGDVEENPGPTRGHMTEYKPTVRLATRDDVPRAVRTLAAAFADYPATRHTVDPDRHIERVTELQELFLTRVGLDIGKVWVADDGAAVAVWTTPESVEAGAVFAEIGPRMAELSGSRLAAQQQMEGLLAPHRPKEPAWFLATVGVSPDHQGKGLGSAVVLPGVEAAERAGVPAFLETSAPRNLPFYERLGFTVTADVEVPEGPRTWCMTRKPGA

SEQ ID NO: 21187 - protein, 697 aa, Artificial Sequence
  Synthetic Polypeptide
MALPVTALLLPLALLLHAARPEVQLVESGGGLVQPGGSLRLSCAASGYTFTTYWMHWVRQAPGKGLEWVGYIRPSTGYTEYNQKFKDRFTISADTSKNTAYLQMNSLRAEDTAVYYCARSRWLLDYWGQGTLVTVSGGGGSGGGGSGGGGSDIQMTQSPSSLSASVGDRVTITCKSSQSLLYSSNQKNYLAWFQQKPGKAPKLLIYWASTRESGVPSRFSGSGSGTDFTLTISSLQPEDFATYFCHQYLSSYTFGQGTKVEIKRTRGSGGGGSGGGGSGDGNEEMGGITQTPYKVSISGTTVILTCPQYPGSEILWQHNDKNIGGDEDDKNIGSDEDHLSLKEFSELEQSGYYVCYPRGSKPEDANFYLYLRARVCENCMEMDVMSVATIVIVDICITGGLLLLVYYWSKNRKAKAKPVTRGAGAGGRQRGQNKERPPPVPNPDYEPIRKGQRDLYSGLNQRRIRAKRSGSGVKQTLNFDLLKLAGDVESNPGPSRGHMTEYKPTVRLATRDDVPRAVRTLAAAFADYPATRHTVDPDRHIERVTELQELFLTRVGLDIGKVWVADDGAAVAVWTTPESVEAGAVFAEIGPRMAELSGSRLAAQQQMEGLLAPHRPKEPAWFLATVGVSPDHQGKGLGSAVVLPGVEAAERAGVPAFLETSAPRNLPFYERLGFTVTADVEVPEGPRTWCMTRKPGA

SEQ ID NO: 21188 - protein, 662 aa, Artificial Sequence
  Synthetic Polypeptide
MALPVTALLLPLALLLHAARPEVQLVESGGGLVQPGGSLRLSCAASGYTFTTYWMHWVRQAPGKGLEWVGYIRPSTGYTEYNQKFKDRFTISADTSKNTAYLQMNSLRAEDTAVYYCARSRWLLDYWGQGTLVTVSGGGGSGGGGSGGGGSDIQMTQSPSSLSASVGDRVTITCKSSQSLLYSSNQKNYLAWFQQKPGKAPKLLIYWASTRESGVPSRFSGSGSGTDFTLTISSLQPEDFATYFCHQYLSSYTFGQGTKVEIKRTRGSGGGGSGGGGSGFKIPIEELEDRVFVNCNTSITWVEGTVGTLLSDITRLDLGKRILDPRGIYRCNGTDIYKDKESTVQVHYRMCQSCVELDPATVAGIIVTDVIATLLLALGVFCFAGHETGRLSGAADTQALLRNDQVYQPLRDRDDAQYSHLGGNWARNKRAKRSGSGVKQTLNFDLLKLAGDVESNPGPSRGHMTEYKPTVRLATRDDVPRAVRTLAAAFADYPATRHTVDPDRHIERVTELQELFLTRVGLDIGKVWVADDGAAVAVWTTPESVEAGAVFAEIGPRMAELSGSRLAAQQQMEGLLAPHRPKEPAWFLATVGVSPDHQGKGLGSAVVLPGVEAAERAGVPAFLETSAPRNLPFYERLGFTVTADVEVPEGPRTWCMTRKPGA

SEQ ID NO: 21189 - protein, 672 aa, Artificial Sequence
  Synthetic Polypeptide
MALPVTALLLPLALLLHAARPEVQLVESGGGLVQPGGSLRLSCAASGYTFTTYWMHWVRQAPGKGLEWVGYIRPSTGYTEYNQKFKDRFTISADTSKNTAYLQMNSLRAEDTAVYYCARSRWLLDYWGQGTLVTVSGGGGSGGGGSGGGGSDIQMTQSPSSLSASVGDRVTITCKSSQSLLYSSNQKNYLAWFQQKPGKAPKLLIYWASTRESGVPSRFSGSGSGTDFTLTISSLQPEDFATYFCHQYLSSYTFGQGTKVEIKRTRGSGGGGSGGGGSGQSIKGNHLVKVYDYQEDGSVLLTCDAEAKNITWFKDGKMIGFLTEDKKKWNLGSNAKDPRGMYQCKGSQNKSKPLQVYYRMCQNCIELNAATISGFLFAEIVSIFVLAVGVYFIAGQDGVRQSRASDKQTLLPNDQLYQPLKDREDDQYSHLQGNQLRRNRAKRSGSGVKQTLNFDLLKLAGDVESNPGPSRGHMTEYKPTVRLATRDDVPRAVRTLAAAFADYPATRHTVDPDRHIERVTELQELFLTRVGLDIGKVWVADDGAAVAVWTTPESVEAGAVFAEIGPRMAELSGSRLAAQQQMEGLLAPHRPKEPAWFLATVGVSPDHQGKGLGSAVVLPGVEAAERAGVPAFLETSAPRNLPFYERLGFTVTADVEVPEGPRTWCMTRKPGA

SEQ ID NO: 21190 - protein, 655 aa, Artificial Sequence
  Synthetic Polypeptide
MALPVTALLLPLALLLHAARPEVQLVESGGGLVQPGGSLRLSCAASGYTFTTYWMHWVRQAPGKGLEWVGYIRPSTGYTEYNQKFKDRFTISADTSKNTAYLQMNSLRAEDTAVYYCARSRWLLDYWGQGTLVTVSGGGGSGGGGSGGGGSDIQMTQSPSSLSASVGDRVTITCKSSQSLLYSSNQKNYLAWFQQKPGKAPKLLIYWASTRESGVPSRFSGSGSGTDFTLTISSLQPEDFATYFCHQYLSSYTFGQGTKVEIKRTRGSGGGGSGGGGSGQSFGLLDPKLCYLLDGILFIYGVILTALFLRVKFSRSADAPAYQQGQNQLYNELNLGRREEYDVLDKRRGRDPEMGGKPQRRKNPQEGLYNELQKDKMAEAYSEIGMKGERRRGKGHDGLYQGLSTATKDTYDALHMQALPPRRAKRSGSGVKQTLNFDLLKLAGDVESNPGPSRGHMTEYKPTVRLATRDDVPRAVRTLAAAFADYPATRHTVDPDRHIERVTELQELFLTRVGLDIGKVWVADDGAAVAVWTTPESVEAGAVFAEIGPRMAELSGSRLAAQQQMEGLLAPHRPKEPAWFLATVGVSPDHQGKGLGSAVVLPGVEAAERAGVPAFLETSAPRNLPFYERLGFTVTADVEVPEGPRTWCMTRKPGA

SEQ ID NO: 21191 - protein, 756 aa, Artificial Sequence
  Synthetic Polypeptide
MALPVTALLLPLALLLHAARPEVQLVESGGGLVQPGGSLRLSCAASGFSFSDFWMSWVRQAPGKGLEWVATISQAGSEKDYVDSVKGRFTISRDNAKKSLYLQMNSLRAEDTAVYYCASGVYSFDYRGQGTLVTVSSGTGGGGSGGGGSGGGGSEFEVQLVESGGGLVQPGGSLRLSCAASGYTFTTYWMHWVRQAPGKGLEWVGYIRPSTGYTEYNQKFKDRFTISADTSKNTAYLQMNSLRAEDTAVYYCARSRWLLDYWGQGTLVTVSLEDLKNVFPPEVAVFEPSEAEISHTQKATLVCLATGFYPDHVELSWWVNGKEVHSGVCTDPQPLKEQPALNDSRYCLSSRLRVSATFWQNPRNHFRCQVQFYGLSENDEWTQDRAKPVTQIVSAEAWGRADCGFTSESYQQGVLSATILYEILLGKATLYAVLVSALVLMAMVKRKDSRGRAKRSGSGATNFSLLKQAGDVEENPGPTSMDWIWRILFLVGAATGAHSFEDIQMTQSPSSLSASVGDRVTITCKSSQSLLYSSNQKNYLAWFQQKPGKAPKLLIYWASTRESGVPSRFSGSGSGTDFTLTISSLQPEDFATYFCHQYLSSYTFGQGTKVEIKRTRIQNPDPAVYQLRDSKSSDKSVCLFTDFDSQTNVSQSKDSDVYITDKCVLDMRSMDFKSNSAVAWSNKSDFACANAFNNSIIPEDTFFPSPESSCDVKLVEKSFETDTNLNFQNLSVIGFRILLLKVAGFNLLMTLRLWSS

SEQ ID NO: 21192 - protein, 760 aa, Artificial Sequence
  Synthetic Polypeptide
MALPVTALLLPLALLLHAARPEVQLVESGGGLVQPGGSLRLSCAASGFSFSDFWMSWVRQAPGKGLEWVATISQAGSEKDYVDSVKGRFTISRDNAKKSLYLQMNSLRAEDTAVYYCASGVYSFDYRGQGTLVTVSSGTGGGGSGGGGSGGGGSEFEVQLVESGGGLVQPGGSLRLSCAASGYTFTTYWMHWVRQAPGKGLEWVGYIRPSTGYTEYNQKFKDRFTISADTSKNTAYLQMNSLRAEDTAVYYCARSRWLLDYWGQGTLVTVSLEIQNPDPAVYQLRDSKSSDKSVCLFTDFDSQTNVSQSKDSDVYITDKCVLDMRSMDFKSNSAVAWSNKSDFACANAFNNSIIPEDTFFPSPESSCDVKLVEKSFETDTNLNFQNLSVIGFRILLLKVAGFNLLMTLRLWSSRAKRSGSGVKQTLNFDLLKLAGDVESNPGPTSMDWIWRILFLVGAATGAHSFEDIQMTQSPSSLSASVGDRVTITCKSSQSLLYSSNQKNYLAWFQQKPGKAPKLLIYWASTRESGVPSRFSGSGSGTDFTLTISSLQPEDFATYFCHQYLSSYTFGQGTKVEIKRTREDLKNVFPPEVAVFEPSEAEISHTQKATLVCLATGFYPDHVELSWWVNGKEVHSGVCTDPQPLKEQPALNDSRYCLSSRLRVSATFWQNPRNHFRCQVQFYGLSENDEWTQDRAKPVTQIVSAEAWGRADCGFTSESYQQGVLSATILYEILLGKATLYAVLVSALVLMAMVKRKDSRG

SEQ ID NO: 21193 - protein, 952 aa, Artificial Sequence
  Synthetic Polypeptide
MALPVTALLLPLALLLHAARPEVQLVESGGGLVQPGGSLRLSCAASGFSFSDFWMSWVRQAPGKGLEWVATISQAGSEKDYVDSVKGRFTISRDNAKKSLYLQMNSLRAEDTAVYYCASGVYSFDYRGQGTLVTVSSGTGGGGSGGGGSGGGGSEFEVQLVESGGGLVQPGGSLRLSCAASGYTFTTYWMHWVRQAPGKGLEWVGYIRPSTGYTEYNQKFKDRFTISADTSKNTAYLQMNSLRAEDTAVYYCARSRWLLDYWGQGTLVTVSLEDLKNVFPPEVAVFEPSEAEISHTQKATLVCLATGFYPDHVELSWWVNGKEVHSGVSTDPQPLKEQPALNDSRYCLSSRLRVSATFWQNPRNHFRCQVQFYGLSENDEWTQDRAKPVTQIVSAEAWGRADCGSQSFGLLDPKLCYLLDGILFIYGVILTALFLRVKFSRSADAPAYQQGQNQLYNELNLGRREEYDVLDKRRGRDPEMGGKPQRRKNPQEGLYNELQKDKMAEAYSEIGMKGERRRGKGHDGLYQGLSTATKDTYDALHMQALPPRRAKRSGSGATNFSLLKQAGDVEENPGPTSMDWIWRILFLVGAATGAHSFEDIQMTQSPSSLSASVGDRVTITCKSSQSLLYSSNQKNYLAWFQQKPGKAPKLLIYWASTRESGVPSRFSGSGSGTDFTLTISSLQPEDFATYFCHQYLSSYTFGQGTKVEIKRTRIQNPDPAVYQLRDSKSSDKSVCLFTDFDSQTNVSQSKDSDVYITDKTVLDMRSMDFKSNSAVAWSNKSDFACANAFNNSIIPEDTFFPSPESSCGTQSFGLLDPKLCYLLDGILFIYGVILTALFLRVKFSRSADAPAYQQGQNQLYNELNLGRREEYDVLDKRRGRDPEMGGKPQRRKNPQEGLYNELQKDKMAEAYSEIGMKGERRRGKGHDGLYQGLSTATKDTYDALHMQALPPR

SEQ ID NO: 21194 - protein, 782 aa, Artificial Sequence
  Synthetic Polypeptide
MALPVTALLLPLALLLHAARPEVQLVESGGGLVQPGGSLRLSCAASGFSFSDFWMSWVRQAPGKGLEWVATISQAGSEKDYVDSVKGRFTISRDNAKKSLYLQMNSLRAEDTAVYYCASGVYSFDYRGQGTLVTVSSGTGGGGSGGGGSGGGGSEFEVQLVESGGGLVQPGGSLRLSCAASGYTFTTYWMHWVRQAPGKGLEWVGYIRPSTGYTEYNQKFKDRFTISADTSKNTAYLQMNSLRAEDTAVYYCARSRWLLDYWGQGTLVTVSLEGQPKANPTVTLFPPSSEELQANKATLVCLISDFYPGAVTVAWKADGSPVKAGVETTKPSKQSNNKYAASSYLSLTPEQWKSHRSYSCQVTHEGSTVEKTVAPTECSPIKTDVITMDPKDNCSKDANDTLLLQLTNTSAYYMYLLLLLKSVVYFAIITCCLLRRTAFCCNGEKSRAKRSGSGATNFSLLKQAGDVEENPGPTSMDWIWRILFLVGAATGAHSFEDIQMTQSPSSLSASVGDRVTITCKSSQSLLYSSNQKNYLAWFQQKPGKAPKLLIYWASTRESGVPSRFSGSGSGTDFTLTISSLQPEDFATYFCHQYLSSYTFGQGTKVEIKRTRASTKGPSVFPLAPSSKSTSGGTAALGCLVKDYFPEPVTVSWNSGALTSGVHTFPAVLQSSGLYSLSSVVTVPSSSLGTQTYICNVNHKPSNTKVDKRVEPKSCEVKTDSTDHVKPKETENTKQPSKSCHKPKAIVHTEKVNMMSLTVLGLRMLFAKTVAVNFLLTAKLFFL

SEQ ID NO: 21195 - protein, 763 aa, Artificial Sequence
  Synthetic Polypeptide
MALPVTALLLPLALLLHAARPEVQLVESGGGLVQPGGSLRLSCAASGFSFSDFWMSWVRQAPGKGLEWVATISQAGSEKDYVDSVKGRFTISRDNAKKSLYLQMNSLRAEDTAVYYCASGVYSFDYRGQGTLVTVSSGTGGGGSGGGGSGGGGSEFEVQLVESGGGLVQPGGSLRLSCAASGYTFTTYWMHWVRQAPGKGLEWVGYIRPSTGYTEYNQKFKDRFTISADTSKNTAYLQMNSLRAEDTAVYYCARSRWLLDYWGQGTLVTVSLEGQPKANPTVTLFPPSSEELQANKATLVCLISDFYPGAVTVAWKADGSPVKAGVETTKPSKQSNNKYAASSYLSLTPEQWKSHRSYSCQVTHEGSTVEKTVAPTECSGRADCGFTSESYQQGVLSATILYEILLGKATLYAVLVSALVLMAMVKRKDSRGRAKRSGSGVKQTLNFDLLKLAGDVESNPGPTSMDWIWRILFLVGAATGAHSFEDIQMTQSPSSLSASVGDRVTITCKSSQSLLYSSNQKNYLAWFQQKPGKAPKLLIYWASTRESGVPSRFSGSGSGTDFTLTISSLQPEDFATYFCHQYLSSYTFGQGTKVEIKRTRASTKGPSVFPLAPSSKSTSGGTAALGCLVKDYFPEPVTVSWNSGALTSGVHTFPAVLQSSGLYSLSSVVTVPSSSLGTQTYICNVNHKPSNTKVDKRVEPKSCIPEDTFFPSPESSCDVKLVEKSFETDTNLNFQNLSVIGFRILLLKVAGFNLLMTLRLWSS

SEQ ID NO: 21196 - protein, 897 aa, Artificial Sequence
  Synthetic Polypeptide
MALPVTALLLPLALLLHAARPEVQLVESGGGLVQPGGSLRLSCAASGFSFSDFWMSWVRQAPGKGLEWVATISQAGSEKDYVDSVKGRFTISRDNAKKSLYLQMNSLRAEDTAVYYCASGVYSFDYRGQGTLVTVSSGTGGGGSGGGGSGGGGSEFEVQLVESGGGLVQPGGSLRLSCAASGYTFTTYWMHWVRQAPGKGLEWVGYIRPSTGYTEYNQKFKDRFTISADTSKNTAYLQMNSLRAEDTAVYYCARSRWLLDYWGQGTLVTVSLEIQNPDPAVYQLRDSKSSDKSVCLFTDFDSQTNVSQSKDSDVYITDKCVLDMRSMDFKSNSAVAWSNKSDFACANAFNNSIIPEDTFFPSPESSCDVKLVEKSFETDTNLNFQNLSVIGFRILLLKVAGFNLLMTLRLWSSRAKRSGSGVKQTLNFDLLKLAGDVESNPGPTSMDWIWRILFLVGAATGAHSGPQLQLQESGPGLVKPSETLSLTCTVSGDSISSGDYYWGWIRQPPGKGLEWIGHIYYSGVTYYNPSLKSRVTISVDTSRNQFSLKLSSVTAADTAVYYCTREDSSNWRSRGQGTLVTVSSGSGGGGSGGGGSGGGGSFEDIQMTQSPSSLSASVGDRVTITCKSSQSLLYSSNQKNYLAWFQQKPGKAPKLLIYWASTRESGVPSRFSGSGSGTDFTLTISSLQPEDFATYFCHQYLSSYTFGQGTKVEIKRTREDLKNVFPPEVAVFEPSEAEISHTQKATLVCLATGFYPDHVELSWWVNGKEVHSGVCTDPQPLKEQPALNDSRYCLSSRLRVSATFWQNPRNHFRCQVQFYGLSENDEWTQDRAKPVTQIVSAEAWGRADCGFTSESYQQGVLSATILYEILLGKATLYAVLVSALVLMAMVKRKDSRG

SEQ ID NO: 21197 - protein, 1089 aa, Artificial Sequence
  Synthetic Polypeptide
MALPVTALLLPLALLLHAARPEVQLVESGGGLVQPGGSLRLSCAASGFSFSDFWMSWVRQAPGKGLEWVATISQAGSEKDYVDSVKGRFTISRDNAKKSLYLQMNSLRAEDTAVYYCASGVYSFDYRGQGTLVTVSSGTGGGGSGGGGSGGGGSEFEVQLVESGGGLVQPGGSLRLSCAASGYTFTTYWMHWVRQAPGKGLEWVGYIRPSTGYTEYNQKFKDRFTISADTSKNTAYLQMNSLRAEDTAVYYCARSRWLLDYWGQGTLVTVSLEDLKNVFPPEVAVFEPSEAEISHTQKATLVCLATGFYPDHVELSWWVNGKEVHSGVSTDPQPLKEQPALNDSRYCLSSRLRVSATFWQNPRNHFRCQVQFYGLSENDEWTQDRAKPVTQIVSAEAWGRADCGSQSFGLLDPKLCYLLDGILFIYGVILTALFLRVKFSRSADAPAYQQGQNQLYNELNLGRREEYDVLDKRRGRDPEMGGKPQRRKNPQEGLYNELQKDKMAEAYSEIGMKGERRRGKGHDGLYQGLSTATKDTYDALHMQALPPRRAKRSGSGATNFSLLKQAGDVEENPGPTSMDWIWRILFLVGAATGAHSGPQLQLQESGPGLVKPSETLSLTCTVSGDSISSGDYYWGWIRQPPGKGLEWIGHIYYSGVTYYNPSLKSRVTISVDTSRNQFSLKLSSVTAADTAVYYCTREDSSNWRSRGQGTLVTVSSGSGGGGSGGGGSGGGGSFEDIQMTQSPSSLSASVGDRVTITCKSSQSLLYSSNQKNYLAWFQQKPGKAPKLLIYWASTRESGVPSRFSGSGSGTDFTLTISSLQPEDFATYFCHQYLSSYTFGQGTKVEIKRTRIQNPDPAVYQLRDSKSSDKSVCLFTDFDSQTNVSQSKDSDVYITDKTVLDMRSMDFKSNSAVAWSNKSDFACANAFNNSIIPEDTFFPSPESSCGTQSFGLLDPKLCYLLDGILFIYGVILTALFLRVKFSRSADAPAYQQGQNQLYNELNLGRREEYDVLDKRRGRDPEMGGKPQRRKNPQEGLYNELQKDKMAEAYSEIGMKGERRRGKGHDGLYQGLSTATKDTYDALHMQALPPR

SEQ ID NO: 21198 - protein, 919 aa, Artificial Sequence
  Synthetic Polypeptide
MALPVTALLLPLALLLHAARPEVQLVESGGGLVQPGGSLRLSCAASGFSFSDFWMSWVRQAPGKGLEWVATISQAGSEKDYVDSVKGRFTISRDNAKKSLYLQMNSLRAEDTAVYYCASGVYSFDYRGQGTLVTVSSGTGGGGSGGGGSGGGGSEFEVQLVESGGGLVQPGGSLRLSCAASGYTFTTYWMHWVRQAPGKGLEWVGYIRPSTGYTEYNQKFKDRFTISADTSKNTAYLQMNSLRAEDTAVYYCARSRWLLDYWGQGTLVTVSLEGQPKANPTVTLFPPSSEELQANKATLVCLISDFYPGAVTVAWKADGSPVKAGVETTKPSKQSNNKYAASSYLSLTPEQWKSHRSYSCQVTHEGSTVEKTVAPTECSPIKTDVITMDPKDNCSKDANDTLLLQLTNTSAYYMYLLLLLKSVVYFAIITCCLLRRTAFCCNGEKSRAKRSGSGATNFSLLKQAGDVEENPGPTSMDWIWRILFLVGAATGAHSGPQLQLQESGPGLVKPSETLSLTCTVSGDSISSGDYYWGWIRQPPGKGLEWIGHIYYSGVTYYNPSLKSRVTISVDTSRNQFSLKLSSVTAADTAVYYCTREDSSNWRSRGQGTLVTVSSGSGGGGSGGGGSGGGGSFEDIQMTQSPSSLSASVGDRVTITCKSSQSLLYSSNQKNYLAWFQQKPGKAPKLLIYWASTRESGVPSRFSGSGSGTDFTLTISSLQPEDFATYFCHQYLSSYTFGQGTKVEIKRTRASTKGPSVFPLAPSSKSTSGGTAALGCLVKDYFPEPVTVSWNSGALTSGVHTFPAVLQSSGLYSLSSVVTVPSSSLGTQTYICNVNHKPSNTKVDKRVEPKSCEVKTDSTDHVKPKETENTKQPSKSCHKPKAIVHTEKVNMMSLTVLGLRMLFAKTVAVNFLLTAKLFFL

SEQ ID NO: 21199 - protein, 900 aa, Artificial Sequence
  Synthetic Polypeptide
MALPVTALLLPLALLLHAARPEVQLVESGGGLVQPGGSLRLSCAASGFSFSDFWMSWVRQAPGKGLEWVATISQAGSEKDYVDSVKGRFTISRDNAKKSLYLQMNSLRAEDTAVYYCASGVYSFDYRGQGTLVTVSSGTGGGGSGGGGSGGGGSEFEVQLVESGGGLVQPGGSLRLSCAASGYTFTTYWMHWVRQAPGKGLEWVGYIRPSTGYTEYNQKFKDRFTISADTSKNTAYLQMNSLRAEDTAVYYCARSRWLLDYWGQGTLVTVSLEGQPKANPTVTLFPPSSEELQANKATLVCLISDFYPGAVTVAWKADGSPVKAGVETTKPSKQSNNKYAASSYLSLTPEQWKSHRSYSCQVTHEGSTVEKTVAPTECSGRADCGFTSESYQQGVLSATILYEILLGKATLYAVLVSALVLMAMVKRKDSRGRAKRSGSGVKQTLNFDLLKLAGDVESNPGPTSMDWIWRILFLVGAATGAHSGPQLQLQESGPGLVKPSETLSLTCTVSGDSISSGDYYWGWIRQPPGKGLEWIGHIYYSGVTYYNPSLKSRVTISVDTSRNQFSLKLSSVTAADTAVYYCTREDSSNWRSRGQGTLVTVSSGSGGGGSGGGGSGGGGSFEDIQMTQSPSSLSASVGDRVTITCKSSQSLLYSSNQKNYLAWFQQKPGKAPKLLIYWASTRESGVPSRFSGSGSGTDFTLTISSLQPEDFATYFCHQYLSSYTFGQGTKVEIKRTRASTKGPSVFPLAPSSKSTSGGTAALGCLVKDYFPEPVTVSWNSGALTSGVHTFPAVLQSSGLYSLSSVVTVPSSSLGTQTYICNVNHKPSNTKVDKRVEPKSCIPEDTFFPSPESSCDVKLVEKSFETDTNLNFQNLSVIGFRILLLKVAGFNLLMTLRLWSS

SEQ ID NO: 21200 - protein, 757 aa, Artificial Sequence
  Synthetic Polypeptide
MALPVTALLLPLALLLHAARPEVQVLESGGGLVQPGGSLRLSCAASGFTFSNFAMSWVRQAPGKGLEWVSTISGSAGTTDYADSVKGRFTISRDNSKKTLYLQMNSLRVEDTAVYYCADGRGPFFDYRGQGTLVTVSSGTGGGGSGGGGSGGGGSEFEVQLVESGGGLVQPGGSLRLSCAASGYTFTTYWMHWVRQAPGKGLEWVGYIRPSTGYTEYNQKFKDRFTISADTSKNTAYLQMNSLRAEDTAVYYCARSRWLLDYWGQGTLVTVSLEDLKNVFPPEVAVFEPSEAEISHTQKATLVCLATGFYPDHVELSWWVNGKEVHSGVCTDPQPLKEQPALNDSRYCLSSRLRVSATFWQNPRNHFRCQVQFYGLSENDEWTQDRAKPVTQIVSAEAWGRADCGFTSESYQQGVLSATILYEILLGKATLYAVLVSALVLMAMVKRKDSRGRAKRSGSGATNFSLLKQAGDVEENPGPTSMDWIWRILFLVGAATGAHSFEDIQMTQSPSSLSASVGDRVTITCKSSQSLLYSSNQKNYLAWFQQKPGKAPKLLIYWASTRESGVPSRFSGSGSGTDFTLTISSLQPEDFATYFCHQYLSSYTFGQGTKVEIKRTRIQNPDPAVYQLRDSKSSDKSVCLFTDFDSQTNVSQSKDSDVYITDKCVLDMRSMDFKSNSAVAWSNKSDFACANAFNNSIIPEDTFFPSPESSCDVKLVEKSFETDTNLNFQNLSVIGFRILLLKVAGFNLLMTLRLWSS

SEQ ID NO: 21201 - protein, 758 aa, Artificial Sequence
  Synthetic Polypeptide
MALPVTALLLPLALLLHAARPEVQLVESGGGLVQPGGSLRLSCAASGYTFTTYWMHWVRQAPGKGLEWVGYIRPSTGYTEYNQKFKDRFTISADTSKNTAYLQMNSLRAEDTAVYYCARSRWLLDYWGQGTLVTVSLEDLKNVFPPEVAVFEPSEAEISHTQKATLVCLATGFYPDHVELSWWVNGKEVHSGVCTDPQPLKEQPALNDSRYCLSSRLRVSATFWQNPRNHFRCQVQFYGLSENDEWTQDRAKPVTQIVSAEAWGRADCGFTSESYQQGVLSATILYEILLGKATLYAVLVSALVLMAMVKRKDSRGRAKRSGSGATNFSLLKQAGDVEENPGPTSMDWIWRILFLVGAATGAHSGPEVQLVESGGGLVQAGGSLRLSCAASGRTFSMGWFRQAPGKEREFVAAITYSGGSPYYADSVKGRFTISRDNAKNTVYLQMNSLKPEDTAVYYCAANPTYGSDWNAENWGQGTQVTVSSGSGGGGSGGGGSGGGGSFEDIQMTQSPSSLSASVGDRVTITCKSSQSLLYSSNQKNYLAWFQQKPGKAPKLLIYWASTRESGVPSRFSGSGSGTDFTLTISSLQPEDFATYFCHQYLSSYTFGQGTKVEIKRTRIQNPDPAVYQLRDSKSSDKSVCLFTDFDSQTNVSQSKDSDVYITDKCVLDMRSMDFKSNSAVAWSNKSDFACANAFNNSIIPEDTFFPSPESSCDVKLVEKSFETDTNLNFQNLSVIGFRILLLKVAGFNLLMTLRLWSS

SEQ ID NO: 21202 - protein, 885 aa, Artificial Sequence
  Synthetic Polypeptide
MALPVTALLLPLALLLHAARPEVQLVESGGGLVQPGGSLRLSCAASGYTFTTYWMHWVRQAPGKGLEWVGYIRPSTGYTEYNQKFKDRFTISADTSKNTAYLQMNSLRAEDTAVYYCARSRWLLDYWGQGTLVTVSLEDLKNVFPPEVAVFEPSEAEISHTQKATLVCLATGFYPDHVELSWWVNGKEVHSGVCTDPQPLKEQPALNDSRYCLSSRLRVSATFWQNPRNHFRCQVQFYGLSENDEWTQDRAKPVTQIVSAEAWGRADCGFTSESYQQGVLSATILYEILLGKATLYAVLVSALVLMAMVKRKDSRGRAKRSGSGATNFSLLKQAGDVEENPGPTSMDWIWRILFLVGAATGAHSQLQLQESGPGLVKPSETLSLTCTVSGGSISSGDYYWGWIRQPPGKGLEWIGSISYSGSTYYNPSLKSRVTISVDTSRNQFSLKLSSVTAADTAVYYCTREDSSNWRSRGQGTLVTVSSSGGGGSGGGGSEVQLVESGGGLVQAGGSLRLSCAASGRTFSMGWFRQAPGKEREFVAAITYSGGSPYYADSVKGRFTISRDNAKNTVYLQMNSLKPEDTAVYYCAANPTYGSDWNAENWGQGTQVTVSSGSGGGGSGGGGSGGGGSFEDIQMTQSPSSLSASVGDRVTITCKSSQSLLYSSNQKNYLAWFQQKPGKAPKLLIYWASTRESGVPSRFSGSGSGTDFTLTISSLQPEDFATYFCHQYLSSYTFGQGTKVEIKRTRIQNPDPAVYQLRDSKSSDKSVCLFTDFDSQTNVSQSKDSDVYITDKCVLDMRSMDFKSNSAVAWSNKSDFACANAFNNSIIPEDTFFPSPESSCDVKLVEKSFETDTNLNFQNLSVIGFRILLLKVAGFNLLMTLRLWSS

SEQ ID NO: 21203 - protein, 894 aa, Artificial Sequence
  Synthetic Polypeptide
MALPVTALLLPLALLLHAARPEVQVLESGGGLVQPGGSLRLSCAASGFTFSNFAMSWVRQAPGKGLEWVSTISGSAGTTDYADSVKGRFTISRDNSKKTLYLQMNSLRVEDTAVYYCADGRGPFFDYRGQGTLVTVSSGTGGGGSGGGGSGGGGSEFEVQLVESGGGLVQPGGSLRLSCAASGYTFTTYWMHWVRQAPGKGLEWVGYIRPSTGYTEYNQKFKDRFTISADTSKNTAYLQMNSLRAEDTAVYYCARSRWLLDYWGQGTLVTVSLEDLKNVFPPEVAVFEPSEAEISHTQKATLVCLATGFYPDHVELSWWVNGKEVHSGVCTDPQPLKEQPALNDSRYCLSSRLRVSATFWQNPRNHFRCQVQFYGLSENDEWTQDRAKPVTQIVSAEAWGRADCGFTSESYQQGVLSATILYEILLGKATLYAVLVSALVLMAMVKRKDSRGRAKRSGSGATNFSLLKQAGDVEENPGPTSMDWIWRILFLVGAATGAHSGPEVQLVESGGGLVQAGGSLRLSCAASGRTFSMGWFRQAPGKEREFVAAITYSGGSPYYASSVRGRFTISRDNAKNTVYLQMNSLKPEDTAVYYCAANPTYGSDWNAENWGQGTQVTVSSGSGGGGSGGGGSGGGGSFEDIQMTQSPSSLSASVGDRVTITCKSSQSLLYSSNQKNYLAWFQQKPGKAPKLLIYWASTRESGVPSRFSGSGSGTDFTLTISSLQPEDFATYFCHQYLSSYTFGQGTKVEIKRTRIQNPDPAVYQLRDSKSSDKSVCLFTDFDSQTNVSQSKDSDVYITDKCVLDMRSMDFKSNSAVAWSNKSDFACANAFNNSIIPEDTFFPSPESSCDVKLVEKSFETDTNLNFQNLSVIGFRILLLKVAGFNLLMTLRLWSS

SEQ ID NO: 21204 - protein, 722 aa, Artificial Sequence
  Synthetic Polypeptide
MALPVTALLLPLALLLHAARPDIQMTQSPSSLSASVGDRVTITCRASQDISNYLNWYQQKPGKAPKLLIYYTSRLHSGVPSRFSGSGSGTDFTLTISSLQPEDFATYYCQQGNTLPYTFGQGTKVEIKRGGGGSGGGGSGGGGSEVQLVESGGGLVQPGGSLRLSCAASGYTFSDYFMSWVRQAPGKGLEWVATISNGGTYTYYPDSVKGRFTISRDNSKNTLYLQMNSLRAEDTAVYYCARFDGYIFDYWGQGTLVTVSSTREQKLISEEDLAKPTTTPAPRPPTPAPTIASQPLSLRPEACRPAAGGAVHTRGLDFACDIYIWAPLAGTCGVLLLSLVITLYCKRGRKKLLYIFKQPFMRPVQTTQEEDGCSCRFPEEEEGGCELRVKFSRSADAPAYQQGQNQLYNELNLGRREEYDVLDKRRGRDPEMGGKPRRKNPQEGLYNELQKDKMAEAYSEIGMKGERRRGKGHDGLYQGLSTATKDTYDALHMQALPPRSSGSGEGRGSLLTCGDVEENPGPHMTEYKPTVRLATRDDVPRAVRTLAAAFADYPATRHTVDPDRHIERVTELQELFLTRVGLDIGKVWVADDGAAVAVWTTPESVEAGAVFAEIGPRMAELSGSRLAAQQQMEGLLAPHRPKEPAWFLATVGVSPDHQGKGLGSAVVLPGVEAAERAGVPAFLETSAPRNLPFYERLGFTVTADVEVPEGPRTWCMTRKPGA

SEQ ID NO: 21205 - protein, 716 aa, Artificial Sequence
  Synthetic Polypeptide
MALPVTALLLPLALLLHAARPDIQMTQSPSSLSASVGDRVTITCRASQDISNYLNWYQQKPGKAPKLLIYYTSRLHSGVPSRFSGSGSGTDFTLTISSLQPEDFATYYCQQGNTLPYTFGQGTKVEIKRGGGGSGGGGSGGGGSEVQLVESGGGLVQPGGSLRLSCAASGYTFSDYFMSWVRQAPGKGLEWVATISNGGTYTYYPDSVKGRFTISRDNSKNTLYLQMNSLRAEDTAVYYCARFDGYIFDYWGQGTLVTVSSTREQKLISEEDLKIEVMYPPPYLDNEKSNGTIIHVKGKHLCPSPLFPGPSKPFWVLVVVGGVLACYSLLVTVAFIIFWVRSKRSRLLHSDYMNMTPRRPGPTRKHYQPYAPPRDFAAYRSRVKFSRSADAPAYQQGQNQLYNELNLGRREEYDVLDKRRGRDPEMGGKPRRKNPQEGLYNELQKDKMAEAYSEIGMKGERRRGKGHDGLYQGLSTATKDTYDALHMQALPPRSSGSGEGRGSLLTCGDVEENPGPHMTEYKPTVRLATRDDVPRAVRTLAAAFADYPATRHTVDPDRHIERVTELQELFLTRVGLDIGKVWVADDGAAVAVWTTPESVEAGAVFAEIGPRMAELSGSRLAAQQQMEGLLAPHRPKEPAWFLATVGVSPDHQGKGLGSAVVLPGVEAAERAGVPAFLETSAPRNLPFYERLGFTVTADVEVPEGPRTWCMTRKPGA

SEQ ID NO: 21206 - protein, 493 aa, Artificial Sequence
  Synthetic Polypeptide
MALPVTALLLPLALLLHAARPDIQMTQSPSSLSASVGDRVTITCRASQDISNYLNWYQQKPGKAPKLLIYYTSRLHSGVPSRFSGSGSGTDFTLTISSLQPEDFATYYCQQGNTLPYTFGQGTKVEIKRGGGGSGGGGSGGGGSEVQLVESGGGLVQPGGSLRLSCAASGYTFSDYFMSWVRQAPGKGLEWVATISNGGTYTYYPDSVKGRFTISRDNSKNTLYLQMNSLRAEDTAVYYCARFDGYIFDYWGQGTLVTVSSTREQKLISEEDLKIEVMYPPPYLDNEKSNGTIIHVKGKHLCPSPLFPGPSKPFWVLVVVGGVLACYSLLVTVAFIIFWVRSKRSRLLHSDYMNMTPRRPGPTRKHYQPYAPPRDFAAYRSRVKFSRSADAPAYQQGQNQLYNELNLGRREEYDVLDKRRGRDPEMGGKPRRKNPQEGLYNELQKDKMAEAYSEIGMKGERRRGKGHDGLYQGLSTATKDTYDALHMQALPPR

SEQ ID NO: 21207 - protein, 499 aa, Artificial Sequence
  Synthetic Polypeptide
MALPVTALLLPLALLLHAARPDIQMTQSPSSLSASVGDRVTITCRASQDISNYLNWYQQKPGKAPKLLIYYTSRLHSGVPSRFSGSGSGTDFTLTISSLQPEDFATYYCQQGNTLPYTFGQGTKVEIKRGGGGSGGGGSGGGGSEVQLVESGGGLVQPGGSLRLSCAASGYTFSDYFMSWVRQAPGKGLEWVATISNGGTYTYYPDSVKGRFTISRDNSKNTLYLQMNSLRAEDTAVYYCARFDGYIFDYWGQGTLVTVSSTREQKLISEEDLAKPTTTPAPRPPTPAPTIASQPLSLRPEACRPAAGGAVHTRGLDFACDIYIWAPLAGTCGVLLLSLVITLYCKRGRKKLLYIFKQPFMRPVQTTQEEDGCSCRFPEEEEGGCELRVKFSRSADAPAYQQGQNQLYNELNLGRREEYDVLDKRRGRDPEMGGKPRRKNPQEGLYNELQKDKMAEAYSEIGMKGERRRGKGHDGLYQGLSTATKDTYDALHMQALPPR

SEQ ID NO: 21208 - protein, 499 aa, Artificial Sequence
  Synthetic Polypeptide
MALPVTALLLPLALLLHAARPEVQLVESGGGLVQPGGSLRLSCAASGYTFSDYFMSWVRQAPGKGLEWVATISNGGTYTYYPDSVKGRFTISRDNSKNTLYLQMNSLRAEDTAVYYCARFDGYIFDYWGQGTLVTVSSGGGGSGGGGSGGGGSDIQMTQSPSSLSASVGDRVTITCRASQDISNYLNWYQQKPGKAPKLLIYYTSRLHSGVPSRFSGSGSGTDFTLTISSLQPEDFATYYCQQGNTLPYTFGQGTKVEIKRTREQKLISEEDLAKPTTTPAPRPPTPAPTIASQPLSLRPEACRPAAGGAVHTRGLDFACDIYIWAPLAGTCGVLLLSLVITLYCKRGRKKLLYIFKQPFMRPVQTTQEEDGCSCRFPEEEEGGCELRVKFSRSADAPAYQQGQNQLYNELNLGRREEYDVLDKRRGRDPEMGGKPRRKNPQEGLYNELQKDKMAEAYSEIGMKGERRRGKGHDGLYQGLSTATKDTYDALHMQALPPR

SEQ ID NO: 21209 - protein, 912 aa, Artificial Sequence
  Synthetic Polypeptide
MALPVTALLLPLALLLHAARPDIQMTQSPSSLSASVGDRVTITCRASQDISNYLNWYQQKPGKAPKLLIYYTSRLHSGVPSRFSGSGSGTDFTLTISSLQPEDFATYYCQQGNTLPYTFGQGTKVEIKRGGGGSGGGGSGGGGSEVQLVESGGGLVQPGGSLRLSCAASGYTFSDYFMSWVRQAPGKGLEWVATISNGGTYTYYPDSVKGRFTISRDNSKNTLYLQMNSLRAEDTAVYYCARFDGYIFDYWGQGTLVTVSSTREQKLISEEDLAKPTTTPAPRPPTPAPTIASQPLSLRPEACRPAAGGAVHTRGLDFACDIYIWAPLAGTCGVLLLSLVITLYCGRARVKFSRSADAPAYQQGQNQLYNELNLGRREEYDVLDKRRGRDPEMGGKPRRKNPQEGLYNELQKDKMAEAYSEIGMKGERRRGKGHDGLYQGLSTATKDTYDALHMQALPPRSRGSGATNFSLLKQAGDVEENPGPGIHMATYEVLCEVARKLGTDDREVVLFLLNVFIPQPTLAQLIGALRALKEEGRLTFPLLAECLFRAGRRDLLRDLLHLDPRFLERHLAGTMSYFSPYQLTVLHVDGELCARDIRSLIFLSKDTIGSRSTPQTFLHWVYCMENLDLLGPTDVDALMSMLRSLSRVDLQRQVQTLMGLHLSGPSHSQHYRHTPLETDFYDYKDDDDKTSGSGEGRGSLLTCGDVEENPGPHMTEYKPTVRLATRDDVPRAVRTLAAAFADYPATRHTVDPDRHIERVTELQELFLTRVGLDIGKVWVADDGAAVAVWTTPESVEAGAVFAEIGPRMAELSGSRLAAQQQMEGLLAPHRPKEPAWFLATVGVSPDHQGKGLGSAVVLPGVEAAERAGVPAFLETSAPRNLPFYERLGFTVTADVEVPEGPRTWCMTRKPGA

SEQ ID NO: 21210 - protein, 852 aa, Artificial Sequence
  Synthetic Polypeptide
MALPVTALLLPLALLLHAARPDIQMTQSPSSLSASVGDRVTITCRASQDISNYLNWYQQKPGKAPKLLIYYTSRLHSGVPSRFSGSGSGTDFTLTISSLQPEDFATYYCQQGNTLPYTFGQGTKVEIKRLEIQNPDPAVYQLRDSKSSDKSVCLFTDFDSQTNVSQSKDSDVYITDKCVLDMRSMDFKSNSAVAWSNKSDFACANAFNNSIIPEDTFFPSSDVPCDVKLVEKSFETDTNLNFQNLSVIGFRILLLKVAGFNLLMTLRLWSSRAKRSGSGVKQTLNFDLLKLAGDVESNPGPTSMDWIWRILFLVGAATGAHSFEEVQLVESGGGLVQPGGSLRLSCAASGYTFSDYFMSWVRQAPGKGLEWVATISNGGTYTYYPDSVKGRFTISRDNSKNTLYLQMNSLRAEDTAVYYCARFDGYIFDYWGQGTLVTVSSTREDLKNVFPPEVAVFEPSKAEIAHTQKATLVCLATGFYPDHVELSWWVNGKEVHSGVCTDPQPLKEQPALNDSRYCLSSRLRVSATFWQNPRNHFRCQVQFYGLSENDEWTQDRAKPVTQIVSAEAWGRADCGITSASYHQGVLSATILYEILLGKATLYAVLVSALVLMAMVKRKDSRGRAKRSGSGATNFSLLKQAGDVEENPGPSRGHMTEYKPTVRLATRDDVPRAVRTLAAAFADYPATRHTVDPDRHIERVTELQELFLTRVGLDIGKVWVADDGAAVAVWTTPESVEAGAVFAEIGPRMAELSGSRLAAQQQMEGLLAPHRPKEPAWFLATVGVSPDHQGKGLGSAVVLPGVEAAERAGVPAFLETSAPRNLPFYERLGFTVTADVEVPEGPRTWCMTRKPGA

SEQ ID NO: 21211 - protein, 851 aa, Artificial Sequence
  Synthetic Polypeptide
MALPVTALLLPLALLLHAARPDIQMTQSPSSLSASVGDRVTITCRASQDISNYLNWYQQKPGKAPKLLIYYTSRLHSGVPSRFSGSGSGTDFTLTISSLQPEDFATYYCQQGNTLPYTFGQGTKVEIKRLEDLKNVFPPEVAVFEPSKAEIAHTQKATLVCLATGFYPDHVELSWWVNGKEVHSGVCTDPQPLKEQPALNDSRYCLSSRLRVSATFWQNPRNHFRCQVQFYGLSENDEWTQDRAKPVTQIVSAEAWGRADCGITSASYHQGVLSATILYEILLGKATLYAVLVSALVLMAMVKRKDSRGRAKRSGSGATNFSLLKQAGDVEENPGPTSMDWIWRILFLVGAATGAHSFEEVQLVESGGGLVQPGGSLRLSCAASGYTFSDYFMSWVRQAPGKGLEWVATISNGGTYTYYPDSVKGRFTISRDNSKNTLYLQMNSLRAEDTAVYYCARFDGYIFDYWGQGTLVTVSSTRIQNPDPAVYQLRDSKSSDKSVCLFTDFDSQTNVSQSKDSDVYITDKCVLDMRSMDFKSNSAVAWSNKSDFACANAFNNSIIPEDTFFPSSDVPCDVKLVEKSFETDTNLNFQNLSVIGFRILLLKVAGFNLLMTLRLWSSRAKRSGSGVKQTLNFDLLKLAGDVESNPGPSRGHMTEYKPTVRLATRDDVPRAVRTLAAAFADYPATRHTVDPDRHIERVTELQELFLTRVGLDIGKVWVADDGAAVAVWTTPESVEAGAVFAEIGPRMAELSGSRLAAQQQMEGLLAPHRPKEPAWFLATVGVSPDHQGKGLGSAVVLPGVEAAERAGVPAFLETSAPRNLPFYERLGFTVTADVEVPEGPRTWCMTRKPGA

SEQ ID NO: 21212 - protein, 618 aa, Artificial Sequence
  Synthetic Polypeptide
MALPVTALLLPLALLLHAARPDIQMTQSPSSLSASVGDRVTITCRASQDISNYLNWYQQKPGKAPKLLIYYTSRLHSGVPSRFSGSGSGTDFTLTISSLQPEDFATYYCQQGNTLPYTFGQGTKVEIKRLEDLKNVFPPEVAVFEPSEAEISHTQKATLVCLATGFYPDHVELSWWVNGKEVHSGVCTDPQPLKEQPALNDSRYCLSSRLRVSATFWQNPRNHFRCQVQFYGLSENDEWTQDRAKPVTQIVSAEAWGRADCGFTSESYQQGVLSATILYEILLGKATLYAVLVSALVLMAMVKRKDSRGRAKRSGSGATNFSLLKQAGDVEENPGPTSMDWIWRILFLVGAATGAHSFEEVQLVESGGGLVQPGGSLRLSCAASGYTFSDYFMSWVRQAPGKGLEWVATISNGGTYTYYPDSVKGRFTISRDNSKNTLYLQMNSLRAEDTAVYYCARFDGYIFDYWGQGTLVTVSSTRIQNPDPAVYQLRDSKSSDKSVCLFTDFDSQTNVSQSKDSDVYITDKCVLDMRSMDFKSNSAVAWSNKSDFACANAFNNSIIPEDTFFPSPESSCDVKLVEKSFETDTNLNFQNLSVIGFRILLLKVAGFNLLMTLRLWSS

SEQ ID NO: 21213 - protein, 843 aa, Artificial Sequence
  Synthetic Polypeptide
MALPVTALLLPLALLLHAARPDIQMTQSPSSLSASVGDRVTITCRASQDISNYLNWYQQKPGKAPKLLIYYTSRLHSGVPSRFSGSGSGTDFTLTISSLQPEDFATYYCQQGNTLPYTFGQGTKVEIKRLEDLKNVFPPEVAVFEPSEAEISHTQKATLVCLATGFYPDHVELSWWVNGKEVHSGVCTDPQPLKEQPALNDSRYCLSSRLRVSATFWQNPRNHFRCQVQFYGLSENDEWTQDRAKPVTQIVSAEAWGRADCGFTSESYQQGVLSATILYEILLGKATLYAVLVSALVLMAMVKRKDSRGRAKRSGSGATNFSLLKQAGDVEENPGPTSMDWIWRILFLVGAATGAHSFEEVQLVESGGGLVQPGGSLRLSCAASGYTFSDYFMSWVRQAPGKGLEWVATISNGGTYTYYPDSVKGRFTISRDNSKNTLYLQMNSLRAEDTAVYYCARFDGYIFDYWGQGTLVTVSSTRIQNPDPAVYQLRDSKSSDKSVCLFTDFDSQTNVSQSKDSDVYITDKCVLDMRSMDFKSNSAVAWSNKSDFACANAFNNSIIPEDTFFPSPESSCDVKLVEKSFETDTNLNFQNLSVIGFRILLLKVAGFNLLMTLRLWSSRAKRSGSGVKQTLNFDLLKLAGDVESNPGPSRGGIHTMATYEVLCEVARKLGTDDREVVLFLLNVFIPQPTLAQLIGALRALKEEGRLTFPLLAECLFRAGRRDLLRDLLHLDPRFLERHLAGTMSYFSPYQLTVLHVDGELCARDIRSLIFLSKDTIGSRSTPQTFLHWVYCMENLDLLGPTDVDALMSMLRSLSRVDLQRQVQTLMGLHLSGPSHSQHYRHTP

SEQ ID NO: 21214 - protein, 622 aa, Artificial Sequence
  Synthetic Polypeptide
MALPVTALLLPLALLLHAARPDIQMTQSPSSLSASVGDRVTITCRASQDISNYLNWYQQKPGKAPKLLIYYTSRLHSGVPSRFSGSGSGTDFTLTISSLQPEDFATYYCQQGNTLPYTFGQGTKVEIKRLEIQNPDPAVYQLRDSKSSDKSVCLFTDFDSQTNVSQSKDSDVYITDKCVLDMRSMDFKSNSAVAWSNKSDFACANAFNNSIIPEDTFFPSPESSCDVKLVEKSFETDTNLNFQNLSVIGFRILLLKVAGFNLLMTLRLWSSRAKRSGSGVKQTLNFDLLKLAGDVESNPGPTSMDWIWRILFLVGAATGAHSFEEVQLVESGGGLVQPGGSLRLSCAASGYTFSDYFMSWVRQAPGKGLEWVATISNGGTYTYYPDSVKGRFTISRDNSKNTLYLQMNSLRAEDTAVYYCARFDGYIFDYWGQGTLVTVSSTREDLKNVFPPEVAVFEPSEAEISHTQKATLVCLATGFYPDHVELSWWVNGKEVHSGVCTDPQPLKEQPALNDSRYCLSSRLRVSATFWQNPRNHFRCQVQFYGLSENDEWTQDRAKPVTQIVSAEAWGRADCGFTSESYQQGVLSATILYEILLGKATLYAVLVSALVLMAMVKRKDSRG

SEQ ID NO: 21215 - protein, 844 aa, Artificial Sequence
  Synthetic Polypeptide
MALPVTALLLPLALLLHAARPDIQMTQSPSSLSASVGDRVTITCRASQDISNYLNWYQQKPGKAPKLLIYYTSRLHSGVPSRFSGSGSGTDFTLTISSLQPEDFATYYCQQGNTLPYTFGQGTKVEIKRLEIQNPDPAVYQLRDSKSSDKSVCLFTDFDSQTNVSQSKDSDVYITDKCVLDMRSMDFKSNSAVAWSNKSDFACANAFNNSIIPEDTFFPSPESSCDVKLVEKSFETDTNLNFQNLSVIGFRILLLKVAGFNLLMTLRLWSSRAKRSGSGVKQTLNFDLLKLAGDVESNPGPTSMDWIWRILFLVGAATGAHSFEEVQLVESGGGLVQPGGSLRLSCAASGYTFSDYFMSWVRQAPGKGLEWVATISNGGTYTYYPDSVKGRFTISRDNSKNTLYLQMNSLRAEDTAVYYCARFDGYIFDYWGQGTLVTVSSTREDLKNVFPPEVAVFEPSEAEISHTQKATLVCLATGFYPDHVELSWWVNGKEVHSGVCTDPQPLKEQPALNDSRYCLSSRLRVSATFWQNPRNHFRCQVQFYGLSENDEWTQDRAKPVTQIVSAEAWGRADCGFTSESYQQGVLSATILYEILLGKATLYAVLVSALVLMAMVKRKDSRGRAKRSGSGATNFSLLKQAGDVEENPGPSRGGIHTMATYEVLCEVARKLGTDDREVVLFLLNVFIPQPTLAQLIGALRALKEEGRLTFPLLAECLFRAGRRDLLRDLLHLDPRFLERHLAGTMSYFSPYQLTVLHVDGELCARDIRSLIFLSKDTIGSRSTPQTFLHWVYCMENLDLLGPTDVDALMSMLRSLSRVDLQRQVQTLMGLHLSGPSHSQHYRHTP

SEQ ID NO: 21216 - protein, 896 aa, Artificial Sequence
  Synthetic Polypeptide
MALPVTALLLPLALLLHAARPLEGKPIPNPLLGLDSTGSGEDLKNVFPPEVAVFEPSKAEIAHTQKATLVCLATGFYPDHVELSWWVNGKEVHSGVCTDPQPLKEQPALNDSRYCLSSRLRVSATFWQNPRNHFRCQVQFYGLSENDEWTQDRAKPVTQIVSAEAWGRADCGITSASYHQGVLSATILYEILLGKATLYAVLVSALVLMAMVKRKDSRGRAKRSGSGATNFSLLKQAGDVEENPGPTSMALPVTALLLPLALLLHAARPDIQMTQSPSSLSASVGDRVTITCRASQDISNYLNWYQQKPGKAPKLLIYYTSRLHSGVPSRFSGSGSGTDFTLTISSLQPEDFATYYCQQGNTLPYTFGQGTKVEIKRGGGGSGGGGSGGGGSEVQLVESGGGLVQPGGSLRLSCAASGYTFSDYFMSWVRQAPGKGLEWVATISNGGTYTYYPDSVKGRFTISRDNSKNTLYLQMNSLRAEDTAVYYCARFDGYIFDYWGQGTLVTVSSTREQKLISEEDGSGIQNPDPAVYQLRDSKSSDKSVCLFTDFDSQTNVSQSKDSDVYITDKCVLDMRSMDFKSNSAVAWSNKSDFACANAFNNSIIPEDTFFPSSDVPCDVKLVEKSFETDTNLNFQNLSVIGFRILLLKVAGFNLLMTLRLWSSRAKRSGSGVKQTLNFDLLKLAGDVESNPGPSRGHMTEYKPTVRLATRDDVPRAVRTLAAAFADYPATRHTVDPDRHIERVTELQELFLTRVGLDIGKVWVADDGAAVAVWTTPESVEAGAVFAEIGPRMAELSGSRLAAQQQMEGLLAPHRPKEPAWFLATVGVSPDHQGKGLGSAVVLPGVEAAERAGVPAFLETSAPRNLPFYERLGFTVTADVEVPEGPRTWCMTRKPGA

SEQ ID NO: 21217 - protein, 897 aa, Artificial Sequence
  Synthetic Polypeptide
MALPVTALLLPLALLLHAARPLEQKLISEEDLGSGDRPDPAVYQLRDSKSSDKSVCLFTDFDSQTNVSQSKDSDVYITDKCVLDMRSMDFKSNSAVAWSNKSDFACANAFNNSIIPEDTFFPSPESSCDVKLVEKSFETDTNLNFQNLSVIGFRILLLKVAGFNLLMTLRLWSSSSRAKRSGSGVKQTLNFDLLKLAGDVESNPGPTSMALPVTALLLPLALLLHAARPDIQMTQSPSSLSASVGDRVTITCRASQDISNYLNWYQQKPGKAPKLLIYYTSRLHSGVPSRFSGSGSGTDFTLTISSLQPEDFATYYCQQGNTLPYTFGQGTKVEIKRGGGGSGGGGSGGGGSEVQLVESGGGLVQPGGSLRLSCAASGYTFSDYFMSWVRQAPGKGLEWVATISNGGTYTYYPDSVKGRFTISRDNSKNTLYLQMNSLRAEDTAVYYCARFDGYIFDYWGQGTLVTVSSTRGKPIPNPLLGLDSTGSGEDLKNVFPPEVAVFEPSEAEISHTQKATLVCLATGFYPDHVELSWWVNGKEVHSGVCTDPQPLKEQPALNDSRYCLSSRLRVSATFWQNPRNHFRCQVQFYGLSENDEWTQDRAKPVTQIVSAEAWGRADCGFTSESYQQGVLSATILYEILLGKATLYAVLVSALVLMAMVKRKDSRGRAKRSGSGATNFSLLKQAGDVEENPGPSRGHMTEYKPTVRLATRDDVPRAVRTLAAAFADYPATRHTVDPDRHIERVTELQELFLTRVGLDIGKVWVADDGAAVAVWTTPESVEAGAVFAEIGPRMAELSGSRLAAQQQMEGLLAPHRPKEPAWFLATVGVSPDHQGKGLGSAVVLPGVEAAERAGVPAFLETSAPRNLPFYERLGFTVTADVEVPEGPRTWCMTRKPGA

SEQ ID NO: 21218 - protein, 851 aa, Artificial Sequence
  Synthetic Polypeptide
MALPVTALLLPLALLLHAARPDIQMTQSPSSLSASVGDRVTITCRASQDISNYLNWYQQKPGKAPKLLIYYTSRLHSGVPSRFSGSGSGTDFTLTISSLQPEDFATYYCQQGNTLPYTFGQGTKVEIKRLEDLKNVFPPEVAVFEPSEAEISHTQKATLVCLATGFYPDHVELSWWVNGKEVHSGVSTDPQPLKEQPALNDSRYCLSSRLRVSATFWQNPRNHFRCQVQFYGLSENDEWTQDRAKPVTQIVSAEAWGRADCGFTSESYQQGVLSATILYEILLGKATLYAVLVSALVLMAMVKRKDSRGRAKRSGSGATNFSLLKQAGDVEENPGPTSMDWIWRILFLVGAATGAHSFEEVQLVESGGGLVQPGGSLRLSCAASGYTFSDYFMSWVRQAPGKGLEWVATISNGGTYTYYPDSVKGRFTISRDNSKNTLYLQMNSLRAEDTAVYYCARFDGYIFDYWGQGTLVTVSSTRIQNPDPAVYQLRDSKSSDKSVCLFTDFDSQTNVSQSKDSDVYITDKTVLDMRSMDFKSNSAVAWSNKSDFACANAFNNSIIPEDTFFPSPESSCDVKLVEKSFETDTNLNFQNLSVIGFRILLLKVAGFNLLMTLRLWSSRAKRSGSGVKQTLNFDLLKLAGDVESNPGPSRGHMTEYKPTVRLATRDDVPRAVRTLAAAFADYPATRHTVDPDRHIERVTELQELFLTRVGLDIGKVWVADDGAAVAVWTTPESVEAGAVFAEIGPRMAELSGSRLAAQQQMEGLLAPHRPKEPAWFLATVGVSPDHQGKGLGSAVVLPGVEAAERAGVPAFLETSAPRNLPFYERLGFTVTADVEVPEGPRTWCMTRKPGA

SEQ ID NO: 21219 - protein, 933 aa, Artificial Sequence
  Synthetic Polypeptide
MALPVTALLLPLALLLHAARPDIQMTQSPSSLSASVGDRVTITCRASQDISNYLNWYQQKPGKAPKLLIYYTSRLHSGVPSRFSGSGSGTDFTLTISSLQPEDFATYYCQQGNTLPYTFGQGTKVEIKRLEDLKNVFPPEVAVFEPSEAEISHTQKATLVCLATGFYPDHVELSWWVNGKEVHSGVSTDPQPLKEQPALNDSRYCLSSRLRVSATFWQNPRNHFRCQVQFYGLSENDEWTQDRAKPVTQIVSAEAWGRADCGFTSESYQQGVLSATILYEILLGKATLYAVLVSALVLMAMVKRKDSRGRAKRSGSGATNFSLLKQAGDVEENPGPTSMDWIWRILFLVGAATGAHSFEEVQLVESGGGLVQPGGSLRLSCAASGYTFSDYFMSWVRQAPGKGLEWVATISNGGTYTYYPDSVKGRFTISRDNSKNTLYLQMNSLRAEDTAVYYCARFDGYIFDYWGQGTLVTVSSTREQKLISEEDGSGTPFPSLAPPIMLLVDGKQQMVVVCLVLDVAPPGLDSPIWFSAGNGSALDAFTYGPSPATDGTWTNLAHLSLPSEELASWEPLVCHTGPGAEGHSRSTQPMHLSGEASTARTCPQEPLRGTPGGALWLGVLRLLLFKLLLFDLLLTCSCLCDPAGPLPSPATTTRLRALGSHRLHPATETGGREATSSPRPQPRDRRWGDTPPGRKPGSPVRAKRSGSGVKQTLNFDLLKLAGDVESNPGPSRGHMTEYKPTVRLATRDDVPRAVRTLAAAFADYPATRHTVDPDRHIERVTELQELFLTRVGLDIGKVWVADDGAAVAVWTTPESVEAGAVFAEIGPRMAELSGSRLAAQQQMEGLLAPHRPKEPAWFLATVGVSPDHQGKGLGSAVVLPGVEAAERAGVPAFLETSAPRNLPFYERLGFTVTADVEVPEGPRTWCMTRKPGA

SEQ ID NO: 21220 - protein, 951 aa, Artificial Sequence
  Synthetic Polypeptide
MALPVTALLLPLALLLHAARPLEDLKNVFPPEVAVFEPSEAEISHTQKATLVCLATGFYPDHVELSWWVNGKEVHSGVSTDPQPLKEQPALNDSRYCLSSRLRVSATFWQNPRNHFRCQVQFYGLSENDEWTQDRAKPVTQIVSAEAWGRADCGFTSESYQQGVLSATILYEILLGKATLYAVLVSALVLMAMVKRKDSRGRAKRSGSGATNFSLLKQAGDVEENPGPTSMALPVTALLLPLALLLHAARPDIQMTQSPSSLSASVGDRVTITCRASQDISNYLNWYQQKPGKAPKLLIYYTSRLHSGVPSRFSGSGSGTDFTLTISSLQPEDFATYYCQQGNTLPYTFGQGTKVEIKRGGGGSGGGGSGGGGSEVQLVESGGGLVQPGGSLRLSCAASGYTFSDYFMSWVRQAPGKGLEWVATISNGGTYTYYPDSVKGRFTISRDNSKNTLYLQMNSLRAEDTAVYYCARFDGYIFDYWGQGTLVTVSSTREQKLISEEDLGSGTPFPSLAPPIMLLVDGKQQMVVVCLVLDVAPPGLDSPIWFSAGNGSALDAFTYGPSPATDGTWTNLAHLSLPSEELASWEPLVCHTGPGAEGHSRSTQPMHLSGEASTARTCPQEPLRGTPGGALWLGVLRLLLFKLLLFDLLLTCSCLCDPAGPLPSPATTTRLRALGSHRLHPATETGGREATSSPRPQPRDRRWGDTPPGRKPGSPVRAKRSGSGVKQTLNFDLLKLAGDVESNPGPSRSRGHMTEYKPTVRLATRDDVPRAVRTLAAAFADYPATRHTVDPDRHIERVTELQELFLTRVGLDIGKVWVADDGAAVAVWTTPESVEAGAVFAEIGPRMAELSGSRLAAQQQMEGLLAPHRPKEPAWFLATVGVSPDHQGKGLGSAVVLPGVEAAERAGVPAFLETSAPRNLPFYERLGFTVTADVEVPEGPRTWCMTRKPGA

SEQ ID NO: 21221 - protein, 888 aa, Artificial Sequence
  Synthetic Polypeptide
MALPVTALLLPLALLLHAARPDIQMTQSPSSLSASVGDRVTITCRASQDISNYLNWYQQKPGKAPKLLIYYTSRLHSGVPSRFSGSGSGTDFTLTISSLQPEDFATYYCQQGNTLPYTFGQGTKVEIKRLEGKPIPNPLLGLDSTGSGDKQLDADVSPKPTIFLPSIAETKLQKAGTYLCLLEKFFPDVIKIHWQEKKSNTILGSQEGNTMKTNDTYMKFSWLTVPEKSLDKEHRCIVRHENNKNGVDQEIIFPPIKTDVITMDPKDNCSKDANDTLLLQLTNTSAYYMYLLLLLKSVVYFAIITCCLLRRTAFCCNGEKSRAKRSGSGATNFSLLKQAGDVEENPGPTSMDWIWRILFLVGAATGAHSFEEVQLVESGGGLVQPGGSLRLSCAASGYTFSDYFMSWVRQAPGKGLEWVATISNGGTYTYYPDSVKGRFTISRDNSKNTLYLQMNSLRAEDTAVYYCARFDGYIFDYWGQGTLVTVSSTREQKLISEEDGSGSQPHTKPSVFVMKNGTNVACLVKEFYPKDIRINLVSSKKITEFDPAIVISPSGKYNAVKLGKYEDSNSVTCSVQHDNKTVHSTDFEVKTDSTDHVKPKETENTKQPSKSCHKPKAIVHTEKVNMMSLTVLGLRMLFAKTVAVNFLLTAKLFFLRAKRSGSGVKQTLNFDLLKLAGDVESNPGPSRGHMTEYKPTVRLATRDDVPRAVRTLAAAFADYPATRHTVDPDRHIERVTELQELFLTRVGLDIGKVWVADDGAAVAVWTTPESVEAGAVFAEIGPRMAELSGSRLAAQQQMEGLLAPHRPKEPAWFLATVGVSPDHQGKGLGSAVVLPGVEAAERAGVPAFLETSAPRNLPFYERLGFTVTADVEVPEGPRTWCMTRKPGA

SEQ ID NO: 21222 - protein, 626 aa, Artificial Sequence
  Synthetic Polypeptide
MALPVTALLLPLALLLHAARPDIQMTQSPSSLSASVGDRVTITCRASQDISNYLNWYQQKPGKAPKLLIYYTSRLHSGVPSRFSGSGSGTDFTLTISSLQPEDFATYYCQQGNTLPYTFGQGTKVEIKRLESQPHTKPSVFVMKNGTNVACLVKEFYPKDIRINLVSSKKITEFDPAIVISPSGKYNAVKLGKYEDSNSVTCSVQHDNKTVHSTDFEVKTDSTDHVKPKETENTKQPSKSCHKPKAIVHTEKVNMMSLTVLGLRMLFAKTVAVNFLLTAKLFFLRAKRSGSGATNFSLLKQAGDVEENPGPTSMDWIWRILFLVGAATGAHSFEEVQLVESGGGLVQPGGSLRLSCAASGYTFSDYFMSWVRQAPGKGLEWVATISNGGTYTYYPDSVKGRFTISRDNSKNTLYLQMNSLRAEDTAVYYCARFDGYIFDYWGQGTLVTVSSTRDKQLDADVSPKPTIFLPSIAETKLQKAGTYLCLLEKFFPDVIKIHWQEKKSNTILGSQEGNTMKTNDTYMKFSWLTVPEKSLDKEHRCIVRHENNKNGVDQEIIFPPIKTDVITMDPKDNCSKDANDTLLLQLTNTSAYYMYLLLLLKSVVYFAIITCCLLRRTAFCCNGEKS

SEQ ID NO: 21223 - protein, 903 aa, Artificial Sequence
  Synthetic Polypeptide
MALPVTALLLPLALLLHAARPLEGKPIPNPLLGLDSTGSGDKQLDADVSPKPTIFLPSIAETKLQKAGTYLCLLEKFFPDVIKIHWQEKKSNTILGSQEGNTMKTNDTYMKFSWLTVPEKSLDKEHRCIVRHENNKNGVDQEIIFPPIKTDVITMDPKDNCSKDANDTLLLQLTNTSAYYMYLLLLLKSVVYFAIITCCLLRRTAFCCNGEKSRAKRSGSGATNFSLLKQAGDVEENPGPTSMALPVTALLLPLALLLHAARPDIQMTQSPSSLSASVGDRVTITCRASQDISNYLNWYQQKPGKAPKLLIYYTSRLHSGVPSRFSGSGSGTDFTLTISSLQPEDFATYYCQQGNTLPYTFGQGTKVEIKRGGGGSGGGGSGGGGSEVQLVESGGGLVQPGGSLRLSCAASGYTFSDYFMSWVRQAPGKGLEWVATISNGGTYTYYPDSVKGRFTISRDNSKNTLYLQMNSLRAEDTAVYYCARFDGYIFDYWGQGTLVTVSSTREQKLISEEDGSGSQPHTKPSVFVMKNGTNVACLVKEFYPKDIRINLVSSKKITEFDPAIVISPSGKYNAVKLGKYEDSNSVTCSVQHDNKTVHSTDFEVKTDSTDHVKPKETENTKQPSKSCHKPKAIVHTEKVNMMSLTVLGLRMLFAKTVAVNFLLTAKLFFLRAKRSGSGVKQTLNFDLLKLAGDVESNPGPSRGHMTEYKPTVRLATRDDVPRAVRTLAAAFADYPATRHTVDPDRHIERVTELQELFLTRVGLDIGKVWVADDGAAVAVWTTPESVEAGAVFAEIGPRMAELSGSRLAAQQQMEGLLAPHRPKEPAWFLATVGVSPDHQGKGLGSAVVLPGVEAAERAGVPAFLETSAPRNLPFYERLGFTVTADVEVPEGPRTWCMTRKPGA

SEQ ID NO: 21224 - protein, 1028 aa, Artificial Sequence
  Synthetic Polypeptide
MALPVTALLLPLALLLHAARPDIQMTQSPSSLSASVGDRVTITCRASQDISNYLNWYQQKPGKAPKLLIYYTSRLHSGVPSRFSGSGSGTDFTLTISSLQPEDFATYYCQQGNTLPYTFGQGTKVEIKRGQPKANPTVTLFPPSSEELQANKATLVCLISDFYPGAVTVAWKADGSPVKAGVETTKPSKQSNNKYAASSYLSLTPEQWKSHRSYSCQVTHEGSTVEKTVAPTECSGSQSFGLLDPKLCYLLDGILFIYGVILTALFLRVKFSRSADAPAYQQGQNQLYNELNLGRREEYDVLDKRRGRDPEMGGKPQRRKNPQEGLYNELQKDKMAEAYSEIGMKGERRRGKGHDGLYQGLSTATKDTYDALHMQALPPRRAKRSGSGATNFSLLKQAGDVEENPGPTSMDWIWRILFLVGAATGAHSFEEVQLVESGGGLVQPGGSLRLSCAASGYTFSDYFMSWVRQAPGKGLEWVATISNGGTYTYYPDSVKGRFTISRDNSKNTLYLQMNSLRAEDTAVYYCARFDGYIFDYWGQGTLVTVSSASTKGPSVFPLAPSSKSTSGGTAALGCLVKDYFPEPVTVSWNSGALTSGVHTFPAVLQSSGLYSLSSVVTVPSSSLGTQTYICNVNHKPSNTKVDKRVEPKSCGTQSFGLLDPKLCYLLDGILFIYGVILTALFLRVKFSRSADAPAYQQGQNQLYNELNLGRREEYDVLDKRRGRDPEMGGKPQRRKNPQEGLYNELQKDKMAEAYSEIGMKGERRRGKGHDGLYQGLSTATKDTYDALHMQALPPRRAKRSGSGVKQTLNFDLLKLAGDVESNPGPSRGHMTEYKPTVRLATRDDVPRAVRTLAAAFADYPATRHTVDPDRHIERVTELQELFLTRVGLDIGKVWVADDGAAVAVWTTPESVEAGAVFAEIGPRMAELSGSRLAAQQQMEGLLAPHRPKEPAWFLATVGVSPDHQGKGLGSAVVLPGVEAAERAGVPAFLETSAPRNLPFYERLGFTVTADVEVPEGPRTWCMTRKPGA

SEQ ID NO: 21225 - protein, 814 aa, Artificial Sequence
  Synthetic Polypeptide
MALPVTALLLPLALLLHAARPDIQMTQSPSSLSASVGDRVTITCRASQDISNYLNWYQQKPGKAPKLLIYYTSRLHSGVPSRFSGSGSGTDFTLTISSLQPEDFATYYCQQGNTLPYTFGQGTKVEIKRLEDLKNVFPPEVAVFEPSEAEISHTQKATLVCLATGFYPDHVELSWWVNGKEVHSGVSTDPQPLKEQPALNDSRYCLSSRLRVSATFWQNPRNHFRCQVQFYGLSENDEWTQDRAKPVTQIVSAEAWGRADCGSQSFGLLDPKLCYLLDGILFIYGVILTALFLRVKFSRSADAPAYQQGQNQLYNELNLGRREEYDVLDKRRGRDPEMGGKPQRRKNPQEGLYNELQKDKMAEAYSEIGMKGERRRGKGHDGLYQGLSTATKDTYDALHMQALPPRRAKRSGSGATNFSLLKQAGDVEENPGPTSMDWIWRILFLVGAATGAHSFEEVQLVESGGGLVQPGGSLRLSCAASGYTFSDYFMSWVRQAPGKGLEWVATISNGGTYTYYPDSVKGRFTISRDNSKNTLYLQMNSLRAEDTAVYYCARFDGYIFDYWGQGTLVTVSSTRIQNPDPAVYQLRDSKSSDKSVCLFTDFDSQTNVSQSKDSDVYITDKTVLDMRSMDFKSNSAVAWSNKSDFACANAFNNSIIPEDTFFPSPESSCGTQSFGLLDPKLCYLLDGILFIYGVILTALFLRVKFSRSADAPAYQQGQNQLYNELNLGRREEYDVLDKRRGRDPEMGGKPQRRKNPQEGLYNELQKDKMAEAYSEIGMKGERRRGKGHDGLYQGLSTATKDTYDALHMQALPPR

SEQ ID NO: 21226 - protein, 814 aa, Artificial Sequence
  Synthetic Polypeptide
MALPVTALLLPLALLLHAARPDIQMTQSPSSLSASVGDRVTITCRASQDISNYLNWYQQKPGKAPKLLIYYTSRLHSGVPSRFSGSGSGTDFTLTISSLQPEDFATYYCQQGNTLPYTFGQGTKVEIKRLEDLKNVFPPEVAVFEPSKAEIAHTQKATLVCLATGFYPDHVELSWWVNGKEVHSGVCTDPQPLKEQPALNDSRYCLSSRLRVSATFWQNPRNHFRCQVQFYGLSENDEWTQDRAKPVTQIVSAEAWGRADCGSQSFGLLDPKLCYLLDGILFIYGVILTALFLRVKFSRSADAPAYQQGQNQLYNELNLGRREEYDVLDKRRGRDPEMGGKPQRRKNPQEGLYNELQKDKMAEAYSEIGMKGERRRGKGHDGLYQGLSTATKDTYDALHMQALPPRRAKRSGSGATNFSLLKQAGDVEENPGPTSMDWIWRILFLVGAATGAHSFEEVQLVESGGGLVQPGGSLRLSCAASGYTFSDYFMSWVRQAPGKGLEWVATISNGGTYTYYPDSVKGRFTISRDNSKNTLYLQMNSLRAEDTAVYYCARFDGYIFDYWGQGTLVTVSSTRIQNPDPAVYQLRDSKSSDKSVCLFTDFDSQTNVSQSKDSDVYITDKCVLDMRSMDFKSNSAVAWSNKSDFACANAFNNSIIPEDTFFPSSDVPCGTQSFGLLDPKLCYLLDGILFIYGVILTALFLRVKFSRSADAPAYQQGQNQLYNELNLGRREEYDVLDKRRGRDPEMGGKPQRRKNPQEGLYNELQKDKMAEAYSEIGMKGERRRGKGHDGLYQGLSTATKDTYDALHMQALPPR

SEQ ID NO: 21227 - protein, 885 aa, Artificial Sequence
  Synthetic Polypeptide
MALPVTALLLPLALLLHAARPDIQMTQSPSSLSASVGDRVTITCRASQDISNYLNWYQQKPGKAPKLLIYYTSRLHSGVPSRFSGSGSGTDFTLTISSLQPEDFATYYCQQGNTLPYTFGQGTKVEIKRLEGKPIPNPLLGLDSTGSGEDLKNVFPPEVAVFEPSEAEISHTQKATLVCLATGFYPDHVELSWWVNGKEVHSGVSTDPQPLKEQPALNDSRYCLSSRLRVSATFWQNPRNHFRCQVQFYGLSENDEWTQDRAKPVTQIVSAEAWGRADCGSQSFGLLDPKLCYLLDGILFIYGVILTALFLRVKFSRSADAPAYQQGQNQLYNELNLGRREEYDVLDKRRGRDPEMGGKPQRRKNPQEGLYNELQKDKMAEAYSEIGMKGERRRGKGHDGLYQGLSTATKDTYDALHMQALPPRRAKRSGSGATNFSLLKQAGDVEENPGPTSMDWIWRILFLVGAATGAHSFEEVQLVESGGGLVQPGGSLRLSCAASGYTFSDYFMSWVRQAPGKGLEWVATISNGGTYTYYPDSVKGRFTISRDNSKNTLYLQMNSLRAEDTAVYYCARFDGYIFDYWGQGTLVTVSSTREQKLISEEDGSGIQNPDPAVYQLRDSKSSDKSVCLFTDFDSQTNVSQSKDSDVYITDKTVLDMRSMDFKSNSAVAWSNKSDFACANAFNNSIIPEDTFFPSPESSCGTQSFGLLDPKLCYLLDGILFIYGVILTALFLRSKRSRLLHSDYMNMTPRRPGPTRKHYQPYAPPRDFAAYRSRVKFSRSADAPAYQQGQNQLYNELNLGRREEYDVLDKRRGRDPEMGGKPQRRKNPQEGLYNELQKDKMAEAYSEIGMKGERRRGKGHDGLYQGLSTATKDTYDALHMQALPPR

SEQ ID NO: 21228 - protein, 926 aa, Artificial Sequence
  Synthetic Polypeptide
MALPVTALLLPLALLLHAARPDIQMTQSPSSLSASVGDRVTITCRASQDISNYLNWYQQKPGKAPKLLIYYTSRLHSGVPSRFSGSGSGTDFTLTISSLQPEDFATYYCQQGNTLPYTFGQGTKVEIKRLEGKPIPNPLLGLDSTGSGEDLKNVFPPEVAVFEPSEAEISHTQKATLVCLATGFYPDHVELSWWVNGKEVHSGVSTDPQPLKEQPALNDSRYCLSSRLRVSATFWQNPRNHFRCQVQFYGLSENDEWTQDRAKPVTQIVSAEAWGRADCGSQSFGLLDPKLCYLLDGILFIYGVILTALFLRSKRSRLLHSDYMNMTPRRPGPTRKHYQPYAPPRDFAAYRSRVKFSRSADAPAYQQGQNQLYNELNLGRREEYDVLDKRRGRDPEMGGKPQRRKNPQEGLYNELQKDKMAEAYSEIGMKGERRRGKGHDGLYQGLSTATKDTYDALHMQALPPRRAKRSGSGATNFSLLKQAGDVEENPGPTSMDWIWRILFLVGAATGAHSFEEVQLVESGGGLVQPGGSLRLSCAASGYTFSDYFMSWVRQAPGKGLEWVATISNGGTYTYYPDSVKGRFTISRDNSKNTLYLQMNSLRAEDTAVYYCARFDGYIFDYWGQGTLVTVSSTREQKLISEEDGSGIQNPDPAVYQLRDSKSSDKSVCLFTDFDSQTNVSQSKDSDVYITDKTVLDMRSMDFKSNSAVAWSNKSDFACANAFNNSIIPEDTFFPSPESSCGTQSFGLLDPKLCYLLDGILFIYGVILTALFLRSKRSRLLHSDYMNMTPRRPGPTRKHYQPYAPPRDFAAYRSRVKFSRSADAPAYQQGQNQLYNELNLGRREEYDVLDKRRGRDPEMGGKPQRRKNPQEGLYNELQKDKMAEAYSEIGMKGERRRGKGHDGLYQGLSTATKDTYDALHMQALPPR

SEQ ID NO: 21229 - protein, 887 aa, Artificial Sequence
  Synthetic Polypeptide
MALPVTALLLPLALLLHAARPDIQMTQSPSSLSASVGDRVTITCRASQDISNYLNWYQQKPGKAPKLLIYYTSRLHSGVPSRFSGSGSGTDFTLTISSLQPEDFATYYCQQGNTLPYTFGQGTKVEIKRLEGKPIPNPLLGLDSTGSGEDLKNVFPPEVAVFEPSEAEISHTQKATLVCLATGFYPDHVELSWWVNGKEVHSGVSTDPQPLKEQPALNDSRYCLSSRLRVSATFWQNPRNHFRCQVQFYGLSENDEWTQDRAKPVTQIVSAEAWGRADCGSQSFGLLDPKLCYLLDGILFIYGVILTALFLRVKFSRSADAPAYQQGQNQLYNELNLGRREEYDVLDKRRGRDPEMGGKPQRRKNPQEGLYNELQKDKMAEAYSEIGMKGERRRGKGHDGLYQGLSTATKDTYDALHMQALPPRRAKRSGSGATNFSLLKQAGDVEENPGPTSMDWIWRILFLVGAATGAHSFEEVQLVESGGGLVQPGGSLRLSCAASGYTFSDYFMSWVRQAPGKGLEWVATISNGGTYTYYPDSVKGRFTISRDNSKNTLYLQMNSLRAEDTAVYYCARFDGYIFDYWGQGTLVTVSSTREQKLISEEDLGSGIQNPDPAVYQLRDSKSSDKSVCLFTDFDSQTNVSQSKDSDVYITDKTVLDMRSMDFKSNSAVAWSNKSDFACANAFNNSIIPEDTFFPSPESSCGTQSFGLLDPKLCYLLDGILFIYGVILTALFLKRGRKKLLYIFKQPFMRPVQTTQEEDGCSCRFPEEEEGGCELRVKFSRSADAPAYQQGQNQLYNELNLGRREEYDVLDKRRGRDPEMGGKPQRRKNPQEGLYNELQKDKMAEAYSEIGMKGERRRGKGHDGLYQGLSTATKDTYDALHMQALPPR

SEQ ID NO: 21230 - protein, 929 aa, Artificial Sequence
  Synthetic Polypeptide
MALPVTALLLPLALLLHAARPDIQMTQSPSSLSASVGDRVTITCRASQDISNYLNWYQQKPGKAPKLLIYYTSRLHSGVPSRFSGSGSGTDFTLTISSLQPEDFATYYCQQGNTLPYTFGQGTKVEIKRLEGKPIPNPLLGLDSTGSGEDLKNVFPPEVAVFEPSEAEISHTQKATLVCLATGFYPDHVELSWWVNGKEVHSGVSTDPQPLKEQPALNDSRYCLSSRLRVSATFWQNPRNHFRCQVQFYGLSENDEWTQDRAKPVTQIVSAEAWGRADCGSQSFGLLDPKLCYLLDGILFIYGVILTALFLKRGRKKLLYIFKQPFMRPVQTTQEEDGCSCRFPEEEEGGCELRVKFSRSADAPAYQQGQNQLYNELNLGRREEYDVLDKRRGRDPEMGGKPQRRKNPQEGLYNELQKDKMAEAYSEIGMKGERRRGKGHDGLYQGLSTATKDTYDALHMQALPPRRAKRSGSGATNFSLLKQAGDVEENPGPTSMDWIWRILFLVGAATGAHSFEEVQLVESGGGLVQPGGSLRLSCAASGYTFSDYFMSWVRQAPGKGLEWVATISNGGTYTYYPDSVKGRFTISRDNSKNTLYLQMNSLRAEDTAVYYCARFDGYIFDYWGQGTLVTVSSTREQKLISEEDLGSGIQNPDPAVYQLRDSKSSDKSVCLFTDFDSQTNVSQSKDSDVYITDKTVLDMRSMDFKSNSAVAWSNKSDFACANAFNNSIIPEDTFFPSPESSCGTQSFGLLDPKLCYLLDGILFIYGVILTALFLKRGRKKLLYIFKQPFMRPVQTTQEEDGCSCRFPEEEEGGCELRVKFSRSADAPAYQQGQNQLYNELNLGRREEYDVLDKRRGRDPEMGGKPQRRKNPQEGLYNELQKDKMAEAYSEIGMKGERRRGKGHDGLYQGLSTATKDTYDALHMQALPPR

SEQ ID NO: 21231 - protein, 819 aa, Artificial Sequence
  Synthetic Polypeptide
MALPVTALLLPLALLLHAARPDIQMTQSPSSLSASVGDRVTITCRASQDISNYLNWYQQKPGKAPKLLIYYTSRLHSGVPSRFSGSGSGTDFTLTISSLQPEDFATYYCQQGNTLPYTFGQGTKVEIKRLEQSFGLLDPKLCYLLDGILFIYGVILTALFLRVKFSRSADAPAYQQGQNQLYNELNLGRREEYDVLDKRRGRDPEMGGKPQRRKNPQEGLYNELQKDKMAEAYSEIGMKGERRRGKGHDGLYQGLSTATKDTYDALHMQALPPRRAKRSGSGATNFSLLKQAGDVEENPGPTSMDWIWRILFLVGAATGAHSFEEVQLVESGGGLVQPGGSLRLSCAASGYTFSDYFMSWVRQAPGKGLEWVATISNGGTYTYYPDSVKGRFTISRDNSKNTLYLQMNSLRAEDTAVYYCARFDGYIFDYWGQGTLVTVSSTRQSFGLLDPKLCYLLDGILFIYGVILTALFLRVKFSRSADAPAYQQGQNQLYNELNLGRREEYDVLDKRRGRDPEMGGKPQRRKNPQEGLYNELQKDKMAEAYSEIGMKGERRRGKGHDGLYQGLSTATKDTYDALHMQALPPRRAKRSGSGVKQTLNFDLLKLAGDVESNPGPSRGHMTEYKPTVRLATRDDVPRAVRTLAAAFADYPATRHTVDPDRHIERVTELQELFLTRVGLDIGKVWVADDGAAVAVWTTPESVEAGAVFAEIGPRMAELSGSRLAAQQQMEGLLAPHRPKEPAWFLATVGVSPDHQGKGLGSAVVLPGVEAAERAGVPAFLETSAPRNLPFYERLGFTVTADVEVPEGPRTWCMTRKPGA

SEQ ID NO: 21232 - protein, 644 aa, Artificial Sequence
  Synthetic Polypeptide
MALPVTALLLPLALLLHAARPDIQMTQSPSSLSASVGDRVTITCRASQDISNYLNWYQQKPGKAPKLLIYYTSRLHSGVPSRFSGSGSGTDFTLTISSLQPEDFATYYCQQGNTLPYTFGQGTKVEIKRLEGQPKANPTVTLFPPSSEELQANKATLVCLISDFYPGAVTVAWKADGSPVKAGVETTKPSKQSNNKYAASSYLSLTPEQWKSHRSYSCQVTHEGSTVEKTVAPTECSPIKTDVITMDPKDNCSKDANDTLLLQLTNTSAYYMYLLLLLKSVVYFAIITCCLLRRTAFCCNGEKSRAKRSGSGATNFSLLKQAGDVEENPGPTSMDWIWRILFLVGAATGAHSFEEVQLVESGGGLVQPGGSLRLSCAASGYTFSDYFMSWVRQAPGKGLEWVATISNGGTYTYYPDSVKGRFTISRDNSKNTLYLQMNSLRAEDTAVYYCARFDGYIFDYWGQGTLVTVSSTRASTKGPSVFPLAPSSKSTSGGTAALGCLVKDYFPEPVTVSWNSGALTSGVHTFPAVLQSSGLYSLSSVVTVPSSSLGTQTYICNVNHKPSNTKVDKRVEPKSCEVKTDSTDHVKPKETENTKQPSKSCHKPKAIVHTEKVNMMSLTVLGLRMLFAKTVAVNFLLTAKLFFL

SEQ ID NO: 21233 - protein, 622 aa, Artificial Sequence
  Synthetic Polypeptide
MALPVTALLLPLALLLHAARPDIQMTQSPSSLSASVGDRVTITCRASQDISNYLNWYQQKPGKAPKLLIYYTSRLHSGVPSRFSGSGSGTDFTLTISSLQPEDFATYYCQQGNTLPYTFGQGTKVEIKRLEGQPKANPTVTLFPPSSEELQANKATLVCLISDFYPGAVTVAWKADGSPVKAGVETTKPSKQSNNKYAASSYLSLTPEQWKSHRSYSCQVTHEGSTVEKTVAPTECSGRADCGITSASYHQGVLSATILYEILLGKATLYAVLVSALVLMAMVKRKDSRGRAKRSGSGATNFSLLKQAGDVEENPGPTSMDWIWRILFLVGAATGAHSFEEVQLVESGGGLVQPGGSLRLSCAASGYTFSDYFMSWVRQAPGKGLEWVATISNGGTYTYYPDSVKGRFTISRDNSKNTLYLQMNSLRAEDTAVYYCARFDGYIFDYWGQGTLVTVSSTRASTKGPSVFPLAPSSKSTSGGTAALGCLVKDYFPEPVTVSWNSGALTSGVHTFPAVLQSSGLYSLSSVVTVPSSSLGTQTYICNVNHKPSNTKVDKRVEPKSCIPEDTFFPSSDVPCDVKLVEKSFETDTNLNFQNLSVIGFRILLLKVAGFNLLMTLRLWSS

SEQ ID NO: 21234 - protein, 622 aa, Artificial Sequence
  Synthetic Polypeptide
MALPVTALLLPLALLLHAARPDIQMTQSPSSLSASVGDRVTITCRASQDISNYLNWYQQKPGKAPKLLIYYTSRLHSGVPSRFSGSGSGTDFTLTISSLQPEDFATYYCQQGNTLPYTFGQGTKVEIKRLEGQPKANPTVTLFPPSSEELQANKATLVCLISDFYPGAVTVAWKADGSPVKAGVETTKPSKQSNNKYAASSYLSLTPEQWKSHRSYSCQVTHEGSTVEKTVAPTECSGRADCGFTSESYQQGVLSATILYEILLGKATLYAVLVSALVLMAMVKRKDSRGRAKRSGSGATNFSLLKQAGDVEENPGPTSMDWIWRILFLVGAATGAHSFEEVQLVESGGGLVQPGGSLRLSCAASGYTFSDYFMSWVRQAPGKGLEWVATISNGGTYTYYPDSVKGRFTISRDNSKNTLYLQMNSLRAEDTAVYYCARFDGYIFDYWGQGTLVTVSSTRASTKGPSVFPLAPSSKSTSGGTAALGCLVKDYFPEPVTVSWNSGALTSGVHTFPAVLQSSGLYSLSSVVTVPSSSLGTQTYICNVNHKPSNTKVDKRVEPKSCIPEDTFFPSPESSCDVKLVEKSFETDTNLNFQNLSVIGFRILLLKVAGFNLLMTLRLWSS

SEQ ID NO: 21235 - protein, 448 aa, Artificial Sequence
  Synthetic Polypeptide
MALPVTALLLPLALLLHAARPDIQMTQSPSSLSASVGDRVTITCRASQDISNYLNWYQQKPGKAPKLLIYYTSRLHSGVPSRFSGSGSGTDFTLTISSLQPEDFATYYCQQGNTLPYTFGQGTKVEIKRGGGGSGGGGSGGGGSEVQLVESGGGLVQPGGSLRLSCAASGYTFSDYFMSWVRQAPGKGLEWVATISNGGTYTYYPDSVKGRFTISRDNSKNTLYLQMNSLRAEDTAVYYCARFDGYIFDYWGQGTLVTVSSTRDGNEEMGGITQTPYKVSISGTTVILTCPQYPGSEILWQHNDKNIGGDEDDKNIGSDEDHLSLKEFSELEQSGYYVCYPRGSKPEDANFYLYLRARVCENCMEMDVMSVATIVIVDICITGGLLLLVYYWSKNRKAKAKPVTRGAGAGGRQRGQNKERPPPVPNPDYEPIRKGQRDLYSGLNQRRI

SEQ ID NO: 21236 - protein, 413 aa, Artificial Sequence
  Synthetic Polypeptide
MALPVTALLLPLALLLHAARPDIQMTQSPSSLSASVGDRVTITCRASQDISNYLNWYQQKPGKAPKLLIYYTSRLHSGVPSRFSGSGSGTDFTLTISSLQPEDFATYYCQQGNTLPYTFGQGTKVEIKRGGGGSGGGGSGGGGSEVQLVESGGGLVQPGGSLRLSCAASGYTFSDYFMSWVRQAPGKGLEWVATISNGGTYTYYPDSVKGRFTISRDNSKNTLYLQMNSLRAEDTAVYYCARFDGYIFDYWGQGTLVTVSSTRFKIPIEELEDRVFVNCNTSITWVEGTVGTLLSDITRLDLGKRILDPRGIYRCNGTDIYKDKESTVQVHYRMCQSCVELDPATVAGIIVTDVIATLLLALGVFCFAGHETGRLSGAADTQALLRNDQVYQPLRDRDDAQYSHLGGNWARNK

SEQ ID NO: 21237 - protein, 423 aa, Artificial Sequence
  Synthetic Polypeptide
MALPVTALLLPLALLLHAARPDIQMTQSPSSLSASVGDRVTITCRASQDISNYLNWYQQKPGKAPKLLIYYTSRLHSGVPSRFSGSGSGTDFTLTISSLQPEDFATYYCQQGNTLPYTFGQGTKVEIKRGGGGSGGGGSGGGGSEVQLVESGGGLVQPGGSLRLSCAASGYTFSDYFMSWVRQAPGKGLEWVATISNGGTYTYYPDSVKGRFTISRDNSKNTLYLQMNSLRAEDTAVYYCARFDGYIFDYWGQGTLVTVSSTRQSIKGNHLVKVYDYQEDGSVLLTCDAEAKNITWFKDGKMIGFLTEDKKKWNLGSNAKDPRGMYQCKGSQNKSKPLQVYYRMCQNCIELNAATISGFLFAEIVSIFVLAVGVYFIAGQDGVRQSRASDKQTLLPNDQLYQPLKDREDDQYSHLQGNQLRRN

SEQ ID NO: 21238 - protein, 406 aa, Artificial Sequence
  Synthetic Polypeptide
MALPVTALLLPLALLLHAARPDIQMTQSPSSLSASVGDRVTITCRASQDISNYLNWYQQKPGKAPKLLIYYTSRLHSGVPSRFSGSGSGTDFTLTISSLQPEDFATYYCQQGNTLPYTFGQGTKVEIKRGGGGSGGGGSGGGGSEVQLVESGGGLVQPGGSLRLSCAASGYTFSDYFMSWVRQAPGKGLEWVATISNGGTYTYYPDSVKGRFTISRDNSKNTLYLQMNSLRAEDTAVYYCARFDGYIFDYWGQGTLVTVSSTRQSFGLLDPKLCYLLDGILFIYGVILTALFLRVKFSRSADAPAYQQGQNQLYNELNLGRREEYDVLDKRRGRDPEMGGKPQRRKNPQEGLYNELQKDKMAEAYSEIGMKGERRRGKGHDGLYQGLSTATKDTYDALHMQALPPR

SEQ ID NO: 21239 - protein, 448 aa, Artificial Sequence
  Synthetic Polypeptide
MALPVTALLLPLALLLHAARPEVQLVESGGGLVQPGGSLRLSCAASGYTFSDYFMSWVRQAPGKGLEWVATISNGGTYTYYPDSVKGRFTISRDNSKNTLYLQMNSLRAEDTAVYYCARFDGYIFDYWGQGTLVTVSSGGGGSGGGGSGGGGSDIQMTQSPSSLSASVGDRVTITCRASQDISNYLNWYQQKPGKAPKLLIYYTSRLHSGVPSRFSGSGSGTDFTLTISSLQPEDFATYYCQQGNTLPYTFGQGTKVEIKRTRDGNEEMGGITQTPYKVSISGTTVILTCPQYPGSEILWQHNDKNIGGDEDDKNIGSDEDHLSLKEFSELEQSGYYVCYPRGSKPEDANFYLYLRARVCENCMEMDVMSVATIVIVDICITGGLLLLVYYWSKNRKAKAKPVTRGAGAGGRQRGQNKERPPPVPNPDYEPIRKGQRDLYSGLNQRRI

SEQ ID NO: 21240 - protein, 413 aa, Artificial Sequence
  Synthetic Polypeptide
MALPVTALLLPLALLLHAARPEVQLVESGGGLVQPGGSLRLSCAASGYTFSDYFMSWVRQAPGKGLEWVATISNGGTYTYYPDSVKGRFTISRDNSKNTLYLQMNSLRAEDTAVYYCARFDGYIFDYWGQGTLVTVSSGGGGSGGGGSGGGGSDIQMTQSPSSLSASVGDRVTITCRASQDISNYLNWYQQKPGKAPKLLIYYTSRLHSGVPSRFSGSGSGTDFTLTISSLQPEDFATYYCQQGNTLPYTFGQGTKVEIKRTRFKIPIEELEDRVFVNCNTSITWVEGTVGTLLSDITRLDLGKRILDPRGIYRCNGTDIYKDKESTVQVHYRMCQSCVELDPATVAGIIVTDVIATLLLALGVFCFAGHETGRLSGAADTQALLRNDQVYQPLRDRDDAQYSHLGGNWARNK

SEQ ID NO: 21241 - protein, 423 aa, Artificial Sequence
  Synthetic Polypeptide
MALPVTALLLPLALLLHAARPEVQLVESGGGLVQPGGSLRLSCAASGYTFSDYFMSWVRQAPGKGLEWVATISNGGTYTYYPDSVKGRFTISRDNSKNTLYLQMNSLRAEDTAVYYCARFDGYIFDYWGQGTLVTVSSGGGGSGGGGSGGGGSDIQMTQSPSSLSASVGDRVTITCRASQDISNYLNWYQQKPGKAPKLLIYYTSRLHSGVPSRFSGSGSGTDFTLTISSLQPEDFATYYCQQGNTLPYTFGQGTKVEIKRTRQSIKGNHLVKVYDYQEDGSVLLTCDAEAKNITWFKDGKMIGFLTEDKKKWNLGSNAKDPRGMYQCKGSQNKSKPLQVYYRMCQNCIELNAATISGFLFAEIVSIFVLAVGVYFIAGQDGVRQSRASDKQTLLPNDQLYQPLKDREDDQYSHLQGNQLRRN

SEQ ID NO: 21242 - protein, 406 aa, Artificial Sequence
  Synthetic Polypeptide
MALPVTALLLPLALLLHAARPEVQLVESGGGLVQPGGSLRLSCAASGYTFSDYFMSWVRQAPGKGLEWVATISNGGTYTYYPDSVKGRFTISRDNSKNTLYLQMNSLRAEDTAVYYCARFDGYIFDYWGQGTLVTVSSGGGGSGGGGSGGGGSDIQMTQSPSSLSASVGDRVTITCRASQDISNYLNWYQQKPGKAPKLLIYYTSRLHSGVPSRFSGSGSGTDFTLTISSLQPEDFATYYCQQGNTLPYTFGQGTKVEIKRTRQSFGLLDPKLCYLLDGILFIYGVILTALFLRVKFSRSADAPAYQQGQNQLYNELNLGRREEYDVLDKRRGRDPEMGGKPQRRKNPQEGLYNELQKDKMAEAYSEIGMKGERRRGKGHDGLYQGLSTATKDTYDALHMQALPPR

SEQ ID NO: 21243 - protein, 639 aa, Artificial Sequence
  Synthetic Polypeptide
MALPVTALLLPLALLLHAARPDIQMTQSPSSLSASVGDRVTITCRASQDISNYLNWYQQKPGKAPKLLIYYTSRLHSGVPSRFSGSGSGTDFTLTISSLQPEDFATYYCQQGNTLPYTFGQGTKVEIKRGGGGSGGGGSGGGGSEVQLVESGGGLVQPGGSLRLSCAASGYTFSDYFMSWVRQAPGKGLEWVATISNGGTYTYYPDSVKGRFTISRDNSKNTLYLQMNSLRAEDTAVYYCARFDGYIFDYWGQGTLVTVSSTRGSGIQNPDPAVYQLRDSKSSDKSVCLFTDFDSQTNVSQSKDSDVYITDKTVLDMRSMDFKSNSAVAWSNKSDFACANAFNNSIIPEDTFFPSPESSCDVKLVEKSFETDTNLNFQNLSVIGFRILLLKVAGFNLLMTLRLWSSRAKRSGSGVKQTLNFDLLKLAGDVESNPGPSRGHMTEYKPTVRLATRDDVPRAVRTLAAAFADYPATRHTVDPDRHIERVTELQELFLTRVGLDIGKVWVADDGAAVAVWTTPESVEAGAVFAEIGPRMAELSGSRLAAQQQMEGLLAPHRPKEPAWFLATVGVSPDHQGKGLGSAVVLPGVEAAERAGVPAFLETSAPRNLPFYERLGFTVTADVEVPEGPRTWCMTRKPGA

SEQ ID NO: 21244 - protein, 671 aa, Artificial Sequence
  Synthetic Polypeptide
MALPVTALLLPLALLLHAARPDIQMTQSPSSLSASVGDRVTITCRASQDISNYLNWYQQKPGKAPKLLIYYTSRLHSGVPSRFSGSGSGTDFTLTISSLQPEDFATYYCQQGNTLPYTFGQGTKVEIKRGGGGSGGGGSGGGGSEVQLVESGGGLVQPGGSLRLSCAASGYTFSDYFMSWVRQAPGKGLEWVATISNGGTYTYYPDSVKGRFTISRDNSKNTLYLQMNSLRAEDTAVYYCARFDGYIFDYWGQGTLVTVSSLEDLKNVFPPEVAVFEPSEAEISHTQKATLVCLATGFYPDHVELSWWVNGKEVHSGVSTDPQPLKEQPALNDSRYCLSSRLRVSATFWQNPRNHFRCQVQFYGLSENDEWTQDRAKPVTQIVSAEAWGRADCGFTSESYQQGVLSATILYEILLGKATLYAVLVSALVLMAMVKRKDSRGRAKRSGSGATNFSLLKQAGDVEENPGPTRGHMTEYKPTVRLATRDDVPRAVRTLAAAFADYPATRHTVDPDRHIERVTELQELFLTRVGLDIGKVWVADDGAAVAVWTTPESVEAGAVFAEIGPRMAELSGSRLAAQQQMEGLLAPHRPKEPAWFLATVGVSPDHQGKGLGSAVVLPGVEAAERAGVPAFLETSAPRNLPFYERLGFTVTADVEVPEGPRTWCMTRKPGA

SEQ ID NO: 21245 - protein, 721 aa, Artificial Sequence
  Synthetic Polypeptide
MALPVTALLLPLALLLHAARPDIQMTQSPSSLSASVGDRVTITCRASQDISNYLNWYQQKPGKAPKLLIYYTSRLHSGVPSRFSGSGSGTDFTLTISSLQPEDFATYYCQQGNTLPYTFGQGTKVEIKRGGGGSGGGGSGGGGSEVQLVESGGGLVQPGGSLRLSCAASGYTFSDYFMSWVRQAPGKGLEWVATISNGGTYTYYPDSVKGRFTISRDNSKNTLYLQMNSLRAEDTAVYYCARFDGYIFDYWGQGTLVTVSSTREQKLISEEDLGSGTPFPSLAPPIMLLVDGKQQMVVVCLVLDVAPPGLDSPIWFSAGNGSALDAFTYGPSPATDGTWTNLAHLSLPSEELASWEPLVCHTGPGAEGHSRSTQPMHLSGEASTARTCPQEPLRGTPGGALWLGVLRLLLFKLLLFDLLLTCSCLCDPAGPLPSPATTTRLRALGSHRLHPATETGGREATSSPRPQPRDRRWGDTPPGRKPGSPVRAKRSGSGVKQTLNFDLLKLAGDVESNPGPSRSRGHMTEYKPTVRLATRDDVPRAVRTLAAAFADYPATRHTVDPDRHIERVTELQELFLTRVGLDIGKVWVADDGAAVAVWTTPESVEAGAVFAEIGPRMAELSGSRLAAQQQMEGLLAPHRPKEPAWFLATVGVSPDHQGKGLGSAVVLPGVEAAERAGVPAFLETSAPRNLPFYERLGFTVTADVEVPEGPRTWCMTRKPGA

SEQ ID NO: 21246 - protein, 539 aa, Artificial Sequence
  Synthetic Polypeptide
MALPVTALLLPLALLLHAARPDIQMTQSPSSLSASVGDRVTITCRASQDISNYLNWYQQKPGKAPKLLIYYTSRLHSGVPSRFSGSGSGTDFTLTISSLQPEDFATYYCQQGNTLPYTFGQGTKVEIKRLEDLKNVFPPEVAVFEPSEAEISHTQKATLVCLATGFYPDHVELSWWVNGKEVHSGVSTDPQPLKEQPALNDSRYCLSSRLRVSATFWQNPRNHFRCQVQFYGLSENDEWTQDRAKPVTQIVSAEAWGRADCGFTSESYQQGVLSATILYEILLGKATLYAVLVSALVLMAMVKRKDSRGRAKRSGSGATNFSLLKQAGDVEENPGPTRGHMTEYKPTVRLATRDDVPRAVRTLAAAFADYPATRHTVDPDRHIERVTELQELFLTRVGLDIGKVWVADDGAAVAVWTTPESVEAGAVFAEIGPRMAELSGSRLAAQQQMEGLLAPHRPKEPAWFLATVGVSPDHQGKGLGSAVVLPGVEAAERAGVPAFLETSAPRNLPFYERLGFTVTADVEVPEGPRTWCMTRKPGA

SEQ ID NO: 21247 - protein, 309 aa, Artificial Sequence
  Synthetic Polypeptide
MALPVTALLLPLALLLHAARPDIQMTQSPSSLSASVGDRVTITCRASQDISNYLNWYQQKPGKAPKLLIYYTSRLHSGVPSRFSGSGSGTDFTLTISSLQPEDFATYYCQQGNTLPYTFGQGTKVEIKRLEDLKNVFPPEVAVFEPSEAEISHTQKATLVCLATGFYPDHVELSWWVNGKEVHSGVSTDPQPLKEQPALNDSRYCLSSRLRVSATFWQNPRNHFRCQVQFYGLSENDEWTQDRAKPVTQIVSAEAWGRADCGFTSESYQQGVLSATILYEILLGKATLYAVLVSALVLMAMVKRKDSRG

SEQ ID NO: 21248 - protein, 446 aa, Artificial Sequence
  Synthetic Polypeptide
MDWIWRILFLVGAATGAHSFEEVQLVESGGGLVQPGGSLRLSCAASGYTFSDYFMSWVRQAPGKGLEWVATISNGGTYTYYPDSVKGRFTISRDNSKNTLYLQMNSLRAEDTAVYYCARFDGYIFDYWGQGTLVTVSSTRIQNPDPAVYQLRDSKSSDKSVCLFTDFDSQTNVSQSKDSDVYITDKTVLDMRSMDFKSNSAVAWSNKSDFACANAFNNSIIPEDTFFPSPESSCDVKLVEKSFETDTNLNFQNLSVIGFRILLLKVAGFNLLMTLRLWSSRAKRSGSGVKQTLNFDLLKLAGDVESNPGPSRGHMAKPLSQEESTLIERATATINSIPISEDYSVASAALSSDGRIFTGVNVYHFTGGPCAELVVLGTAAAAAAGNLTCIVAIGNENRGILSPCGRCRQVLLDLHPGIKAIVKDSDGQPTAVGIRELLPSGYVWEG

SEQ ID NO: 21249 - protein, 280 aa, Artificial Sequence
  Synthetic Polypeptide
MDWIWRILFLVGAATGAHSFEEVQLVESGGGLVQPGGSLRLSCAASGYTFSDYFMSWVRQAPGKGLEWVATISNGGTYTYYPDSVKGRFTISRDNSKNTLYLQMNSLRAEDTAVYYCARFDGYIFDYWGQGTLVTVSSTRIQNPDPAVYQLRDSKSSDKSVCLFTDFDSQTNVSQSKDSDVYITDKTVLDMRSMDFKSNSAVAWSNKSDFACANAFNNSIIPEDTFFPSPESSCDVKLVEKSFETDTNLNFQNLSVIGFRILLLKVAGFNLLMTLRLWSS

SEQ ID NO: 21250 - protein, 557 aa, Artificial Sequence
  Synthetic Polypeptide
MALPVTALLLPLALLLHAARPDIQMTQSPSSLSASVGDRVTITCRASQDISNYLNWYQQKPGKAPKLLIYYTSRLHSGVPSRFSGSGSGTDFTLTISSLQPEDFATYYCQQGNTLPYTFGQGTKVEIKRLEGKPIPNPLLGLDSTGSGEDLKNVFPPEVAVFEPSEAEISHTQKATLVCLATGFYPDHVELSWWVNGKEVHSGVCTDPQPLKEQPALNDSRYCLSSRLRVSATFWQNPRNHFRCQVQFYGLSENDEWTQDRAKPVTQIVSAEAWGRADCGFTSESYQQGVLSATILYEILLGKATLYAVLVSALVLMAMVKRKDSRGRAKRSGSGATNFSLLKQAGDVEENPGPTRGHMTEYKPTVRLATRDDVPRAVRTLAAAFADYPATRHTVDPDRHIERVTELQELFLTRVGLDIGKVWVADDGAAVAVWTTPESVEAGAVFAEIGPRMAELSGSRLAAQQQMEGLLAPHRPKEPAWFLATVGVSPDHQGKGLGSAVVLPGVEAAERAGVPAFLETSAPRNLPFYERLGFTVTADVEVPEGPRTWCMTRKPGA

SEQ ID NO: 21251 - protein, 327 aa, Artificial Sequence
  Synthetic Polypeptide
MALPVTALLLPLALLLHAARPDIQMTQSPSSLSASVGDRVTITCRASQDISNYLNWYQQKPGKAPKLLIYYTSRLHSGVPSRFSGSGSGTDFTLTISSLQPEDFATYYCQQGNTLPYTFGQGTKVEIKRLEGKPIPNPLLGLDSTGSGEDLKNVFPPEVAVFEPSEAEISHTQKATLVCLATGFYPDHVELSWWVNGKEVHSGVCTDPQPLKEQPALNDSRYCLSSRLRVSATFWQNPRNHFRCQVQFYGLSENDEWTQDRAKPVTQIVSAEAWGRADCGFTSESYQQGVLSATILYEILLGKATLYAVLVSALVLMAMVKRKDSRG

SEQ ID NO: 21252 - protein, 458 aa, Artificial Sequence
  Synthetic Polypeptide
MDWIWRILFLVGAATGAHSFEEVQLVESGGGLVQPGGSLRLSCAASGYTFSDYFMSWVRQAPGKGLEWVATISNGGTYTYYPDSVKGRFTISRDNSKNTLYLQMNSLRAEDTAVYYCARFDGYIFDYWGQGTLVTVSSTREQKLISEEDGSGIQNPDPAVYQLRDSKSSDKSVCLFTDFDSQTNVSQSKDSDVYITDKCVLDMRSMDFKSNSAVAWSNKSDFACANAFNNSIIPEDTFFPSPESSCDVKLVEKSFETDTNLNFQNLSVIGFRILLLKVAGFNLLMTLRLWSSRAKRSGSGVKQTLNFDLLKLAGDVESNPGPSRGHMAKPLSQEESTLIERATATINSIPISEDYSVASAALSSDGRIFTGVNVYHFTGGPCAELVVLGTAAAAAAGNLTCIVAIGNENRGILSPCGRCRQVLLDLHPGIKAIVKDSDGQPTAVGIRELLPSGYVWEG

SEQ ID NO: 21253 - protein, 292 aa, Artificial Sequence
  Synthetic Polypeptide
MDWIWRILFLVGAATGAHSFEEVQLVESGGGLVQPGGSLRLSCAASGYTFSDYFMSWVRQAPGKGLEWVATISNGGTYTYYPDSVKGRFTISRDNSKNTLYLQMNSLRAEDTAVYYCARFDGYIFDYWGQGTLVTVSSTREQKLISEEDGSGIQNPDPAVYQLRDSKSSDKSVCLFTDFDSQTNVSQSKDSDVYITDKCVLDMRSMDFKSNSAVAWSNKSDFACANAFNNSIIPEDTFFPSPESSCDVKLVEKSFETDTNLNFQNLSVIGFRILLLKVAGFNLLMTLRLWSS

SEQ ID NO: 21254 - protein, 639 aa, Artificial Sequence
  Synthetic Polypeptide
MALPVTALLLPLALLLHAARPDIQMTQSPSSLSASVGDRVTITCRASQDISNYLNWYQQKPGKAPKLLIYYTSRLHSGVPSRFSGSGSGTDFTLTISSLQPEDFATYYCQQGNTLPYTFGQGTKVEIKRGGGGSGGGGSGGGGSEVQLVESGGGLVQPGGSLRLSCAASGYTFSDYFMSWVRQAPGKGLEWVATISNGGTYTYYPDSVKGRFTISRDNSKNTLYLQMNSLRAEDTAVYYCARFDGYIFDYWGQGTLVTVSSTRGSGIQNPDPAVYQLRDSKSSDKSVCLFTDFDSQTNVSQSKDSDVYITDKTVLDMRSMDFKSNSAVAWSNKSDFACANAFNNSIIPEDTFFPSSDVPCDVKLVEKSFETDTNLNFQNLSVIGFRILLLKVAGFNLLMTLRLWSSRAKRSGSGVKQTLNFDLLKLAGDVESNPGPSRGHMTEYKPTVRLATRDDVPRAVRTLAAAFADYPATRHTVDPDRHIERVTELQELFLTRVGLDIGKVWVADDGAAVAVWTTPESVEAGAVFAEIGPRMAELSGSRLAAQQQMEGLLAPHRPKEPAWFLATVGVSPDHQGKGLGSAVVLPGVEAAERAGVPAFLETSAPRNLPFYERLGFTVTADVEVPEGPRTWCMTRKPGA

SEQ ID NO: 21255 - protein, 671 aa, Artificial Sequence
  Synthetic Polypeptide
MALPVTALLLPLALLLHAARPDIQMTQSPSSLSASVGDRVTITCRASQDISNYLNWYQQKPGKAPKLLIYYTSRLHSGVPSRFSGSGSGTDFTLTISSLQPEDFATYYCQQGNTLPYTFGQGTKVEIKRGGGGSGGGGSGGGGSEVQLVESGGGLVQPGGSLRLSCAASGYTFSDYFMSWVRQAPGKGLEWVATISNGGTYTYYPDSVKGRFTISRDNSKNTLYLQMNSLRAEDTAVYYCARFDGYIFDYWGQGTLVTVSSLEDLKNVFPPEVAVFEPSKAEIAHTQKATLVCLATGFYPDHVELSWWVNGKEVHSGVSTDPQPLKEQPALNDSRYCLSSRLRVSATFWQNPRNHFRCQVQFYGLSENDEWTQDRAKPVTQIVSAEAWGRADCGITSASYHQGVLSATILYEILLGKATLYAVLVSALVLMAMVKRKDSRGRAKRSGSGATNFSLLKQAGDVEENPGPTRGHMTEYKPTVRLATRDDVPRAVRTLAAAFADYPATRHTVDPDRHIERVTELQELFLTRVGLDIGKVWVADDGAAVAVWTTPESVEAGAVFAEIGPRMAELSGSRLAAQQQMEGLLAPHRPKEPAWFLATVGVSPDHQGKGLGSAVVLPGVEAAERAGVPAFLETSAPRNLPFYERLGFTVTADVEVPEGPRTWCMTRKPGA

SEQ ID NO: 21256 - protein, 694 aa, Artificial Sequence
  Synthetic Polypeptide
MALPVTALLLPLALLLHAARPDIQMTQSPSSLSASVGDRVTITCRASQDISNYLNWYQQKPGKAPKLLIYYTSRLHSGVPSRFSGSGSGTDFTLTISSLQPEDFATYYCQQGNTLPYTFGQGTKVEIKRGGGGSGGGGSGGGGSEVQLVESGGGLVQPGGSLRLSCAASGYTFSDYFMSWVRQAPGKGLEWVATISNGGTYTYYPDSVKGRFTISRDNSKNTLYLQMNSLRAEDTAVYYCARFDGYIFDYWGQGTLVTVSSTRGSGGGGSGGGGSGDGNEEMGGITQTPYKVSISGTTVILTCPQYPGSEILWQHNDKNIGGDEDDKNIGSDEDHLSLKEFSELEQSGYYVCYPRGSKPEDANFYLYLRARVCENCMEMDVMSVATIVIVDICITGGLLLLVYYWSKNRKAKAKPVTRGAGAGGRQRGQNKERPPPVPNPDYEPIRKGQRDLYSGLNQRRIRAKRSGSGVKQTLNFDLLKLAGDVESNPGPSRGHMTEYKPTVRLATRDDVPRAVRTLAAAFADYPATRHTVDPDRHIERVTELQELFLTRVGLDIGKVWVADDGAAVAVWTTPESVEAGAVFAEIGPRMAELSGSRLAAQQQMEGLLAPHRPKEPAWFLATVGVSPDHQGKGLGSAVVLPGVEAAERAGVPAFLETSAPRNLPFYERLGFTVTADVEVPEGPRTWCMTRKPGA

SEQ ID NO: 21257 - protein, 659 aa, Artificial Sequence
  Synthetic Polypeptide
MALPVTALLLPLALLLHAARPDIQMTQSPSSLSASVGDRVTITCRASQDISNYLNWYQQKPGKAPKLLIYYTSRLHSGVPSRFSGSGSGTDFTLTISSLQPEDFATYYCQQGNTLPYTFGQGTKVEIKRGGGGSGGGGSGGGGSEVQLVESGGGLVQPGGSLRLSCAASGYTFSDYFMSWVRQAPGKGLEWVATISNGGTYTYYPDSVKGRFTISRDNSKNTLYLQMNSLRAEDTAVYYCARFDGYIFDYWGQGTLVTVSSTRGSGGGGSGGGGSGFKIPIEELEDRVFVNCNTSITWVEGTVGTLLSDITRLDLGKRILDPRGIYRCNGTDIYKDKESTVQVHYRMCQSCVELDPATVAGIIVTDVIATLLLALGVFCFAGHETGRLSGAADTQALLRNDQVYQPLRDRDDAQYSHLGGNWARNKRAKRSGSGVKQTLNFDLLKLAGDVESNPGPSRGHMTEYKPTVRLATRDDVPRAVRTLAAAFADYPATRHTVDPDRHIERVTELQELFLTRVGLDIGKVWVADDGAAVAVWTTPESVEAGAVFAEIGPRMAELSGSRLAAQQQMEGLLAPHRPKEPAWFLATVGVSPDHQGKGLGSAVVLPGVEAAERAGVPAFLETSAPRNLPFYERLGFTVTADVEVPEGPRTWCMTRKPGA

SEQ ID NO: 21258 - protein, 669 aa, Artificial Sequence
  Synthetic Polypeptide
MALPVTALLLPLALLLHAARPDIQMTQSPSSLSASVGDRVTITCRASQDISNYLNWYQQKPGKAPKLLIYYTSRLHSGVPSRFSGSGSGTDFTLTISSLQPEDFATYYCQQGNTLPYTFGQGTKVEIKRGGGGSGGGGSGGGGSEVQLVESGGGLVQPGGSLRLSCAASGYTFSDYFMSWVRQAPGKGLEWVATISNGGTYTYYPDSVKGRFTISRDNSKNTLYLQMNSLRAEDTAVYYCARFDGYIFDYWGQGTLVTVSSTRGSGGGGSGGGGSGQSIKGNHLVKVYDYQEDGSVLLTCDAEAKNITWFKDGKMIGFLTEDKKKWNLGSNAKDPRGMYQCKGSQNKSKPLQVYYRMCQNCIELNAATISGFLFAEIVSIFVLAVGVYFIAGQDGVRQSRASDKQTLLPNDQLYQPLKDREDDQYSHLQGNQLRRNRAKRSGSGVKQTLNFDLLKLAGDVESNPGPSRGHMTEYKPTVRLATRDDVPRAVRTLAAAFADYPATRHTVDPDRHIERVTELQELFLTRVGLDIGKVWVADDGAAVAVWTTPESVEAGAVFAEIGPRMAELSGSRLAAQQQMEGLLAPHRPKEPAWFLATVGVSPDHQGKGLGSAVVLPGVEAAERAGVPAFLETSAPRNLPFYERLGFTVTADVEVPEGPRTWCMTRKPGA

SEQ ID NO: 21259 - protein, 652 aa, Artificial Sequence
  Synthetic Polypeptide
MALPVTALLLPLALLLHAARPDIQMTQSPSSLSASVGDRVTITCRASQDISNYLNWYQQKPGKAPKLLIYYTSRLHSGVPSRFSGSGSGTDFTLTISSLQPEDFATYYCQQGNTLPYTFGQGTKVEIKRGGGGSGGGGSGGGGSEVQLVESGGGLVQPGGSLRLSCAASGYTFSDYFMSWVRQAPGKGLEWVATISNGGTYTYYPDSVKGRFTISRDNSKNTLYLQMNSLRAEDTAVYYCARFDGYIFDYWGQGTLVTVSSTRGSGGGGSGGGGSGQSFGLLDPKLCYLLDGILFIYGVILTALFLRVKFSRSADAPAYQQGQNQLYNELNLGRREEYDVLDKRRGRDPEMGGKPQRRKNPQEGLYNELQKDKMAEAYSEIGMKGERRRGKGHDGLYQGLSTATKDTYDALHMQALPPRRAKRSGSGVKQTLNFDLLKLAGDVESNPGPSRGHMTEYKPTVRLATRDDVPRAVRTLAAAFADYPATRHTVDPDRHIERVTELQELFLTRVGLDIGKVWVADDGAAVAVWTTPESVEAGAVFAEIGPRMAELSGSRLAAQQQMEGLLAPHRPKEPAWFLATVGVSPDHQGKGLGSAVVLPGVEAAERAGVPAFLETSAPRNLPFYERLGFTVTADVEVPEGPRTWCMTRKPGA

SEQ ID NO: 21260 - protein, 753 aa, Artificial Sequence
  Synthetic Polypeptide
MALPVTALLLPLALLLHAARPEVQLVESGGGLVQPGGSLRLSCAASGFSFSDFWMSWVRQAPGKGLEWVATISQAGSEKDYVDSVKGRFTISRDNAKKSLYLQMNSLRAEDTAVYYCASGVYSFDYRGQGTLVTVSSGTGGGGSGGGGSGGGGSEFDIQMTQSPSSLSASVGDRVTITCRASQDISNYLNWYQQKPGKAPKLLIYYTSRLHSGVPSRFSGSGSGTDFTLTISSLQPEDFATYYCQQGNTLPYTFGQGTKVEIKRLEDLKNVFPPEVAVFEPSEAEISHTQKATLVCLATGFYPDHVELSWWVNGKEVHSGVCTDPQPLKEQPALNDSRYCLSSRLRVSATFWQNPRNHFRCQVQFYGLSENDEWTQDRAKPVTQIVSAEAWGRADCGFTSESYQQGVLSATILYEILLGKATLYAVLVSALVLMAMVKRKDSRGRAKRSGSGATNFSLLKQAGDVEENPGPTSMDWIWRILFLVGAATGAHSFEEVQLVESGGGLVQPGGSLRLSCAASGYTFSDYFMSWVRQAPGKGLEWVATISNGGTYTYYPDSVKGRFTISRDNSKNTLYLQMNSLRAEDTAVYYCARFDGYIFDYWGQGTLVTVSSTRIQNPDPAVYQLRDSKSSDKSVCLFTDFDSQTNVSQSKDSDVYITDKCVLDMRSMDFKSNSAVAWSNKSDFACANAFNNSIIPEDTFFPSPESSCDVKLVEKSFETDTNLNFQNLSVIGFRILLLKVAGFNLLMTLRLWSS

SEQ ID NO: 21261 - protein, 757 aa, Artificial Sequence
  Synthetic Polypeptide
MALPVTALLLPLALLLHAARPEVQLVESGGGLVQPGGSLRLSCAASGFSFSDFWMSWVRQAPGKGLEWVATISQAGSEKDYVDSVKGRFTISRDNAKKSLYLQMNSLRAEDTAVYYCASGVYSFDYRGQGTLVTVSSGTGGGGSGGGGSGGGGSEFDIQMTQSPSSLSASVGDRVTITCRASQDISNYLNWYQQKPGKAPKLLIYYTSRLHSGVPSRFSGSGSGTDFTLTISSLQPEDFATYYCQQGNTLPYTFGQGTKVEIKRLEIQNPDPAVYQLRDSKSSDKSVCLFTDFDSQTNVSQSKDSDVYITDKCVLDMRSMDFKSNSAVAWSNKSDFACANAFNNSIIPEDTFFPSPESSCDVKLVEKSFETDTNLNFQNLSVIGFRILLLKVAGFNLLMTLRLWSSRAKRSGSGVKQTLNFDLLKLAGDVESNPGPTSMDWIWRILFLVGAATGAHSFEEVQLVESGGGLVQPGGSLRLSCAASGYTFSDYFMSWVRQAPGKGLEWVATISNGGTYTYYPDSVKGRFTISRDNSKNTLYLQMNSLRAEDTAVYYCARFDGYIFDYWGQGTLVTVSSTREDLKNVFPPEVAVFEPSEAEISHTQKATLVCLATGFYPDHVELSWWVNGKEVHSGVCTDPQPLKEQPALNDSRYCLSSRLRVSATFWQNPRNHFRCQVQFYGLSENDEWTQDRAKPVTQIVSAEAWGRADCGFTSESYQQGVLSATILYEILLGKATLYAVLVSALVLMAMVKRKDSRG

SEQ ID NO: 21262 - protein, 949 aa, Artificial Sequence
  Synthetic Polypeptide
MALPVTALLLPLALLLHAARPEVQLVESGGGLVQPGGSLRLSCAASGFSFSDFWMSWVRQAPGKGLEWVATISQAGSEKDYVDSVKGRFTISRDNAKKSLYLQMNSLRAEDTAVYYCASGVYSFDYRGQGTLVTVSSGTGGGGSGGGGSGGGGSEFDIQMTQSPSSLSASVGDRVTITCRASQDISNYLNWYQQKPGKAPKLLIYYTSRLHSGVPSRFSGSGSGTDFTLTISSLQPEDFATYYCQQGNTLPYTFGQGTKVEIKRLEDLKNVFPPEVAVFEPSEAEISHTQKATLVCLATGFYPDHVELSWWVNGKEVHSGVSTDPQPLKEQPALNDSRYCLSSRLRVSATFWQNPRNHFRCQVQFYGLSENDEWTQDRAKPVTQIVSAEAWGRADCGSQSFGLLDPKLCYLLDGILFIYGVILTALFLRVKFSRSADAPAYQQGQNQLYNELNLGRREEYDVLDKRRGRDPEMGGKPQRRKNPQEGLYNELQKDKMAEAYSEIGMKGERRRGKGHDGLYQGLSTATKDTYDALHMQALPPRRAKRSGSGATNFSLLKQAGDVEENPGPTSMDWIWRILFLVGAATGAHSFEEVQLVESGGGLVQPGGSLRLSCAASGYTFSDYFMSWVRQAPGKGLEWVATISNGGTYTYYPDSVKGRFTISRDNSKNTLYLQMNSLRAEDTAVYYCARFDGYIFDYWGQGTLVTVSSTRIQNPDPAVYQLRDSKSSDKSVCLFTDFDSQTNVSQSKDSDVYITDKTVLDMRSMDFKSNSAVAWSNKSDFACANAFNNSIIPEDTFFPSPESSCGTQSFGLLDPKLCYLLDGILFIYGVILTALFLRVKFSRSADAPAYQQGQNQLYNELNLGRREEYDVLDKRRGRDPEMGGKPQRRKNPQEGLYNELQKDKMAEAYSEIGMKGERRRGKGHDGLYQGLSTATKDTYDALHMQALPPR

SEQ ID NO: 21263 - protein, 779 aa, Artificial Sequence
  Synthetic Polypeptide
MALPVTALLLPLALLLHAARPEVQLVESGGGLVQPGGSLRLSCAASGFSFSDFWMSWVRQAPGKGLEWVATISQAGSEKDYVDSVKGRFTISRDNAKKSLYLQMNSLRAEDTAVYYCASGVYSFDYRGQGTLVTVSSGTGGGGSGGGGSGGGGSEFDIQMTQSPSSLSASVGDRVTITCRASQDISNYLNWYQQKPGKAPKLLIYYTSRLHSGVPSRFSGSGSGTDFTLTISSLQPEDFATYYCQQGNTLPYTFGQGTKVEIKRLEGQPKANPTVTLFPPSSEELQANKATLVCLISDFYPGAVTVAWKADGSPVKAGVETTKPSKQSNNKYAASSYLSLTPEQWKSHRSYSCQVTHEGSTVEKTVAPTECSPIKTDVITMDPKDNCSKDANDTLLLQLTNTSAYYMYLLLLLKSVVYFAIITCCLLRRTAFCCNGEKSRAKRSGSGATNFSLLKQAGDVEENPGPTSMDWIWRILFLVGAATGAHSFEEVQLVESGGGLVQPGGSLRLSCAASGYTFSDYFMSWVRQAPGKGLEWVATISNGGTYTYYPDSVKGRFTISRDNSKNTLYLQMNSLRAEDTAVYYCARFDGYIFDYWGQGTLVTVSSTRASTKGPSVFPLAPSSKSTSGGTAALGCLVKDYFPEPVTVSWNSGALTSGVHTFPAVLQSSGLYSLSSVVTVPSSSLGTQTYICNVNHKPSNTKVDKRVEPKSCEVKTDSTDHVKPKETENTKQPSKSCHKPKAIVHTEKVNMMSLTVLGLRMLFAKTVAVNFLLTAKLFFL

SEQ ID NO: 21264 - protein, 760 aa, Artificial Sequence
  Synthetic Polypeptide
MALPVTALLLPLALLLHAARPEVQLVESGGGLVQPGGSLRLSCAASGFSFSDFWMSWVRQAPGKGLEWVATISQAGSEKDYVDSVKGRFTISRDNAKKSLYLQMNSLRAEDTAVYYCASGVYSFDYRGQGTLVTVSSGTGGGGSGGGGSGGGGSEFDIQMTQSPSSLSASVGDRVTITCRASQDISNYLNWYQQKPGKAPKLLIYYTSRLHSGVPSRFSGSGSGTDFTLTISSLQPEDFATYYCQQGNTLPYTFGQGTKVEIKRLEGQPKANPTVTLFPPSSEELQANKATLVCLISDFYPGAVTVAWKADGSPVKAGVETTKPSKQSNNKYAASSYLSLTPEQWKSHRSYSCQVTHEGSTVEKTVAPTECSGRADCGFTSESYQQGVLSATILYEILLGKATLYAVLVSALVLMAMVKRKDSRGRAKRSGSGVKQTLNFDLLKLAGDVESNPGPTSMDWIWRILFLVGAATGAHSFEEVQLVESGGGLVQPGGSLRLSCAASGYTFSDYFMSWVRQAPGKGLEWVATISNGGTYTYYPDSVKGRFTISRDNSKNTLYLQMNSLRAEDTAVYYCARFDGYIFDYWGQGTLVTVSSTRASTKGPSVFPLAPSSKSTSGGTAALGCLVKDYFPEPVTVSWNSGALTSGVHTFPAVLQSSGLYSLSSVVTVPSSSLGTQTYICNVNHKPSNTKVDKRVEPKSCIPEDTFFPSPESSCDVKLVEKSFETDTNLNFQNLSVIGFRILLLKVAGFNLLMTLRLWSS

SEQ ID NO: 21265 - protein, 894 aa, Artificial Sequence
  Synthetic Polypeptide
MALPVTALLLPLALLLHAARPEVQLVESGGGLVQPGGSLRLSCAASGFSFSDFWMSWVRQAPGKGLEWVATISQAGSEKDYVDSVKGRFTISRDNAKKSLYLQMNSLRAEDTAVYYCASGVYSFDYRGQGTLVTVSSGTGGGGSGGGGSGGGGSEFDIQMTQSPSSLSASVGDRVTITCRASQDISNYLNWYQQKPGKAPKLLIYYTSRLHSGVPSRFSGSGSGTDFTLTISSLQPEDFATYYCQQGNTLPYTFGQGTKVEIKRLEIQNPDPAVYQLRDSKSSDKSVCLFTDFDSQTNVSQSKDSDVYITDKCVLDMRSMDFKSNSAVAWSNKSDFACANAFNNSIIPEDTFFPSPESSCDVKLVEKSFETDTNLNFQNLSVIGFRILLLKVAGFNLLMTLRLWSSRAKRSGSGVKQTLNFDLLKLAGDVESNPGPTSMDWIWRILFLVGAATGAHSGPQLQLQESGPGLVKPSETLSLTCTVSGDSISSGDYYWGWIRQPPGKGLEWIGHIYYSGVTYYNPSLKSRVTISVDTSRNQFSLKLSSVTAADTAVYYCTREDSSNWRSRGQGTLVTVSSGSGGGGSGGGGSGGGGSFEEVQLVESGGGLVQPGGSLRLSCAASGYTFSDYFMSWVRQAPGKGLEWVATISNGGTYTYYPDSVKGRFTISRDNSKNTLYLQMNSLRAEDTAVYYCARFDGYIFDYWGQGTLVTVSSTREDLKNVFPPEVAVFEPSEAEISHTQKATLVCLATGFYPDHVELSWWVNGKEVHSGVCTDPQPLKEQPALNDSRYCLSSRLRVSATFWQNPRNHFRCQVQFYGLSENDEWTQDRAKPVTQIVSAEAWGRADCGFTSESYQQGVLSATILYEILLGKATLYAVLVSALVLMAMVKRKDSRG

SEQ ID NO: 21266 - protein, 1086 aa, Artificial Sequence
  Synthetic Polypeptide
MALPVTALLLPLALLLHAARPEVQLVESGGGLVQPGGSLRLSCAASGFSFSDFWMSWVRQAPGKGLEWVATISQAGSEKDYVDSVKGRFTISRDNAKKSLYLQMNSLRAEDTAVYYCASGVYSFDYRGQGTLVTVSSGTGGGGSGGGGSGGGGSEFDIQMTQSPSSLSASVGDRVTITCRASQDISNYLNWYQQKPGKAPKLLIYYTSRLHSGVPSRFSGSGSGTDFTLTISSLQPEDFATYYCQQGNTLPYTFGQGTKVEIKRLEDLKNVFPPEVAVFEPSEAEISHTQKATLVCLATGFYPDHVELSWWVNGKEVHSGVSTDPQPLKEQPALNDSRYCLSSRLRVSATFWQNPRNHFRCQVQFYGLSENDEWTQDRAKPVTQIVSAEAWGRADCGSQSFGLLDPKLCYLLDGILFIYGVILTALFLRVKFSRSADAPAYQQGQNQLYNELNLGRREEYDVLDKRRGRDPEMGGKPQRRKNPQEGLYNELQKDKMAEAYSEIGMKGERRRGKGHDGLYQGLSTATKDTYDALHMQALPPRRAKRSGSGATNFSLLKQAGDVEENPGPTSMDWIWRILFLVGAATGAHSGPQLQLQESGPGLVKPSETLSLTCTVSGDSISSGDYYWGWIRQPPGKGLEWIGHIYYSGVTYYNPSLKSRVTISVDTSRNQFSLKLSSVTAADTAVYYCTREDSSNWRSRGQGTLVTVSSGSGGGGSGGGGSGGGGSFEEVQLVESGGGLVQPGGSLRLSCAASGYTFSDYFMSWVRQAPGKGLEWVATISNGGTYTYYPDSVKGRFTISRDNSKNTLYLQMNSLRAEDTAVYYCARFDGYIFDYWGQGTLVTVSSTRIQNPDPAVYQLRDSKSSDKSVCLFTDFDSQTNVSQSKDSDVYITDKTVLDMRSMDFKSNSAVAWSNKSDFACANAFNNSIIPEDTFFPSPESSCGTQSFGLLDPKLCYLLDGILFIYGVILTALFLRVKFSRSADAPAYQQGQNQLYNELNLGRREEYDVLDKRRGRDPEMGGKPQRRKNPQEGLYNELQKDKMAEAYSEIGMKGERRRGKGHDGLYQGLSTATKDTYDALHMQALPPR

SEQ ID NO: 21267 - protein, 916 aa, Artificial Sequence
  Synthetic Polypeptide
MALPVTALLLPLALLLHAARPEVQLVESGGGLVQPGGSLRLSCAASGFSFSDFWMSWVRQAPGKGLEWVATISQAGSEKDYVDSVKGRFTISRDNAKKSLYLQMNSLRAEDTAVYYCASGVYSFDYRGQGTLVTVSSGTGGGGSGGGGSGGGGSEFDIQMTQSPSSLSASVGDRVTITCRASQDISNYLNWYQQKPGKAPKLLIYYTSRLHSGVPSRFSGSGSGTDFTLTISSLQPEDFATYYCQQGNTLPYTFGQGTKVEIKRLEGQPKANPTVTLFPPSSEELQANKATLVCLISDFYPGAVTVAWKADGSPVKAGVETTKPSKQSNNKYAASSYLSLTPEQWKSHRSYSCQVTHEGSTVEKTVAPTECSPIKTDVITMDPKDNCSKDANDTLLLQLTNTSAYYMYLLLLLKSVVYFAIITCCLLRRTAFCCNGEKSRAKRSGSGATNFSLLKQAGDVEENPGPTSMDWIWRILFLVGAATGAHSGPQLQLQESGPGLVKPSETLSLTCTVSGDSISSGDYYWGWIRQPPGKGLEWIGHIYYSGVTYYNPSLKSRVTISVDTSRNQFSLKLSSVTAADTAVYYCTREDSSNWRSRGQGTLVTVSSGSGGGGSGGGGSGGGGSFEEVQLVESGGGLVQPGGSLRLSCAASGYTFSDYFMSWVRQAPGKGLEWVATISNGGTYTYYPDSVKGRFTISRDNSKNTLYLQMNSLRAEDTAVYYCARFDGYIFDYWGQGTLVTVSSTRASTKGPSVFPLAPSSKSTSGGTAALGCLVKDYFPEPVTVSWNSGALTSGVHTFPAVLQSSGLYSLSSVVTVPSSSLGTQTYICNVNHKPSNTKVDKRVEPKSCEVKTDSTDHVKPKETENTKQPSKSCHKPKAIVHTEKVNMMSLTVLGLRMLFAKTVAVNFLLTAKLFFL

SEQ ID NO: 21268 - protein, 897 aa, Artificial Sequence
  Synthetic Polypeptide
MALPVTALLLPLALLLHAARPEVQLVESGGGLVQPGGSLRLSCAASGFSFSDFWMSWVRQAPGKGLEWVATISQAGSEKDYVDSVKGRFTISRDNAKKSLYLQMNSLRAEDTAVYYCASGVYSFDYRGQGTLVTVSSGTGGGGSGGGGSGGGGSEFDIQMTQSPSSLSASVGDRVTITCRASQDISNYLNWYQQKPGKAPKLLIYYTSRLHSGVPSRFSGSGSGTDFTLTISSLQPEDFATYYCQQGNTLPYTFGQGTKVEIKRLEGQPKANPTVTLFPPSSEELQANKATLVCLISDFYPGAVTVAWKADGSPVKAGVETTKPSKQSNNKYAASSYLSLTPEQWKSHRSYSCQVTHEGSTVEKTVAPTECSGRADCGFTSESYQQGVLSATILYEILLGKATLYAVLVSALVLMAMVKRKDSRGRAKRSGSGVKQTLNFDLLKLAGDVESNPGPTSMDWIWRILFLVGAATGAHSGPQLQLQESGPGLVKPSETLSLTCTVSGDSISSGDYYWGWIRQPPGKGLEWIGHIYYSGVTYYNPSLKSRVTISVDTSRNQFSLKLSSVTAADTAVYYCTREDSSNWRSRGQGTLVTVSSGSGGGGSGGGGSGGGGSFEEVQLVESGGGLVQPGGSLRLSCAASGYTFSDYFMSWVRQAPGKGLEWVATISNGGTYTYYPDSVKGRFTISRDNSKNTLYLQMNSLRAEDTAVYYCARFDGYIFDYWGQGTLVTVSSTRASTKGPSVFPLAPSSKSTSGGTAALGCLVKDYFPEPVTVSWNSGALTSGVHTFPAVLQSSGLYSLSSVVTVPSSSLGTQTYICNVNHKPSNTKVDKRVEPKSCIPEDTFFPSPESSCDVKLVEKSFETDTNLNFQNLSVIGFRILLLKVAGFNLLMTLRLWSS

SEQ ID NO: 21269 - protein, 754 aa, Artificial Sequence
  Synthetic Polypeptide
MALPVTALLLPLALLLHAARPEVQVLESGGGLVQPGGSLRLSCAASGFTFSNFAMSWVRQAPGKGLEWVSTISGSAGTTDYADSVKGRFTISRDNSKKTLYLQMNSLRVEDTAVYYCADGRGPFFDYRGQGTLVTVSSGTGGGGSGGGGSGGGGSEFDIQMTQSPSSLSASVGDRVTITCRASQDISNYLNWYQQKPGKAPKLLIYYTSRLHSGVPSRFSGSGSGTDFTLTISSLQPEDFATYYCQQGNTLPYTFGQGTKVEIKRLEDLKNVFPPEVAVFEPSEAEISHTQKATLVCLATGFYPDHVELSWWVNGKEVHSGVCTDPQPLKEQPALNDSRYCLSSRLRVSATFWQNPRNHFRCQVQFYGLSENDEWTQDRAKPVTQIVSAEAWGRADCGFTSESYQQGVLSATILYEILLGKATLYAVLVSALVLMAMVKRKDSRGRAKRSGSGATNFSLLKQAGDVEENPGPTSMDWIWRILFLVGAATGAHSFEEVQLVESGGGLVQPGGSLRLSCAASGYTFSDYFMSWVRQAPGKGLEWVATISNGGTYTYYPDSVKGRFTISRDNSKNTLYLQMNSLRAEDTAVYYCARFDGYIFDYWGQGTLVTVSSTRIQNPDPAVYQLRDSKSSDKSVCLFTDFDSQTNVSQSKDSDVYITDKCVLDMRSMDFKSNSAVAWSNKSDFACANAFNNSIIPEDTFFPSPESSCDVKLVEKSFETDTNLNFQNLSVIGFRILLLKVAGFNLLMTLRLWSS

SEQ ID NO: 21270 - protein, 755 aa, Artificial Sequence
  Synthetic Polypeptide
MALPVTALLLPLALLLHAARPDIQMTQSPSSLSASVGDRVTITCRASQDISNYLNWYQQKPGKAPKLLIYYTSRLHSGVPSRFSGSGSGTDFTLTISSLQPEDFATYYCQQGNTLPYTFGQGTKVEIKRLEDLKNVFPPEVAVFEPSEAEISHTQKATLVCLATGFYPDHVELSWWVNGKEVHSGVCTDPQPLKEQPALNDSRYCLSSRLRVSATFWQNPRNHFRCQVQFYGLSENDEWTQDRAKPVTQIVSAEAWGRADCGFTSESYQQGVLSATILYEILLGKATLYAVLVSALVLMAMVKRKDSRGRAKRSGSGATNFSLLKQAGDVEENPGPTSMDWIWRILFLVGAATGAHSGPEVQLVESGGGLVQAGGSLRLSCAASGRTFSMGWFRQAPGKEREFVAAITYSGGSPYYADSVKGRFTISRDNAKNTVYLQMNSLKPEDTAVYYCAANPTYGSDWNAENWGQGTQVTVSSGSGGGGSGGGGSGGGGSFEEVQLVESGGGLVQPGGSLRLSCAASGYTFSDYFMSWVRQAPGKGLEWVATISNGGTYTYYPDSVKGRFTISRDNSKNTLYLQMNSLRAEDTAVYYCARFDGYIFDYWGQGTLVTVSSTRIQNPDPAVYQLRDSKSSDKSVCLFTDFDSQTNVSQSKDSDVYITDKCVLDMRSMDFKSNSAVAWSNKSDFACANAFNNSIIPEDTFFPSPESSCDVKLVEKSFETDTNLNFQNLSVIGFRILLLKVAGFNLLMTLRLWSS

SEQ ID NO: 21271 - protein, 882 aa, Artificial Sequence
  Synthetic Polypeptide
MALPVTALLLPLALLLHAARPDIQMTQSPSSLSASVGDRVTITCRASQDISNYLNWYQQKPGKAPKLLIYYTSRLHSGVPSRFSGSGSGTDFTLTISSLQPEDFATYYCQQGNTLPYTFGQGTKVEIKRLEDLKNVFPPEVAVFEPSEAEISHTQKATLVCLATGFYPDHVELSWWVNGKEVHSGVCTDPQPLKEQPALNDSRYCLSSRLRVSATFWQNPRNHFRCQVQFYGLSENDEWTQDRAKPVTQIVSAEAWGRADCGFTSESYQQGVLSATILYEILLGKATLYAVLVSALVLMAMVKRKDSRGRAKRSGSGATNFSLLKQAGDVEENPGPTSMDWIWRILFLVGAATGAHSQLQLQESGPGLVKPSETLSLTCTVSGGSISSGDYYWGWIRQPPGKGLEWIGSISYSGSTYYNPSLKSRVTISVDTSRNQFSLKLSSVTAADTAVYYCTREDSSNWRSRGQGTLVTVSSSGGGGSGGGGSEVQLVESGGGLVQAGGSLRLSCAASGRTFSMGWFRQAPGKEREFVAAITYSGGSPYYADSVKGRFTISRDNAKNTVYLQMNSLKPEDTAVYYCAANPTYGSDWNAENWGQGTQVTVSSGSGGGGSGGGGSGGGGSFEEVQLVESGGGLVQPGGSLRLSCAASGYTFSDYFMSWVRQAPGKGLEWVATISNGGTYTYYPDSVKGRFTISRDNSKNTLYLQMNSLRAEDTAVYYCARFDGYIFDYWGQGTLVTVSSTRIQNPDPAVYQLRDSKSSDKSVCLFTDFDSQTNVSQSKDSDVYITDKCVLDMRSMDFKSNSAVAWSNKSDFACANAFNNSIIPEDTFFPSPESSCDVKLVEKSFETDTNLNFQNLSVIGFRILLLKVAGFNLLMTLRLWSS

SEQ ID NO: 21272 - protein, 891 aa, Artificial Sequence
  Synthetic Polypeptide
MALPVTALLLPLALLLHAARPEVQVLESGGGLVQPGGSLRLSCAASGFTFSNFAMSWVRQAPGKGLEWVSTISGSAGTTDYADSVKGRFTISRDNSKKTLYLQMNSLRVEDTAVYYCADGRGPFFDYRGQGTLVTVSSGTGGGGSGGGGSGGGGSEFDIQMTQSPSSLSASVGDRVTITCRASQDISNYLNWYQQKPGKAPKLLIYYTSRLHSGVPSRFSGSGSGTDFTLTISSLQPEDFATYYCQQGNTLPYTFGQGTKVEIKRLEDLKNVFPPEVAVFEPSEAEISHTQKATLVCLATGFYPDHVELSWWVNGKEVHSGVCTDPQPLKEQPALNDSRYCLSSRLRVSATFWQNPRNHFRCQVQFYGLSENDEWTQDRAKPVTQIVSAEAWGRADCGFTSESYQQGVLSATILYEILLGKATLYAVLVSALVLMAMVKRKDSRGRAKRSGSGATNFSLLKQAGDVEENPGPTSMDWIWRILFLVGAATGAHSGPEVQLVESGGGLVQAGGSLRLSCAASGRTFSMGWFRQAPGKEREFVAAITYSGGSPYYASSVRGRFTISRDNAKNTVYLQMNSLKPEDTAVYYCAANPTYGSDWNAENWGQGTQVTVSSGSGGGGSGGGGSGGGGSFEEVQLVESGGGLVQPGGSLRLSCAASGYTFSDYFMSWVRQAPGKGLEWVATISNGGTYTYYPDSVKGRFTISRDNSKNTLYLQMNSLRAEDTAVYYCARFDGYIFDYWGQGTLVTVSSTRIQNPDPAVYQLRDSKSSDKSVCLFTDFDSQTNVSQSKDSDVYITDKCVLDMRSMDFKSNSAVAWSNKSDFACANAFNNSIIPEDTFFPSPESSCDVKLVEKSFETDTNLNFQNLSVIGFRILLLKVAGFNLLMTLRLWSS

SEQ ID NO: 21273 - protein, 722 aa, Artificial Sequence
  Synthetic Polypeptide
MALPVTALLLPLALLLHAARPDIQMTQSPSSLSASVGDRVTITCRASQDISSYLNWYQQKPGKAPKLLIYYTSRLHSGVPSRFSGSGSGTDFTLTISSLQPEDFATYYCQQGNTLPYTFGQGTKVEIKRGGGGSGGGGSGGGGSEVQLVESGGGLVQPGGSLRLSCAASGFTFSDYFMSWVRQAPGKGLEWVATISNGGTYTYYPDSVKGRFTISRDNSKNTLYLQMNSLRAEDTAVYYCARFDGYIFDYWGQGTLVTVSSTREQKLISEEDLAKPTTTPAPRPPTPAPTIASQPLSLRPEACRPAAGGAVHTRGLDFACDIYIWAPLAGTCGVLLLSLVITLYCKRGRKKLLYIFKQPFMRPVQTTQEEDGCSCRFPEEEEGGCELRVKFSRSADAPAYQQGQNQLYNELNLGRREEYDVLDKRRGRDPEMGGKPRRKNPQEGLYNELQKDKMAEAYSEIGMKGERRRGKGHDGLYQGLSTATKDTYDALHMQALPPRSSGSGEGRGSLLTCGDVEENPGPHMTEYKPTVRLATRDDVPRAVRTLAAAFADYPATRHTVDPDRHIERVTELQELFLTRVGLDIGKVWVADDGAAVAVWTTPESVEAGAVFAEIGPRMAELSGSRLAAQQQMEGLLAPHRPKEPAWFLATVGVSPDHQGKGLGSAVVLPGVEAAERAGVPAFLETSAPRNLPFYERLGFTVTADVEVPEGPRTWCMTRKPGA

SEQ ID NO: 21274 - protein, 716 aa, Artificial Sequence
  Synthetic Polypeptide
MALPVTALLLPLALLLHAARPDIQMTQSPSSLSASVGDRVTITCRASQDISSYLNWYQQKPGKAPKLLIYYTSRLHSGVPSRFSGSGSGTDFTLTISSLQPEDFATYYCQQGNTLPYTFGQGTKVEIKRGGGGSGGGGSGGGGSEVQLVESGGGLVQPGGSLRLSCAASGFTFSDYFMSWVRQAPGKGLEWVATISNGGTYTYYPDSVKGRFTISRDNSKNTLYLQMNSLRAEDTAVYYCARFDGYIFDYWGQGTLVTVSSTREQKLISEEDLKIEVMYPPPYLDNEKSNGTIIHVKGKHLCPSPLFPGPSKPFWVLVVVGGVLACYSLLVTVAFIIFWVRSKRSRLLHSDYMNMTPRRPGPTRKHYQPYAPPRDFAAYRSRVKFSRSADAPAYQQGQNQLYNELNLGRREEYDVLDKRRGRDPEMGGKPRRKNPQEGLYNELQKDKMAEAYSEIGMKGERRRGKGHDGLYQGLSTATKDTYDALHMQALPPRSSGSGEGRGSLLTCGDVEENPGPHMTEYKPTVRLATRDDVPRAVRTLAAAFADYPATRHTVDPDRHIERVTELQELFLTRVGLDIGKVWVADDGAAVAVWTTPESVEAGAVFAEIGPRMAELSGSRLAAQQQMEGLLAPHRPKEPAWFLATVGVSPDHQGKGLGSAVVLPGVEAAERAGVPAFLETSAPRNLPFYERLGFTVTADVEVPEGPRTWCMTRKPGA

SEQ ID NO: 21275 - protein, 493 aa, Artificial Sequence
  Synthetic Polypeptide
MALPVTALLLPLALLLHAARPDIQMTQSPSSLSASVGDRVTITCRASQDISSYLNWYQQKPGKAPKLLIYYTSRLHSGVPSRFSGSGSGTDFTLTISSLQPEDFATYYCQQGNTLPYTFGQGTKVEIKRGGGGSGGGGSGGGGSEVQLVESGGGLVQPGGSLRLSCAASGFTFSDYFMSWVRQAPGKGLEWVATISNGGTYTYYPDSVKGRFTISRDNSKNTLYLQMNSLRAEDTAVYYCARFDGYIFDYWGQGTLVTVSSTREQKLISEEDLKIEVMYPPPYLDNEKSNGTIIHVKGKHLCPSPLFPGPSKPFWVLVVVGGVLACYSLLVTVAFIIFWVRSKRSRLLHSDYMNMTPRRPGPTRKHYQPYAPPRDFAAYRSRVKFSRSADAPAYQQGQNQLYNELNLGRREEYDVLDKRRGRDPEMGGKPRRKNPQEGLYNELQKDKMAEAYSEIGMKGERRRGKGHDGLYQGLSTATKDTYDALHMQALPPR

SEQ ID NO: 21276 - protein, 499 aa, Artificial Sequence
  Synthetic Polypeptide
MALPVTALLLPLALLLHAARPDIQMTQSPSSLSASVGDRVTITCRASQDISSYLNWYQQKPGKAPKLLIYYTSRLHSGVPSRFSGSGSGTDFTLTISSLQPEDFATYYCQQGNTLPYTFGQGTKVEIKRGGGGSGGGGSGGGGSEVQLVESGGGLVQPGGSLRLSCAASGFTFSDYFMSWVRQAPGKGLEWVATISNGGTYTYYPDSVKGRFTISRDNSKNTLYLQMNSLRAEDTAVYYCARFDGYIFDYWGQGTLVTVSSTREQKLISEEDLAKPTTTPAPRPPTPAPTIASQPLSLRPEACRPAAGGAVHTRGLDFACDIYIWAPLAGTCGVLLLSLVITLYCKRGRKKLLYIFKQPFMRPVQTTQEEDGCSCRFPEEEEGGCELRVKFSRSADAPAYQQGQNQLYNELNLGRREEYDVLDKRRGRDPEMGGKPRRKNPQEGLYNELQKDKMAEAYSEIGMKGERRRGKGHDGLYQGLSTATKDTYDALHMQALPPR

SEQ ID NO: 21277 - protein, 499 aa, Artificial Sequence
  Synthetic Polypeptide
MALPVTALLLPLALLLHAARPEVQLVESGGGLVQPGGSLRLSCAASGFTFSDYFMSWVRQAPGKGLEWVATISNGGTYTYYPDSVKGRFTISRDNSKNTLYLQMNSLRAEDTAVYYCARFDGYIFDYWGQGTLVTVSSGGGGSGGGGSGGGGSDIQMTQSPSSLSASVGDRVTITCRASQDISSYLNWYQQKPGKAPKLLIYYTSRLHSGVPSRFSGSGSGTDFTLTISSLQPEDFATYYCQQGNTLPYTFGQGTKVEIKRTREQKLISEEDLAKPTTTPAPRPPTPAPTIASQPLSLRPEACRPAAGGAVHTRGLDFACDIYIWAPLAGTCGVLLLSLVITLYCKRGRKKLLYIFKQPFMRPVQTTQEEDGCSCRFPEEEEGGCELRVKFSRSADAPAYQQGQNQLYNELNLGRREEYDVLDKRRGRDPEMGGKPRRKNPQEGLYNELQKDKMAEAYSEIGMKGERRRGKGHDGLYQGLSTATKDTYDALHMQALPPR

SEQ ID NO: 21278 - protein, 912 aa, Artificial Sequence
  Synthetic Polypeptide
MALPVTALLLPLALLLHAARPDIQMTQSPSSLSASVGDRVTITCRASQDISSYLNWYQQKPGKAPKLLIYYTSRLHSGVPSRFSGSGSGTDFTLTISSLQPEDFATYYCQQGNTLPYTFGQGTKVEIKRGGGGSGGGGSGGGGSEVQLVESGGGLVQPGGSLRLSCAASGFTFSDYFMSWVRQAPGKGLEWVATISNGGTYTYYPDSVKGRFTISRDNSKNTLYLQMNSLRAEDTAVYYCARFDGYIFDYWGQGTLVTVSSTREQKLISEEDLAKPTTTPAPRPPTPAPTIASQPLSLRPEACRPAAGGAVHTRGLDFACDIYIWAPLAGTCGVLLLSLVITLYCGRARVKFSRSADAPAYQQGQNQLYNELNLGRREEYDVLDKRRGRDPEMGGKPRRKNPQEGLYNELQKDKMAEAYSEIGMKGERRRGKGHDGLYQGLSTATKDTYDALHMQALPPRSRGSGATNFSLLKQAGDVEENPGPGIHMATYEVLCEVARKLGTDDREVVLFLLNVFIPQPTLAQLIGALRALKEEGRLTFPLLAECLFRAGRRDLLRDLLHLDPRFLERHLAGTMSYFSPYQLTVLHVDGELCARDIRSLIFLSKDTIGSRSTPQTFLHWVYCMENLDLLGPTDVDALMSMLRSLSRVDLQRQVQTLMGLHLSGPSHSQHYRHTPLETDFYDYKDDDDKTSGSGEGRGSLLTCGDVEENPGPHMTEYKPTVRLATRDDVPRAVRTLAAAFADYPATRHTVDPDRHIERVTELQELFLTRVGLDIGKVWVADDGAAVAVWTTPESVEAGAVFAEIGPRMAELSGSRLAAQQQMEGLLAPHRPKEPAWFLATVGVSPDHQGKGLGSAVVLPGVEAAERAGVPAFLETSAPRNLPFYERLGFTVTADVEVPEGPRTWCMTRKPGA

SEQ ID NO: 21279 - protein, 852 aa, Artificial Sequence
  Synthetic Polypeptide
MALPVTALLLPLALLLHAARPDIQMTQSPSSLSASVGDRVTITCRASQDISSYLNWYQQKPGKAPKLLIYYTSRLHSGVPSRFSGSGSGTDFTLTISSLQPEDFATYYCQQGNTLPYTFGQGTKVEIKRLEIQNPDPAVYQLRDSKSSDKSVCLFTDFDSQTNVSQSKDSDVYITDKCVLDMRSMDFKSNSAVAWSNKSDFACANAFNNSIIPEDTFFPSSDVPCDVKLVEKSFETDTNLNFQNLSVIGFRILLLKVAGFNLLMTLRLWSSRAKRSGSGVKQTLNFDLLKLAGDVESNPGPTSMDWIWRILFLVGAATGAHSFEEVQLVESGGGLVQPGGSLRLSCAASGFTFSDYFMSWVRQAPGKGLEWVATISNGGTYTYYPDSVKGRFTISRDNSKNTLYLQMNSLRAEDTAVYYCARFDGYIFDYWGQGTLVTVSSTREDLKNVFPPEVAVFEPSKAEIAHTQKATLVCLATGFYPDHVELSWWVNGKEVHSGVCTDPQPLKEQPALNDSRYCLSSRLRVSATFWQNPRNHFRCQVQFYGLSENDEWTQDRAKPVTQIVSAEAWGRADCGITSASYHQGVLSATILYEILLGKATLYAVLVSALVLMAMVKRKDSRGRAKRSGSGATNFSLLKQAGDVEENPGPSRGHMTEYKPTVRLATRDDVPRAVRTLAAAFADYPATRHTVDPDRHIERVTELQELFLTRVGLDIGKVWVADDGAAVAVWTTPESVEAGAVFAEIGPRMAELSGSRLAAQQQMEGLLAPHRPKEPAWFLATVGVSPDHQGKGLGSAVVLPGVEAAERAGVPAFLETSAPRNLPFYERLGFTVTADVEVPEGPRTWCMTRKPGA

SEQ ID NO: 21280 - protein, 851 aa, Artificial Sequence
  Synthetic Polypeptide
MALPVTALLLPLALLLHAARPDIQMTQSPSSLSASVGDRVTITCRASQDISSYLNWYQQKPGKAPKLLIYYTSRLHSGVPSRFSGSGSGTDFTLTISSLQPEDFATYYCQQGNTLPYTFGQGTKVEIKRLEDLKNVFPPEVAVFEPSKAEIAHTQKATLVCLATGFYPDHVELSWWVNGKEVHSGVCTDPQPLKEQPALNDSRYCLSSRLRVSATFWQNPRNHFRCQVQFYGLSENDEWTQDRAKPVTQIVSAEAWGRADCGITSASYHQGVLSATILYEILLGKATLYAVLVSALVLMAMVKRKDSRGRAKRSGSGATNFSLLKQAGDVEENPGPTSMDWIWRILFLVGAATGAHSFEEVQLVESGGGLVQPGGSLRLSCAASGFTFSDYFMSWVRQAPGKGLEWVATISNGGTYTYYPDSVKGRFTISRDNSKNTLYLQMNSLRAEDTAVYYCARFDGYIFDYWGQGTLVTVSSTRIQNPDPAVYQLRDSKSSDKSVCLFTDFDSQTNVSQSKDSDVYITDKCVLDMRSMDFKSNSAVAWSNKSDFACANAFNNSIIPEDTFFPSSDVPCDVKLVEKSFETDTNLNFQNLSVIGFRILLLKVAGFNLLMTLRLWSSRAKRSGSGVKQTLNFDLLKLAGDVESNPGPSRGHMTEYKPTVRLATRDDVPRAVRTLAAAFADYPATRHTVDPDRHIERVTELQELFLTRVGLDIGKVWVADDGAAVAVWTTPESVEAGAVFAEIGPRMAELSGSRLAAQQQMEGLLAPHRPKEPAWFLATVGVSPDHQGKGLGSAVVLPGVEAAERAGVPAFLETSAPRNLPFYERLGFTVTADVEVPEGPRTWCMTRKPGA

SEQ ID NO: 21281 - protein, 618 aa, Artificial Sequence
  Synthetic Polypeptide
MALPVTALLLPLALLLHAARPDIQMTQSPSSLSASVGDRVTITCRASQDISSYLNWYQQKPGKAPKLLIYYTSRLHSGVPSRFSGSGSGTDFTLTISSLQPEDFATYYCQQGNTLPYTFGQGTKVEIKRLEDLKNVFPPEVAVFEPSEAEISHTQKATLVCLATGFYPDHVELSWWVNGKEVHSGVCTDPQPLKEQPALNDSRYCLSSRLRVSATFWQNPRNHFRCQVQFYGLSENDEWTQDRAKPVTQIVSAEAWGRADCGFTSESYQQGVLSATILYEILLGKATLYAVLVSALVLMAMVKRKDSRGRAKRSGSGATNFSLLKQAGDVEENPGPTSMDWIWRILFLVGAATGAHSFEEVQLVESGGGLVQPGGSLRLSCAASGFTFSDYFMSWVRQAPGKGLEWVATISNGGTYTYYPDSVKGRFTISRDNSKNTLYLQMNSLRAEDTAVYYCARFDGYIFDYWGQGTLVTVSSTRIQNPDPAVYQLRDSKSSDKSVCLFTDFDSQTNVSQSKDSDVYITDKCVLDMRSMDFKSNSAVAWSNKSDFACANAFNNSIIPEDTFFPSPESSCDVKLVEKSFETDTNLNFQNLSVIGFRILLLKVAGFNLLMTLRLWSS

SEQ ID NO: 21282 - protein, 843 aa, Artificial Sequence
  Synthetic Polypeptide
MALPVTALLLPLALLLHAARPDIQMTQSPSSLSASVGDRVTITCRASQDISSYLNWYQQKPGKAPKLLIYYTSRLHSGVPSRFSGSGSGTDFTLTISSLQPEDFATYYCQQGNTLPYTFGQGTKVEIKRLEDLKNVFPPEVAVFEPSEAEISHTQKATLVCLATGFYPDHVELSWWVNGKEVHSGVCTDPQPLKEQPALNDSRYCLSSRLRVSATFWQNPRNHFRCQVQFYGLSENDEWTQDRAKPVTQIVSAEAWGRADCGFTSESYQQGVLSATILYEILLGKATLYAVLVSALVLMAMVKRKDSRGRAKRSGSGATNFSLLKQAGDVEENPGPTSMDWIWRILFLVGAATGAHSFEEVQLVESGGGLVQPGGSLRLSCAASGFTFSDYFMSWVRQAPGKGLEWVATISNGGTYTYYPDSVKGRFTISRDNSKNTLYLQMNSLRAEDTAVYYCARFDGYIFDYWGQGTLVTVSSTRIQNPDPAVYQLRDSKSSDKSVCLFTDFDSQTNVSQSKDSDVYITDKCVLDMRSMDFKSNSAVAWSNKSDFACANAFNNSIIPEDTFFPSPESSCDVKLVEKSFETDTNLNFQNLSVIGFRILLLKVAGFNLLMTLRLWSSRAKRSGSGVKQTLNFDLLKLAGDVESNPGPSRGGIHTMATYEVLCEVARKLGTDDREVVLFLLNVFIPQPTLAQLIGALRALKEEGRLTFPLLAECLFRAGRRDLLRDLLHLDPRFLERHLAGTMSYFSPYQLTVLHVDGELCARDIRSLIFLSKDTIGSRSTPQTFLHWVYCMENLDLLGPTDVDALMSMLRSLSRVDLQRQVQTLMGLHLSGPSHSQHYRHTP

SEQ ID NO: 21283 - protein, 622 aa, Artificial Sequence
  Synthetic Polypeptide
MALPVTALLLPLALLLHAARPDIQMTQSPSSLSASVGDRVTITCRASQDISSYLNWYQQKPGKAPKLLIYYTSRLHSGVPSRFSGSGSGTDFTLTISSLQPEDFATYYCQQGNTLPYTFGQGTKVEIKRLEIQNPDPAVYQLRDSKSSDKSVCLFTDFDSQTNVSQSKDSDVYITDKCVLDMRSMDFKSNSAVAWSNKSDFACANAFNNSIIPEDTFFPSPESSCDVKLVEKSFETDTNLNFQNLSVIGFRILLLKVAGFNLLMTLRLWSSRAKRSGSGVKQTLNFDLLKLAGDVESNPGPTSMDWIWRILFLVGAATGAHSFEEVQLVESGGGLVQPGGSLRLSCAASGFTFSDYFMSWVRQAPGKGLEWVATISNGGTYTYYPDSVKGRFTISRDNSKNTLYLQMNSLRAEDTAVYYCARFDGYIFDYWGQGTLVTVSSTREDLKNVFPPEVAVFEPSEAEISHTQKATLVCLATGFYPDHVELSWWVNGKEVHSGVCTDPQPLKEQPALNDSRYCLSSRLRVSATFWQNPRNHFRCQVQFYGLSENDEWTQDRAKPVTQIVSAEAWGRADCGFTSESYQQGVLSATILYEILLGKATLYAVLVSALVLMAMVKRKDSRG

SEQ ID NO: 21284 - protein, 844 aa, Artificial Sequence
  Synthetic Polypeptide
MALPVTALLLPLALLLHAARPDIQMTQSPSSLSASVGDRVTITCRASQDISSYLNWYQQKPGKAPKLLIYYTSRLHSGVPSRFSGSGSGTDFTLTISSLQPEDFATYYCQQGNTLPYTFGQGTKVEIKRLEIQNPDPAVYQLRDSKSSDKSVCLFTDFDSQTNVSQSKDSDVYITDKCVLDMRSMDFKSNSAVAWSNKSDFACANAFNNSIIPEDTFFPSPESSCDVKLVEKSFETDTNLNFQNLSVIGFRILLLKVAGFNLLMTLRLWSSRAKRSGSGVKQTLNFDLLKLAGDVESNPGPTSMDWIWRILFLVGAATGAHSFEEVQLVESGGGLVQPGGSLRLSCAASGFTFSDYFMSWVRQAPGKGLEWVATISNGGTYTYYPDSVKGRFTISRDNSKNTLYLQMNSLRAEDTAVYYCARFDGYIFDYWGQGTLVTVSSTREDLKNVFPPEVAVFEPSEAEISHTQKATLVCLATGFYPDHVELSWWVNGKEVHSGVCTDPQPLKEQPALNDSRYCLSSRLRVSATFWQNPRNHFRCQVQFYGLSENDEWTQDRAKPVTQIVSAEAWGRADCGFTSESYQQGVLSATILYEILLGKATLYAVLVSALVLMAMVKRKDSRGRAKRSGSGATNFSLLKQAGDVEENPGPSRGGIHTMATYEVLCEVARKLGTDDREVVLFLLNVFIPQPTLAQLIGALRALKEEGRLTFPLLAECLFRAGRRDLLRDLLHLDPRFLERHLAGTMSYFSPYQLTVLHVDGELCARDIRSLIFLSKDTIGSRSTPQTFLHWVYCMENLDLLGPTDVDALMSMLRSLSRVDLQRQVQTLMGLHLSGPSHSQHYRHTP

SEQ ID NO: 21285 - protein, 896 aa, Artificial Sequence
  Synthetic Polypeptide
MALPVTALLLPLALLLHAARPLEGKPIPNPLLGLDSTGSGEDLKNVFPPEVAVFEPSKAEIAHTQKATLVCLATGFYPDHVELSWWVNGKEVHSGVCTDPQPLKEQPALNDSRYCLSSRLRVSATFWQNPRNHFRCQVQFYGLSENDEWTQDRAKPVTQIVSAEAWGRADCGITSASYHQGVLSATILYEILLGKATLYAVLVSALVLMAMVKRKDSRGRAKRSGSGATNFSLLKQAGDVEENPGPTSMALPVTALLLPLALLLHAARPDIQMTQSPSSLSASVGDRVTITCRASQDISSYLNWYQQKPGKAPKLLIYYTSRLHSGVPSRFSGSGSGTDFTLTISSLQPEDFATYYCQQGNTLPYTFGQGTKVEIKRGGGGSGGGGSGGGGSEVQLVESGGGLVQPGGSLRLSCAASGFTFSDYFMSWVRQAPGKGLEWVATISNGGTYTYYPDSVKGRFTISRDNSKNTLYLQMNSLRAEDTAVYYCARFDGYIFDYWGQGTLVTVSSTREQKLISEEDGSGIQNPDPAVYQLRDSKSSDKSVCLFTDFDSQTNVSQSKDSDVYITDKCVLDMRSMDFKSNSAVAWSNKSDFACANAFNNSIIPEDTFFPSSDVPCDVKLVEKSFETDTNLNFQNLSVIGFRILLLKVAGFNLLMTLRLWSSRAKRSGSGVKQTLNFDLLKLAGDVESNPGPSRGHMTEYKPTVRLATRDDVPRAVRTLAAAFADYPATRHTVDPDRHIERVTELQELFLTRVGLDIGKVWVADDGAAVAVWTTPESVEAGAVFAEIGPRMAELSGSRLAAQQQMEGLLAPHRPKEPAWFLATVGVSPDHQGKGLGSAVVLPGVEAAERAGVPAFLETSAPRNLPFYERLGFTVTADVEVPEGPRTWCMTRKPGA

SEQ ID NO: 21286 - protein, 897 aa, Artificial Sequence
  Synthetic Polypeptide
MALPVTALLLPLALLLHAARPLEQKLISEEDLGSGDRPDPAVYQLRDSKSSDKSVCLFTDFDSQTNVSQSKDSDVYITDKCVLDMRSMDFKSNSAVAWSNKSDFACANAFNNSIIPEDTFFPSPESSCDVKLVEKSFETDTNLNFQNLSVIGFRILLLKVAGFNLLMTLRLWSSSSRAKRSGSGVKQTLNFDLLKLAGDVESNPGPTSMALPVTALLLPLALLLHAARPDIQMTQSPSSLSASVGDRVTITCRASQDISSYLNWYQQKPGKAPKLLIYYTSRLHSGVPSRFSGSGSGTDFTLTISSLQPEDFATYYCQQGNTLPYTFGQGTKVEIKRGGGGSGGGGSGGGGSEVQLVESGGGLVQPGGSLRLSCAASGFTFSDYFMSWVRQAPGKGLEWVATISNGGTYTYYPDSVKGRFTISRDNSKNTLYLQMNSLRAEDTAVYYCARFDGYIFDYWGQGTLVTVSSTRGKPIPNPLLGLDSTGSGEDLKNVFPPEVAVFEPSEAEISHTQKATLVCLATGFYPDHVELSWWVNGKEVHSGVCTDPQPLKEQPALNDSRYCLSSRLRVSATFWQNPRNHFRCQVQFYGLSENDEWTQDRAKPVTQIVSAEAWGRADCGFTSESYQQGVLSATILYEILLGKATLYAVLVSALVLMAMVKRKDSRGRAKRSGSGATNFSLLKQAGDVEENPGPSRGHMTEYKPTVRLATRDDVPRAVRTLAAAFADYPATRHTVDPDRHIERVTELQELFLTRVGLDIGKVWVADDGAAVAVWTTPESVEAGAVFAEIGPRMAELSGSRLAAQQQMEGLLAPHRPKEPAWFLATVGVSPDHQGKGLGSAVVLPGVEAAERAGVPAFLETSAPRNLPFYERLGFTVTADVEVPEGPRTWCMTRKPGA

SEQ ID NO: 21287 - protein, 851 aa, Artificial Sequence
  Synthetic Polypeptide
MALPVTALLLPLALLLHAARPDIQMTQSPSSLSASVGDRVTITCRASQDISSYLNWYQQKPGKAPKLLIYYTSRLHSGVPSRFSGSGSGTDFTLTISSLQPEDFATYYCQQGNTLPYTFGQGTKVEIKRLEDLKNVFPPEVAVFEPSEAEISHTQKATLVCLATGFYPDHVELSWWVNGKEVHSGVSTDPQPLKEQPALNDSRYCLSSRLRVSATFWQNPRNHFRCQVQFYGLSENDEWTQDRAKPVTQIVSAEAWGRADCGFTSESYQQGVLSATILYEILLGKATLYAVLVSALVLMAMVKRKDSRGRAKRSGSGATNFSLLKQAGDVEENPGPTSMDWIWRILFLVGAATGAHSFEEVQLVESGGGLVQPGGSLRLSCAASGFTFSDYFMSWVRQAPGKGLEWVATISNGGTYTYYPDSVKGRFTISRDNSKNTLYLQMNSLRAEDTAVYYCARFDGYIFDYWGQGTLVTVSSTRIQNPDPAVYQLRDSKSSDKSVCLFTDFDSQTNVSQSKDSDVYITDKTVLDMRSMDFKSNSAVAWSNKSDFACANAFNNSIIPEDTFFPSPESSCDVKLVEKSFETDTNLNFQNLSVIGFRILLLKVAGFNLLMTLRLWSSRAKRSGSGVKQTLNFDLLKLAGDVESNPGPSRGHMTEYKPTVRLATRDDVPRAVRTLAAAFADYPATRHTVDPDRHIERVTELQELFLTRVGLDIGKVWVADDGAAVAVWTTPESVEAGAVFAEIGPRMAELSGSRLAAQQQMEGLLAPHRPKEPAWFLATVGVSPDHQGKGLGSAVVLPGVEAAERAGVPAFLETSAPRNLPFYERLGFTVTADVEVPEGPRTWCMTRKPGA

SEQ ID NO: 21288 - protein, 933 aa, Artificial Sequence
  Synthetic Polypeptide
MALPVTALLLPLALLLHAARPDIQMTQSPSSLSASVGDRVTITCRASQDISSYLNWYQQKPGKAPKLLIYYTSRLHSGVPSRFSGSGSGTDFTLTISSLQPEDFATYYCQQGNTLPYTFGQGTKVEIKRLEDLKNVFPPEVAVFEPSEAEISHTQKATLVCLATGFYPDHVELSWWVNGKEVHSGVSTDPQPLKEQPALNDSRYCLSSRLRVSATFWQNPRNHFRCQVQFYGLSENDEWTQDRAKPVTQIVSAEAWGRADCGFTSESYQQGVLSATILYEILLGKATLYAVLVSALVLMAMVKRKDSRGRAKRSGSGATNFSLLKQAGDVEENPGPTSMDWIWRILFLVGAATGAHSFEEVQLVESGGGLVQPGGSLRLSCAASGFTFSDYFMSWVRQAPGKGLEWVATISNGGTYTYYPDSVKGRFTISRDNSKNTLYLQMNSLRAEDTAVYYCARFDGYIFDYWGQGTLVTVSSTREQKLISEEDGSGTPFPSLAPPIMLLVDGKQQMVVVCLVLDVAPPGLDSPIWFSAGNGSALDAFTYGPSPATDGTWTNLAHLSLPSEELASWEPLVCHTGPGAEGHSRSTQPMHLSGEASTARTCPQEPLRGTPGGALWLGVLRLLLFKLLLFDLLLTCSCLCDPAGPLPSPATTTRLRALGSHRLHPATETGGREATSSPRPQPRDRRWGDTPPGRKPGSPVRAKRSGSGVKQTLNFDLLKLAGDVESNPGPSRGHMTEYKPTVRLATRDDVPRAVRTLAAAFADYPATRHTVDPDRHIERVTELQELFLTRVGLDIGKVWVADDGAAVAVWTTPESVEAGAVFAEIGPRMAELSGSRLAAQQQMEGLLAPHRPKEPAWFLATVGVSPDHQGKGLGSAVVLPGVEAAERAGVPAFLETSAPRNLPFYERLGFTVTADVEVPEGPRTWCMTRKPGA

SEQ ID NO: 21289 - protein, 951 aa, Artificial Sequence
  Synthetic Polypeptide
MALPVTALLLPLALLLHAARPLEDLKNVFPPEVAVFEPSEAEISHTQKATLVCLATGFYPDHVELSWWVNGKEVHSGVSTDPQPLKEQPALNDSRYCLSSRLRVSATFWQNPRNHFRCQVQFYGLSENDEWTQDRAKPVTQIVSAEAWGRADCGFTSESYQQGVLSATILYEILLGKATLYAVLVSALVLMAMVKRKDSRGRAKRSGSGATNFSLLKQAGDVEENPGPTSMALPVTALLLPLALLLHAARPDIQMTQSPSSLSASVGDRVTITCRASQDISSYLNWYQQKPGKAPKLLIYYTSRLHSGVPSRFSGSGSGTDFTLTISSLQPEDFATYYCQQGNTLPYTFGQGTKVEIKRGGGGSGGGGSGGGGSEVQLVESGGGLVQPGGSLRLSCAASGFTFSDYFMSWVRQAPGKGLEWVATISNGGTYTYYPDSVKGRFTISRDNSKNTLYLQMNSLRAEDTAVYYCARFDGYIFDYWGQGTLVTVSSTREQKLISEEDLGSGTPFPSLAPPIMLLVDGKQQMVVVCLVLDVAPPGLDSPIWFSAGNGSALDAFTYGPSPATDGTWTNLAHLSLPSEELASWEPLVCHTGPGAEGHSRSTQPMHLSGEASTARTCPQEPLRGTPGGALWLGVLRLLLFKLLLFDLLLTCSCLCDPAGPLPSPATTTRLRALGSHRLHPATETGGREATSSPRPQPRDRRWGDTPPGRKPGSPVRAKRSGSGVKQTLNFDLLKLAGDVESNPGPSRSRGHMTEYKPTVRLATRDDVPRAVRTLAAAFADYPATRHTVDPDRHIERVTELQELFLTRVGLDIGKVWVADDGAAVAVWTTPESVEAGAVFAEIGPRMAELSGSRLAAQQQMEGLLAPHRPKEPAWFLATVGVSPDHQGKGLGSAVVLPGVEAAERAGVPAFLETSAPRNLPFYERLGFTVTADVEVPEGPRTWCMTRKPGA

SEQ ID NO: 21290 - protein, 888 aa, Artificial Sequence
  Synthetic Polypeptide
MALPVTALLLPLALLLHAARPDIQMTQSPSSLSASVGDRVTITCRASQDISSYLNWYQQKPGKAPKLLIYYTSRLHSGVPSRFSGSGSGTDFTLTISSLQPEDFATYYCQQGNTLPYTFGQGTKVEIKRLEGKPIPNPLLGLDSTGSGDKQLDADVSPKPTIFLPSIAETKLQKAGTYLCLLEKFFPDVIKIHWQEKKSNTILGSQEGNTMKTNDTYMKFSWLTVPEKSLDKEHRCIVRHENNKNGVDQEIIFPPIKTDVITMDPKDNCSKDANDTLLLQLTNTSAYYMYLLLLLKSVVYFAIITCCLLRRTAFCCNGEKSRAKRSGSGATNFSLLKQAGDVEENPGPTSMDWIWRILFLVGAATGAHSFEEVQLVESGGGLVQPGGSLRLSCAASGFTFSDYFMSWVRQAPGKGLEWVATISNGGTYTYYPDSVKGRFTISRDNSKNTLYLQMNSLRAEDTAVYYCARFDGYIFDYWGQGTLVTVSSTREQKLISEEDGSGSQPHTKPSVFVMKNGTNVACLVKEFYPKDIRINLVSSKKITEFDPAIVISPSGKYNAVKLGKYEDSNSVTCSVQHDNKTVHSTDFEVKTDSTDHVKPKETENTKQPSKSCHKPKAIVHTEKVNMMSLTVLGLRMLFAKTVAVNFLLTAKLFFLRAKRSGSGVKQTLNFDLLKLAGDVESNPGPSRGHMTEYKPTVRLATRDDVPRAVRTLAAAFADYPATRHTVDPDRHIERVTELQELFLTRVGLDIGKVWVADDGAAVAVWTTPESVEAGAVFAEIGPRMAELSGSRLAAQQQMEGLLAPHRPKEPAWFLATVGVSPDHQGKGLGSAVVLPGVEAAERAGVPAFLETSAPRNLPFYERLGFTVTADVEVPEGPRTWCMTRKPGA

SEQ ID NO: 21291 - protein, 626 aa, Artificial Sequence
  Synthetic Polypeptide
MALPVTALLLPLALLLHAARPDIQMTQSPSSLSASVGDRVTITCRASQDISSYLNWYQQKPGKAPKLLIYYTSRLHSGVPSRFSGSGSGTDFTLTISSLQPEDFATYYCQQGNTLPYTFGQGTKVEIKRLESQPHTKPSVFVMKNGTNVACLVKEFYPKDIRINLVSSKKITEFDPAIVISPSGKYNAVKLGKYEDSNSVTCSVQHDNKTVHSTDFEVKTDSTDHVKPKETENTKQPSKSCHKPKAIVHTEKVNMMSLTVLGLRMLFAKTVAVNFLLTAKLFFLRAKRSGSGATNFSLLKQAGDVEENPGPTSMDWIWRILFLVGAATGAHSFEEVQLVESGGGLVQPGGSLRLSCAASGFTFSDYFMSWVRQAPGKGLEWVATISNGGTYTYYPDSVKGRFTISRDNSKNTLYLQMNSLRAEDTAVYYCARFDGYIFDYWGQGTLVTVSSTRDKQLDADVSPKPTIFLPSIAETKLQKAGTYLCLLEKFFPDVIKIHWQEKKSNTILGSQEGNTMKTNDTYMKFSWLTVPEKSLDKEHRCIVRHENNKNGVDQEIIFPPIKTDVITMDPKDNCSKDANDTLLLQLTNTSAYYMYLLLLLKSVVYFAIITCCLLRRTAFCCNGEKS

SEQ ID NO: 21292 - protein, 903 aa, Artificial Sequence
  Synthetic Polypeptide
MALPVTALLLPLALLLHAARPLEGKPIPNPLLGLDSTGSGDKQLDADVSPKPTIFLPSIAETKLQKAGTYLCLLEKFFPDVIKIHWQEKKSNTILGSQEGNTMKTNDTYMKFSWLTVPEKSLDKEHRCIVRHENNKNGVDQEIIFPPIKTDVITMDPKDNCSKDANDTLLLQLTNTSAYYMYLLLLLKSVVYFAIITCCLLRRTAFCCNGEKSRAKRSGSGATNFSLLKQAGDVEENPGPTSMALPVTALLLPLALLLHAARPDIQMTQSPSSLSASVGDRVTITCRASQDISSYLNWYQQKPGKAPKLLIYYTSRLHSGVPSRFSGSGSGTDFTLTISSLQPEDFATYYCQQGNTLPYTFGQGTKVEIKRGGGGSGGGGSGGGGSEVQLVESGGGLVQPGGSLRLSCAASGFTFSDYFMSWVRQAPGKGLEWVATISNGGTYTYYPDSVKGRFTISRDNSKNTLYLQMNSLRAEDTAVYYCARFDGYIFDYWGQGTLVTVSSTREQKLISEEDGSGSQPHTKPSVFVMKNGTNVACLVKEFYPKDIRINLVSSKKITEFDPAIVISPSGKYNAVKLGKYEDSNSVTCSVQHDNKTVHSTDFEVKTDSTDHVKPKETENTKQPSKSCHKPKAIVHTEKVNMMSLTVLGLRMLFAKTVAVNFLLTAKLFFLRAKRSGSGVKQTLNFDLLKLAGDVESNPGPSRGHMTEYKPTVRLATRDDVPRAVRTLAAAFADYPATRHTVDPDRHIERVTELQELFLTRVGLDIGKVWVADDGAAVAVWTTPESVEAGAVFAEIGPRMAELSGSRLAAQQQMEGLLAPHRPKEPAWFLATVGVSPDHQGKGLGSAVVLPGVEAAERAGVPAFLETSAPRNLPFYERLGFTVTADVEVPEGPRTWCMTRKPGA

SEQ ID NO: 21293 - protein, 1028 aa, Artificial Sequence
  Synthetic Polypeptide
MALPVTALLLPLALLLHAARPDIQMTQSPSSLSASVGDRVTITCRASQDISSYLNWYQQKPGKAPKLLIYYTSRLHSGVPSRFSGSGSGTDFTLTISSLQPEDFATYYCQQGNTLPYTFGQGTKVEIKRGQPKANPTVTLFPPSSEELQANKATLVCLISDFYPGAVTVAWKADGSPVKAGVETTKPSKQSNNKYAASSYLSLTPEQWKSHRSYSCQVTHEGSTVEKTVAPTECSGSQSFGLLDPKLCYLLDGILFIYGVILTALFLRVKFSRSADAPAYQQGQNQLYNELNLGRREEYDVLDKRRGRDPEMGGKPQRRKNPQEGLYNELQKDKMAEAYSEIGMKGERRRGKGHDGLYQGLSTATKDTYDALHMQALPPRRAKRSGSGATNFSLLKQAGDVEENPGPTSMDWIWRILFLVGAATGAHSFEEVQLVESGGGLVQPGGSLRLSCAASGFTFSDYFMSWVRQAPGKGLEWVATISNGGTYTYYPDSVKGRFTISRDNSKNTLYLQMNSLRAEDTAVYYCARFDGYIFDYWGQGTLVTVSSASTKGPSVFPLAPSSKSTSGGTAALGCLVKDYFPEPVTVSWNSGALTSGVHTFPAVLQSSGLYSLSSVVTVPSSSLGTQTYICNVNHKPSNTKVDKRVEPKSCGTQSFGLLDPKLCYLLDGILFIYGVILTALFLRVKFSRSADAPAYQQGQNQLYNELNLGRREEYDVLDKRRGRDPEMGGKPQRRKNPQEGLYNELQKDKMAEAYSEIGMKGERRRGKGHDGLYQGLSTATKDTYDALHMQALPPRRAKRSGSGVKQTLNFDLLKLAGDVESNPGPSRGHMTEYKPTVRLATRDDVPRAVRTLAAAFADYPATRHTVDPDRHIERVTELQELFLTRVGLDIGKVWVADDGAAVAVWTTPESVEAGAVFAEIGPRMAELSGSRLAAQQQMEGLLAPHRPKEPAWFLATVGVSPDHQGKGLGSAVVLPGVEAAERAGVPAFLETSAPRNLPFYERLGFTVTADVEVPEGPRTWCMTRKPGA

SEQ ID NO: 21294 - protein, 814 aa, Artificial Sequence
  Synthetic Polypeptide
MALPVTALLLPLALLLHAARPDIQMTQSPSSLSASVGDRVTITCRASQDISSYLNWYQQKPGKAPKLLIYYTSRLHSGVPSRFSGSGSGTDFTLTISSLQPEDFATYYCQQGNTLPYTFGQGTKVEIKRLEDLKNVFPPEVAVFEPSEAEISHTQKATLVCLATGFYPDHVELSWWVNGKEVHSGVSTDPQPLKEQPALNDSRYCLSSRLRVSATFWQNPRNHFRCQVQFYGLSENDEWTQDRAKPVTQIVSAEAWGRADCGSQSFGLLDPKLCYLLDGILFIYGVILTALFLRVKFSRSADAPAYQQGQNQLYNELNLGRREEYDVLDKRRGRDPEMGGKPQRRKNPQEGLYNELQKDKMAEAYSEIGMKGERRRGKGHDGLYQGLSTATKDTYDALHMQALPPRRAKRSGSGATNFSLLKQAGDVEENPGPTSMDWIWRILFLVGAATGAHSFEEVQLVESGGGLVQPGGSLRLSCAASGFTFSDYFMSWVRQAPGKGLEWVATISNGGTYTYYPDSVKGRFTISRDNSKNTLYLQMNSLRAEDTAVYYCARFDGYIFDYWGQGTLVTVSSTRIQNPDPAVYQLRDSKSSDKSVCLFTDFDSQTNVSQSKDSDVYITDKTVLDMRSMDFKSNSAVAWSNKSDFACANAFNNSIIPEDTFFPSPESSCGTQSFGLLDPKLCYLLDGILFIYGVILTALFLRVKFSRSADAPAYQQGQNQLYNELNLGRREEYDVLDKRRGRDPEMGGKPQRRKNPQEGLYNELQKDKMAEAYSEIGMKGERRRGKGHDGLYQGLSTATKDTYDALHMQALPPR

SEQ ID NO: 21295 - protein, 814 aa, Artificial Sequence
  Synthetic Polypeptide
MALPVTALLLPLALLLHAARPDIQMTQSPSSLSASVGDRVTITCRASQDISSYLNWYQQKPGKAPKLLIYYTSRLHSGVPSRFSGSGSGTDFTLTISSLQPEDFATYYCQQGNTLPYTFGQGTKVEIKRLEDLKNVFPPEVAVFEPSKAEIAHTQKATLVCLATGFYPDHVELSWWVNGKEVHSGVCTDPQPLKEQPALNDSRYCLSSRLRVSATFWQNPRNHFRCQVQFYGLSENDEWTQDRAKPVTQIVSAEAWGRADCGSQSFGLLDPKLCYLLDGILFIYGVILTALFLRVKFSRSADAPAYQQGQNQLYNELNLGRREEYDVLDKRRGRDPEMGGKPQRRKNPQEGLYNELQKDKMAEAYSEIGMKGERRRGKGHDGLYQGLSTATKDTYDALHMQALPPRRAKRSGSGATNFSLLKQAGDVEENPGPTSMDWIWRILFLVGAATGAHSFEEVQLVESGGGLVQPGGSLRLSCAASGFTFSDYFMSWVRQAPGKGLEWVATISNGGTYTYYPDSVKGRFTISRDNSKNTLYLQMNSLRAEDTAVYYCARFDGYIFDYWGQGTLVTVSSTRIQNPDPAVYQLRDSKSSDKSVCLFTDFDSQTNVSQSKDSDVYITDKCVLDMRSMDFKSNSAVAWSNKSDFACANAFNNSIIPEDTFFPSSDVPCGTQSFGLLDPKLCYLLDGILFIYGVILTALFLRVKFSRSADAPAYQQGQNQLYNELNLGRREEYDVLDKRRGRDPEMGGKPQRRKNPQEGLYNELQKDKMAEAYSEIGMKGERRRGKGHDGLYQGLSTATKDTYDALHMQALPPR

SEQ ID NO: 21296 - protein, 885 aa, Artificial Sequence
  Synthetic Polypeptide
MALPVTALLLPLALLLHAARPDIQMTQSPSSLSASVGDRVTITCRASQDISSYLNWYQQKPGKAPKLLIYYTSRLHSGVPSRFSGSGSGTDFTLTISSLQPEDFATYYCQQGNTLPYTFGQGTKVEIKRLEGKPIPNPLLGLDSTGSGEDLKNVFPPEVAVFEPSEAEISHTQKATLVCLATGFYPDHVELSWWVNGKEVHSGVSTDPQPLKEQPALNDSRYCLSSRLRVSATFWQNPRNHFRCQVQFYGLSENDEWTQDRAKPVTQIVSAEAWGRADCGSQSFGLLDPKLCYLLDGILFIYGVILTALFLRVKFSRSADAPAYQQGQNQLYNELNLGRREEYDVLDKRRGRDPEMGGKPQRRKNPQEGLYNELQKDKMAEAYSEIGMKGERRRGKGHDGLYQGLSTATKDTYDALHMQALPPRRAKRSGSGATNFSLLKQAGDVEENPGPTSMDWIWRILFLVGAATGAHSFEEVQLVESGGGLVQPGGSLRLSCAASGFTFSDYFMSWVRQAPGKGLEWVATISNGGTYTYYPDSVKGRFTISRDNSKNTLYLQMNSLRAEDTAVYYCARFDGYIFDYWGQGTLVTVSSTREQKLISEEDGSGIQNPDPAVYQLRDSKSSDKSVCLFTDFDSQTNVSQSKDSDVYITDKTVLDMRSMDFKSNSAVAWSNKSDFACANAFNNSIIPEDTFFPSPESSCGTQSFGLLDPKLCYLLDGILFIYGVILTALFLRSKRSRLLHSDYMNMTPRRPGPTRKHYQPYAPPRDFAAYRSRVKFSRSADAPAYQQGQNQLYNELNLGRREEYDVLDKRRGRDPEMGGKPQRRKNPQEGLYNELQKDKMAEAYSEIGMKGERRRGKGHDGLYQGLSTATKDTYDALHMQALPPR

SEQ ID NO: 21297 - protein, 926 aa, Artificial Sequence
  Synthetic Polypeptide
MALPVTALLLPLALLLHAARPDIQMTQSPSSLSASVGDRVTITCRASQDISSYLNWYQQKPGKAPKLLIYYTSRLHSGVPSRFSGSGSGTDFTLTISSLQPEDFATYYCQQGNTLPYTFGQGTKVEIKRLEGKPIPNPLLGLDSTGSGEDLKNVFPPEVAVFEPSEAEISHTQKATLVCLATGFYPDHVELSWWVNGKEVHSGVSTDPQPLKEQPALNDSRYCLSSRLRVSATFWQNPRNHFRCQVQFYGLSENDEWTQDRAKPVTQIVSAEAWGRADCGSQSFGLLDPKLCYLLDGILFIYGVILTALFLRSKRSRLLHSDYMNMTPRRPGPTRKHYQPYAPPRDFAAYRSRVKFSRSADAPAYQQGQNQLYNELNLGRREEYDVLDKRRGRDPEMGGKPQRRKNPQEGLYNELQKDKMAEAYSEIGMKGERRRGKGHDGLYQGLSTATKDTYDALHMQALPPRRAKRSGSGATNFSLLKQAGDVEENPGPTSMDWIWRILFLVGAATGAHSFEEVQLVESGGGLVQPGGSLRLSCAASGFTFSDYFMSWVRQAPGKGLEWVATISNGGTYTYYPDSVKGRFTISRDNSKNTLYLQMNSLRAEDTAVYYCARFDGYIFDYWGQGTLVTVSSTREQKLISEEDGSGIQNPDPAVYQLRDSKSSDKSVCLFTDFDSQTNVSQSKDSDVYITDKTVLDMRSMDFKSNSAVAWSNKSDFACANAFNNSIIPEDTFFPSPESSCGTQSFGLLDPKLCYLLDGILFIYGVILTALFLRSKRSRLLHSDYMNMTPRRPGPTRKHYQPYAPPRDFAAYRSRVKFSRSADAPAYQQGQNQLYNELNLGRREEYDVLDKRRGRDPEMGGKPQRRKNPQEGLYNELQKDKMAEAYSEIGMKGERRRGKGHDGLYQGLSTATKDTYDALHMQALPPR

SEQ ID NO: 21298 - protein, 887 aa, Artificial Sequence
  Synthetic Polypeptide
MALPVTALLLPLALLLHAARPDIQMTQSPSSLSASVGDRVTITCRASQDISSYLNWYQQKPGKAPKLLIYYTSRLHSGVPSRFSGSGSGTDFTLTISSLQPEDFATYYCQQGNTLPYTFGQGTKVEIKRLEGKPIPNPLLGLDSTGSGEDLKNVFPPEVAVFEPSEAEISHTQKATLVCLATGFYPDHVELSWWVNGKEVHSGVSTDPQPLKEQPALNDSRYCLSSRLRVSATFWQNPRNHFRCQVQFYGLSENDEWTQDRAKPVTQIVSAEAWGRADCGSQSFGLLDPKLCYLLDGILFIYGVILTALFLRVKFSRSADAPAYQQGQNQLYNELNLGRREEYDVLDKRRGRDPEMGGKPQRRKNPQEGLYNELQKDKMAEAYSEIGMKGERRRGKGHDGLYQGLSTATKDTYDALHMQALPPRRAKRSGSGATNFSLLKQAGDVEENPGPTSMDWIWRILFLVGAATGAHSFEEVQLVESGGGLVQPGGSLRLSCAASGFTFSDYFMSWVRQAPGKGLEWVATISNGGTYTYYPDSVKGRFTISRDNSKNTLYLQMNSLRAEDTAVYYCARFDGYIFDYWGQGTLVTVSSTREQKLISEEDLGSGIQNPDPAVYQLRDSKSSDKSVCLFTDFDSQTNVSQSKDSDVYITDKTVLDMRSMDFKSNSAVAWSNKSDFACANAFNNSIIPEDTFFPSPESSCGTQSFGLLDPKLCYLLDGILFIYGVILTALFLKRGRKKLLYIFKQPFMRPVQTTQEEDGCSCRFPEEEEGGCELRVKFSRSADAPAYQQGQNQLYNELNLGRREEYDVLDKRRGRDPEMGGKPQRRKNPQEGLYNELQKDKMAEAYSEIGMKGERRRGKGHDGLYQGLSTATKDTYDALHMQALPPR

SEQ ID NO: 21299 - protein, 929 aa, Artificial Sequence
  Synthetic Polypeptide
MALPVTALLLPLALLLHAARPDIQMTQSPSSLSASVGDRVTITCRASQDISSYLNWYQQKPGKAPKLLIYYTSRLHSGVPSRFSGSGSGTDFTLTISSLQPEDFATYYCQQGNTLPYTFGQGTKVEIKRLEGKPIPNPLLGLDSTGSGEDLKNVFPPEVAVFEPSEAEISHTQKATLVCLATGFYPDHVELSWWVNGKEVHSGVSTDPQPLKEQPALNDSRYCLSSRLRVSATFWQNPRNHFRCQVQFYGLSENDEWTQDRAKPVTQIVSAEAWGRADCGSQSFGLLDPKLCYLLDGILFIYGVILTALFLKRGRKKLLYIFKQPFMRPVQTTQEEDGCSCRFPEEEEGGCELRVKFSRSADAPAYQQGQNQLYNELNLGRREEYDVLDKRRGRDPEMGGKPQRRKNPQEGLYNELQKDKMAEAYSEIGMKGERRRGKGHDGLYQGLSTATKDTYDALHMQALPPRRAKRSGSGATNFSLLKQAGDVEENPGPTSMDWIWRILFLVGAATGAHSFEEVQLVESGGGLVQPGGSLRLSCAASGFTFSDYFMSWVRQAPGKGLEWVATISNGGTYTYYPDSVKGRFTISRDNSKNTLYLQMNSLRAEDTAVYYCARFDGYIFDYWGQGTLVTVSSTREQKLISEEDLGSGIQNPDPAVYQLRDSKSSDKSVCLFTDFDSQTNVSQSKDSDVYITDKTVLDMRSMDFKSNSAVAWSNKSDFACANAFNNSIIPEDTFFPSPESSCGTQSFGLLDPKLCYLLDGILFIYGVILTALFLKRGRKKLLYIFKQPFMRPVQTTQEEDGCSCRFPEEEEGGCELRVKFSRSADAPAYQQGQNQLYNELNLGRREEYDVLDKRRGRDPEMGGKPQRRKNPQEGLYNELQKDKMAEAYSEIGMKGERRRGKGHDGLYQGLSTATKDTYDALHMQALPPR

SEQ ID NO: 21300 - protein, 819 aa, Artificial Sequence
  Synthetic Polypeptide
MALPVTALLLPLALLLHAARPDIQMTQSPSSLSASVGDRVTITCRASQDISSYLNWYQQKPGKAPKLLIYYTSRLHSGVPSRFSGSGSGTDFTLTISSLQPEDFATYYCQQGNTLPYTFGQGTKVEIKRLEQSFGLLDPKLCYLLDGILFIYGVILTALFLRVKFSRSADAPAYQQGQNQLYNELNLGRREEYDVLDKRRGRDPEMGGKPQRRKNPQEGLYNELQKDKMAEAYSEIGMKGERRRGKGHDGLYQGLSTATKDTYDALHMQALPPRRAKRSGSGATNFSLLKQAGDVEENPGPTSMDWIWRILFLVGAATGAHSFEEVQLVESGGGLVQPGGSLRLSCAASGFTFSDYFMSWVRQAPGKGLEWVATISNGGTYTYYPDSVKGRFTISRDNSKNTLYLQMNSLRAEDTAVYYCARFDGYIFDYWGQGTLVTVSSTRQSFGLLDPKLCYLLDGILFIYGVILTALFLRVKFSRSADAPAYQQGQNQLYNELNLGRREEYDVLDKRRGRDPEMGGKPQRRKNPQEGLYNELQKDKMAEAYSEIGMKGERRRGKGHDGLYQGLSTATKDTYDALHMQALPPRRAKRSGSGVKQTLNFDLLKLAGDVESNPGPSRGHMTEYKPTVRLATRDDVPRAVRTLAAAFADYPATRHTVDPDRHIERVTELQELFLTRVGLDIGKVWVADDGAAVAVWTTPESVEAGAVFAEIGPRMAELSGSRLAAQQQMEGLLAPHRPKEPAWFLATVGVSPDHQGKGLGSAVVLPGVEAAERAGVPAFLETSAPRNLPFYERLGFTVTADVEVPEGPRTWCMTRKPGA

SEQ ID NO: 21301 - protein, 644 aa, Artificial Sequence
  Synthetic Polypeptide
MALPVTALLLPLALLLHAARPDIQMTQSPSSLSASVGDRVTITCRASQDISSYLNWYQQKPGKAPKLLIYYTSRLHSGVPSRFSGSGSGTDFTLTISSLQPEDFATYYCQQGNTLPYTFGQGTKVEIKRLEGQPKANPTVTLFPPSSEELQANKATLVCLISDFYPGAVTVAWKADGSPVKAGVETTKPSKQSNNKYAASSYLSLTPEQWKSHRSYSCQVTHEGSTVEKTVAPTECSPIKTDVITMDPKDNCSKDANDTLLLQLTNTSAYYMYLLLLLKSVVYFAIITCCLLRRTAFCCNGEKSRAKRSGSGATNFSLLKQAGDVEENPGPTSMDWIWRILFLVGAATGAHSFEEVQLVESGGGLVQPGGSLRLSCAASGFTFSDYFMSWVRQAPGKGLEWVATISNGGTYTYYPDSVKGRFTISRDNSKNTLYLQMNSLRAEDTAVYYCARFDGYIFDYWGQGTLVTVSSTRASTKGPSVFPLAPSSKSTSGGTAALGCLVKDYFPEPVTVSWNSGALTSGVHTFPAVLQSSGLYSLSSVVTVPSSSLGTQTYICNVNHKPSNTKVDKRVEPKSCEVKTDSTDHVKPKETENTKQPSKSCHKPKAIVHTEKVNMMSLTVLGLRMLFAKTVAVNFLLTAKLFFL

SEQ ID NO: 21302 - protein, 622 aa, Artificial Sequence
  Synthetic Polypeptide
MALPVTALLLPLALLLHAARPDIQMTQSPSSLSASVGDRVTITCRASQDISSYLNWYQQKPGKAPKLLIYYTSRLHSGVPSRFSGSGSGTDFTLTISSLQPEDFATYYCQQGNTLPYTFGQGTKVEIKRLEGQPKANPTVTLFPPSSEELQANKATLVCLISDFYPGAVTVAWKADGSPVKAGVETTKPSKQSNNKYAASSYLSLTPEQWKSHRSYSCQVTHEGSTVEKTVAPTECSGRADCGITSASYHQGVLSATILYEILLGKATLYAVLVSALVLMAMVKRKDSRGRAKRSGSGATNFSLLKQAGDVEENPGPTSMDWIWRILFLVGAATGAHSFEEVQLVESGGGLVQPGGSLRLSCAASGFTFSDYFMSWVRQAPGKGLEWVATISNGGTYTYYPDSVKGRFTISRDNSKNTLYLQMNSLRAEDTAVYYCARFDGYIFDYWGQGTLVTVSSTRASTKGPSVFPLAPSSKSTSGGTAALGCLVKDYFPEPVTVSWNSGALTSGVHTFPAVLQSSGLYSLSSVVTVPSSSLGTQTYICNVNHKPSNTKVDKRVEPKSCIPEDTFFPSSDVPCDVKLVEKSFETDTNLNFQNLSVIGFRILLLKVAGFNLLMTLRLWSS

SEQ ID NO: 21303 - protein, 622 aa, Artificial Sequence
  Synthetic Polypeptide
MALPVTALLLPLALLLHAARPDIQMTQSPSSLSASVGDRVTITCRASQDISSYLNWYQQKPGKAPKLLIYYTSRLHSGVPSRFSGSGSGTDFTLTISSLQPEDFATYYCQQGNTLPYTFGQGTKVEIKRLEGQPKANPTVTLFPPSSEELQANKATLVCLISDFYPGAVTVAWKADGSPVKAGVETTKPSKQSNNKYAASSYLSLTPEQWKSHRSYSCQVTHEGSTVEKTVAPTECSGRADCGFTSESYQQGVLSATILYEILLGKATLYAVLVSALVLMAMVKRKDSRGRAKRSGSGATNFSLLKQAGDVEENPGPTSMDWIWRILFLVGAATGAHSFEEVQLVESGGGLVQPGGSLRLSCAASGFTFSDYFMSWVRQAPGKGLEWVATISNGGTYTYYPDSVKGRFTISRDNSKNTLYLQMNSLRAEDTAVYYCARFDGYIFDYWGQGTLVTVSSTRASTKGPSVFPLAPSSKSTSGGTAALGCLVKDYFPEPVTVSWNSGALTSGVHTFPAVLQSSGLYSLSSVVTVPSSSLGTQTYICNVNHKPSNTKVDKRVEPKSCIPEDTFFPSPESSCDVKLVEKSFETDTNLNFQNLSVIGFRILLLKVAGFNLLMTLRLWSS

SEQ ID NO: 21304 - protein, 448 aa, Artificial Sequence
  Synthetic Polypeptide
MALPVTALLLPLALLLHAARPDIQMTQSPSSLSASVGDRVTITCRASQDISSYLNWYQQKPGKAPKLLIYYTSRLHSGVPSRFSGSGSGTDFTLTISSLQPEDFATYYCQQGNTLPYTFGQGTKVEIKRGGGGSGGGGSGGGGSEVQLVESGGGLVQPGGSLRLSCAASGFTFSDYFMSWVRQAPGKGLEWVATISNGGTYTYYPDSVKGRFTISRDNSKNTLYLQMNSLRAEDTAVYYCARFDGYIFDYWGQGTLVTVSSTRDGNEEMGGITQTPYKVSISGTTVILTCPQYPGSEILWQHNDKNIGGDEDDKNIGSDEDHLSLKEFSELEQSGYYVCYPRGSKPEDANFYLYLRARVCENCMEMDVMSVATIVIVDICITGGLLLLVYYWSKNRKAKAKPVTRGAGAGGRQRGQNKERPPPVPNPDYEPIRKGQRDLYSGLNQRRI

SEQ ID NO: 21305 - protein, 413 aa, Artificial Sequence
  Synthetic Polypeptide
MALPVTALLLPLALLLHAARPDIQMTQSPSSLSASVGDRVTITCRASQDISSYLNWYQQKPGKAPKLLIYYTSRLHSGVPSRFSGSGSGTDFTLTISSLQPEDFATYYCQQGNTLPYTFGQGTKVEIKRGGGGSGGGGSGGGGSEVQLVESGGGLVQPGGSLRLSCAASGFTFSDYFMSWVRQAPGKGLEWVATISNGGTYTYYPDSVKGRFTISRDNSKNTLYLQMNSLRAEDTAVYYCARFDGYIFDYWGQGTLVTVSSTRFKIPIEELEDRVFVNCNTSITWVEGTVGTLLSDITRLDLGKRILDPRGIYRCNGTDIYKDKESTVQVHYRMCQSCVELDPATVAGIIVTDVIATLLLALGVFCFAGHETGRLSGAADTQALLRNDQVYQPLRDRDDAQYSHLGGNWARNK

SEQ ID NO: 21306 - protein, 423 aa, Artificial Sequence
  Synthetic Polypeptide
MALPVTALLLPLALLLHAARPDIQMTQSPSSLSASVGDRVTITCRASQDISSYLNWYQQKPGKAPKLLIYYTSRLHSGVPSRFSGSGSGTDFTLTISSLQPEDFATYYCQQGNTLPYTFGQGTKVEIKRGGGGSGGGGSGGGGSEVQLVESGGGLVQPGGSLRLSCAASGFTFSDYFMSWVRQAPGKGLEWVATISNGGTYTYYPDSVKGRFTISRDNSKNTLYLQMNSLRAEDTAVYYCARFDGYIFDYWGQGTLVTVSSTRQSIKGNHLVKVYDYQEDGSVLLTCDAEAKNITWFKDGKMIGFLTEDKKKWNLGSNAKDPRGMYQCKGSQNKSKPLQVYYRMCQNCIELNAATISGFLFAEIVSIFVLAVGVYFIAGQDGVRQSRASDKQTLLPNDQLYQPLKDREDDQYSHLQGNQLRRN

SEQ ID NO: 21307 - protein, 406 aa, Artificial Sequence
  Synthetic Polypeptide
MALPVTALLLPLALLLHAARPDIQMTQSPSSLSASVGDRVTITCRASQDISSYLNWYQQKPGKAPKLLIYYTSRLHSGVPSRFSGSGSGTDFTLTISSLQPEDFATYYCQQGNTLPYTFGQGTKVEIKRGGGGSGGGGSGGGGSEVQLVESGGGLVQPGGSLRLSCAASGFTFSDYFMSWVRQAPGKGLEWVATISNGGTYTYYPDSVKGRFTISRDNSKNTLYLQMNSLRAEDTAVYYCARFDGYIFDYWGQGTLVTVSSTRQSFGLLDPKLCYLLDGILFIYGVILTALFLRVKFSRSADAPAYQQGQNQLYNELNLGRREEYDVLDKRRGRDPEMGGKPQRRKNPQEGLYNELQKDKMAEAYSEIGMKGERRRGKGHDGLYQGLSTATKDTYDALHMQALPPR

SEQ ID NO: 21308 - protein, 448 aa, Artificial Sequence
  Synthetic Polypeptide
MALPVTALLLPLALLLHAARPEVQLVESGGGLVQPGGSLRLSCAASGFTFSDYFMSWVRQAPGKGLEWVATISNGGTYTYYPDSVKGRFTISRDNSKNTLYLQMNSLRAEDTAVYYCARFDGYIFDYWGQGTLVTVSSGGGGSGGGGSGGGGSDIQMTQSPSSLSASVGDRVTITCRASQDISSYLNWYQQKPGKAPKLLIYYTSRLHSGVPSRFSGSGSGTDFTLTISSLQPEDFATYYCQQGNTLPYTFGQGTKVEIKRTRDGNEEMGGITQTPYKVSISGTTVILTCPQYPGSEILWQHNDKNIGGDEDDKNIGSDEDHLSLKEFSELEQSGYYVCYPRGSKPEDANFYLYLRARVCENCMEMDVMSVATIVIVDICITGGLLLLVYYWSKNRKAKAKPVTRGAGAGGRQRGQNKERPPPVPNPDYEPIRKGQRDLYSGLNQRRI

SEQ ID NO: 21309 - protein, 413 aa, Artificial Sequence
  Synthetic Polypeptide
MALPVTALLLPLALLLHAARPEVQLVESGGGLVQPGGSLRLSCAASGFTFSDYFMSWVRQAPGKGLEWVATISNGGTYTYYPDSVKGRFTISRDNSKNTLYLQMNSLRAEDTAVYYCARFDGYIFDYWGQGTLVTVSSGGGGSGGGGSGGGGSDIQMTQSPSSLSASVGDRVTITCRASQDISSYLNWYQQKPGKAPKLLIYYTSRLHSGVPSRFSGSGSGTDFTLTISSLQPEDFATYYCQQGNTLPYTFGQGTKVEIKRTRFKIPIEELEDRVFVNCNTSITWVEGTVGTLLSDITRLDLGKRILDPRGIYRCNGTDIYKDKESTVQVHYRMCQSCVELDPATVAGIIVTDVIATLLLALGVFCFAGHETGRLSGAADTQALLRNDQVYQPLRDRDDAQYSHLGGNWARNK

SEQ ID NO: 21310 - protein, 423 aa, Artificial Sequence
  Synthetic Polypeptide
MALPVTALLLPLALLLHAARPEVQLVESGGGLVQPGGSLRLSCAASGFTFSDYFMSWVRQAPGKGLEWVATISNGGTYTYYPDSVKGRFTISRDNSKNTLYLQMNSLRAEDTAVYYCARFDGYIFDYWGQGTLVTVSSGGGGSGGGGSGGGGSDIQMTQSPSSLSASVGDRVTITCRASQDISSYLNWYQQKPGKAPKLLIYYTSRLHSGVPSRFSGSGSGTDFTLTISSLQPEDFATYYCQQGNTLPYTFGQGTKVEIKRTRQSIKGNHLVKVYDYQEDGSVLLTCDAEAKNITWFKDGKMIGFLTEDKKKWNLGSNAKDPRGMYQCKGSQNKSKPLQVYYRMCQNCIELNAATISGFLFAEIVSIFVLAVGVYFIAGQDGVRQSRASDKQTLLPNDQLYQPLKDREDDQYSHLQGNQLRRN

SEQ ID NO: 21311 - protein, 406 aa, Artificial Sequence
  Synthetic Polypeptide
MALPVTALLLPLALLLHAARPEVQLVESGGGLVQPGGSLRLSCAASGFTFSDYFMSWVRQAPGKGLEWVATISNGGTYTYYPDSVKGRFTISRDNSKNTLYLQMNSLRAEDTAVYYCARFDGYIFDYWGQGTLVTVSSGGGGSGGGGSGGGGSDIQMTQSPSSLSASVGDRVTITCRASQDISSYLNWYQQKPGKAPKLLIYYTSRLHSGVPSRFSGSGSGTDFTLTISSLQPEDFATYYCQQGNTLPYTFGQGTKVEIKRTRQSFGLLDPKLCYLLDGILFIYGVILTALFLRVKFSRSADAPAYQQGQNQLYNELNLGRREEYDVLDKRRGRDPEMGGKPQRRKNPQEGLYNELQKDKMAEAYSEIGMKGERRRGKGHDGLYQGLSTATKDTYDALHMQALPPR

SEQ ID NO: 21312 - protein, 639 aa, Artificial Sequence
  Synthetic Polypeptide
MALPVTALLLPLALLLHAARPDIQMTQSPSSLSASVGDRVTITCRASQDISSYLNWYQQKPGKAPKLLIYYTSRLHSGVPSRFSGSGSGTDFTLTISSLQPEDFATYYCQQGNTLPYTFGQGTKVEIKRGGGGSGGGGSGGGGSEVQLVESGGGLVQPGGSLRLSCAASGFTFSDYFMSWVRQAPGKGLEWVATISNGGTYTYYPDSVKGRFTISRDNSKNTLYLQMNSLRAEDTAVYYCARFDGYIFDYWGQGTLVTVSSTRGSGIQNPDPAVYQLRDSKSSDKSVCLFTDFDSQTNVSQSKDSDVYITDKTVLDMRSMDFKSNSAVAWSNKSDFACANAFNNSIIPEDTFFPSPESSCDVKLVEKSFETDTNLNFQNLSVIGFRILLLKVAGFNLLMTLRLWSSRAKRSGSGVKQTLNFDLLKLAGDVESNPGPSRGHMTEYKPTVRLATRDDVPRAVRTLAAAFADYPATRHTVDPDRHIERVTELQELFLTRVGLDIGKVWVADDGAAVAVWTTPESVEAGAVFAEIGPRMAELSGSRLAAQQQMEGLLAPHRPKEPAWFLATVGVSPDHQGKGLGSAVVLPGVEAAERAGVPAFLETSAPRNLPFYERLGFTVTADVEVPEGPRTWCMTRKPGA

SEQ ID NO: 21313 - protein, 671 aa, Artificial Sequence
  Synthetic Polypeptide
MALPVTALLLPLALLLHAARPDIQMTQSPSSLSASVGDRVTITCRASQDISSYLNWYQQKPGKAPKLLIYYTSRLHSGVPSRFSGSGSGTDFTLTISSLQPEDFATYYCQQGNTLPYTFGQGTKVEIKRGGGGSGGGGSGGGGSEVQLVESGGGLVQPGGSLRLSCAASGFTFSDYFMSWVRQAPGKGLEWVATISNGGTYTYYPDSVKGRFTISRDNSKNTLYLQMNSLRAEDTAVYYCARFDGYIFDYWGQGTLVTVSSLEDLKNVFPPEVAVFEPSEAEISHTQKATLVCLATGFYPDHVELSWWVNGKEVHSGVSTDPQPLKEQPALNDSRYCLSSRLRVSATFWQNPRNHFRCQVQFYGLSENDEWTQDRAKPVTQIVSAEAWGRADCGFTSESYQQGVLSATILYEILLGKATLYAVLVSALVLMAMVKRKDSRGRAKRSGSGATNFSLLKQAGDVEENPGPTRGHMTEYKPTVRLATRDDVPRAVRTLAAAFADYPATRHTVDPDRHIERVTELQELFLTRVGLDIGKVWVADDGAAVAVWTTPESVEAGAVFAEIGPRMAELSGSRLAAQQQMEGLLAPHRPKEPAWFLATVGVSPDHQGKGLGSAVVLPGVEAAERAGVPAFLETSAPRNLPFYERLGFTVTADVEVPEGPRTWCMTRKPGA

SEQ ID NO: 21314 - protein, 721 aa, Artificial Sequence
  Synthetic Polypeptide
MALPVTALLLPLALLLHAARPDIQMTQSPSSLSASVGDRVTITCRASQDISSYLNWYQQKPGKAPKLLIYYTSRLHSGVPSRFSGSGSGTDFTLTISSLQPEDFATYYCQQGNTLPYTFGQGTKVEIKRGGGGSGGGGSGGGGSEVQLVESGGGLVQPGGSLRLSCAASGFTFSDYFMSWVRQAPGKGLEWVATISNGGTYTYYPDSVKGRFTISRDNSKNTLYLQMNSLRAEDTAVYYCARFDGYIFDYWGQGTLVTVSSTREQKLISEEDLGSGTPFPSLAPPIMLLVDGKQQMVVVCLVLDVAPPGLDSPIWFSAGNGSALDAFTYGPSPATDGTWTNLAHLSLPSEELASWEPLVCHTGPGAEGHSRSTQPMHLSGEASTARTCPQEPLRGTPGGALWLGVLRLLLFKLLLFDLLLTCSCLCDPAGPLPSPATTTRLRALGSHRLHPATETGGREATSSPRPQPRDRRWGDTPPGRKPGSPVRAKRSGSGVKQTLNFDLLKLAGDVESNPGPSRSRGHMTEYKPTVRLATRDDVPRAVRTLAAAFADYPATRHTVDPDRHIERVTELQELFLTRVGLDIGKVWVADDGAAVAVWTTPESVEAGAVFAEIGPRMAELSGSRLAAQQQMEGLLAPHRPKEPAWFLATVGVSPDHQGKGLGSAVVLPGVEAAERAGVPAFLETSAPRNLPFYERLGFTVTADVEVPEGPRTWCMTRKPGA

SEQ ID NO: 21315 - protein, 539 aa, Artificial Sequence
  Synthetic Polypeptide
MALPVTALLLPLALLLHAARPDIQMTQSPSSLSASVGDRVTITCRASQDISSYLNWYQQKPGKAPKLLIYYTSRLHSGVPSRFSGSGSGTDFTLTISSLQPEDFATYYCQQGNTLPYTFGQGTKVEIKRLEDLKNVFPPEVAVFEPSEAEISHTQKATLVCLATGFYPDHVELSWWVNGKEVHSGVSTDPQPLKEQPALNDSRYCLSSRLRVSATFWQNPRNHFRCQVQFYGLSENDEWTQDRAKPVTQIVSAEAWGRADCGFTSESYQQGVLSATILYEILLGKATLYAVLVSALVLMAMVKRKDSRGRAKRSGSGATNFSLLKQAGDVEENPGPTRGHMTEYKPTVRLATRDDVPRAVRTLAAAFADYPATRHTVDPDRHIERVTELQELFLTRVGLDIGKVWVADDGAAVAVWTTPESVEAGAVFAEIGPRMAELSGSRLAAQQQMEGLLAPHRPKEPAWFLATVGVSPDHQGKGLGSAVVLPGVEAAERAGVPAFLETSAPRNLPFYERLGFTVTADVEVPEGPRTWCMTRKPGA

SEQ ID NO: 21316 - protein, 309 aa, Artificial Sequence
  Synthetic Polypeptide
MALPVTALLLPLALLLHAARPDIQMTQSPSSLSASVGDRVTITCRASQDISSYLNWYQQKPGKAPKLLIYYTSRLHSGVPSRFSGSGSGTDFTLTISSLQPEDFATYYCQQGNTLPYTFGQGTKVEIKRLEDLKNVFPPEVAVFEPSEAEISHTQKATLVCLATGFYPDHVELSWWVNGKEVHSGVSTDPQPLKEQPALNDSRYCLSSRLRVSATFWQNPRNHFRCQVQFYGLSENDEWTQDRAKPVTQIVSAEAWGRADCGFTSESYQQGVLSATILYEILLGKATLYAVLVSALVLMAMVKRKDSRG

SEQ ID NO: 21317 - protein, 446 aa, Artificial Sequence
  Synthetic Polypeptide
MDWIWRILFLVGAATGAHSFEEVQLVESGGGLVQPGGSLRLSCAASGFTFSDYFMSWVRQAPGKGLEWVATISNGGTYTYYPDSVKGRFTISRDNSKNTLYLQMNSLRAEDTAVYYCARFDGYIFDYWGQGTLVTVSSTRIQNPDPAVYQLRDSKSSDKSVCLFTDFDSQTNVSQSKDSDVYITDKTVLDMRSMDFKSNSAVAWSNKSDFACANAFNNSIIPEDTFFPSPESSCDVKLVEKSFETDTNLNFQNLSVIGFRILLLKVAGFNLLMTLRLWSSRAKRSGSGVKQTLNFDLLKLAGDVESNPGPSRGHMAKPLSQEESTLIERATATINSIPISEDYSVASAALSSDGRIFTGVNVYHFTGGPCAELVVLGTAAAAAAGNLTCIVAIGNENRGILSPCGRCRQVLLDLHPGIKAIVKDSDGQPTAVGIRELLPSGYVWEG

SEQ ID NO: 21318 - protein, 280 aa, Artificial Sequence
  Synthetic Polypeptide
MDWIWRILFLVGAATGAHSFEEVQLVESGGGLVQPGGSLRLSCAASGFTFSDYFMSWVRQAPGKGLEWVATISNGGTYTYYPDSVKGRFTISRDNSKNTLYLQMNSLRAEDTAVYYCARFDGYIFDYWGQGTLVTVSSTRIQNPDPAVYQLRDSKSSDKSVCLFTDFDSQTNVSQSKDSDVYITDKTVLDMRSMDFKSNSAVAWSNKSDFACANAFNNSIIPEDTFFPSPESSCDVKLVEKSFETDTNLNFQNLSVIGFRILLLKVAGFNLLMTLRLWSS

SEQ ID NO: 21319 - protein, 557 aa, Artificial Sequence
  Synthetic Polypeptide
MALPVTALLLPLALLLHAARPDIQMTQSPSSLSASVGDRVTITCRASQDISSYLNWYQQKPGKAPKLLIYYTSRLHSGVPSRFSGSGSGTDFTLTISSLQPEDFATYYCQQGNTLPYTFGQGTKVEIKRLEGKPIPNPLLGLDSTGSGEDLKNVFPPEVAVFEPSEAEISHTQKATLVCLATGFYPDHVELSWWVNGKEVHSGVCTDPQPLKEQPALNDSRYCLSSRLRVSATFWQNPRNHFRCQVQFYGLSENDEWTQDRAKPVTQIVSAEAWGRADCGFTSESYQQGVLSATILYEILLGKATLYAVLVSALVLMAMVKRKDSRGRAKRSGSGATNFSLLKQAGDVEENPGPTRGHMTEYKPTVRLATRDDVPRAVRTLAAAFADYPATRHTVDPDRHIERVTELQELFLTRVGLDIGKVWVADDGAAVAVWTTPESVEAGAVFAEIGPRMAELSGSRLAAQQQMEGLLAPHRPKEPAWFLATVGVSPDHQGKGLGSAVVLPGVEAAERAGVPAFLETSAPRNLPFYERLGFTVTADVEVPEGPRTWCMTRKPGA

SEQ ID NO: 21320 - protein, 327 aa, Artificial Sequence
  Synthetic Polypeptide
MALPVTALLLPLALLLHAARPDIQMTQSPSSLSASVGDRVTITCRASQDISSYLNWYQQKPGKAPKLLIYYTSRLHSGVPSRFSGSGSGTDFTLTISSLQPEDFATYYCQQGNTLPYTFGQGTKVEIKRLEGKPIPNPLLGLDSTGSGEDLKNVFPPEVAVFEPSEAEISHTQKATLVCLATGFYPDHVELSWWVNGKEVHSGVCTDPQPLKEQPALNDSRYCLSSRLRVSATFWQNPRNHFRCQVQFYGLSENDEWTQDRAKPVTQIVSAEAWGRADCGFTSESYQQGVLSATILYEILLGKATLYAVLVSALVLMAMVKRKDSRG

SEQ ID NO: 21321 - protein, 458 aa, Artificial Sequence
  Synthetic Polypeptide
MDWIWRILFLVGAATGAHSFEEVQLVESGGGLVQPGGSLRLSCAASGFTFSDYFMSWVRQAPGKGLEWVATISNGGTYTYYPDSVKGRFTISRDNSKNTLYLQMNSLRAEDTAVYYCARFDGYIFDYWGQGTLVTVSSTREQKLISEEDGSGIQNPDPAVYQLRDSKSSDKSVCLFTDFDSQTNVSQSKDSDVYITDKCVLDMRSMDFKSNSAVAWSNKSDFACANAFNNSIIPEDTFFPSPESSCDVKLVEKSFETDTNLNFQNLSVIGFRILLLKVAGFNLLMTLRLWSSRAKRSGSGVKQTLNFDLLKLAGDVESNPGPSRGHMAKPLSQEESTLIERATATINSIPISEDYSVASAALSSDGRIFTGVNVYHFTGGPCAELVVLGTAAAAAAGNLTCIVAIGNENRGILSPCGRCRQVLLDLHPGIKAIVKDSDGQPTAVGIRELLPSGYVWEG

SEQ ID NO: 21322 - protein, 292 aa, Artificial Sequence
  Synthetic Polypeptide
MDWIWRILFLVGAATGAHSFEEVQLVESGGGLVQPGGSLRLSCAASGFTFSDYFMSWVRQAPGKGLEWVATISNGGTYTYYPDSVKGRFTISRDNSKNTLYLQMNSLRAEDTAVYYCARFDGYIFDYWGQGTLVTVSSTREQKLISEEDGSGIQNPDPAVYQLRDSKSSDKSVCLFTDFDSQTNVSQSKDSDVYITDKCVLDMRSMDFKSNSAVAWSNKSDFACANAFNNSIIPEDTFFPSPESSCDVKLVEKSFETDTNLNFQNLSVIGFRILLLKVAGFNLLMTLRLWSS

SEQ ID NO: 21323 - protein, 639 aa, Artificial Sequence
  Synthetic Polypeptide
MALPVTALLLPLALLLHAARPDIQMTQSPSSLSASVGDRVTITCRASQDISSYLNWYQQKPGKAPKLLIYYTSRLHSGVPSRFSGSGSGTDFTLTISSLQPEDFATYYCQQGNTLPYTFGQGTKVEIKRGGGGSGGGGSGGGGSEVQLVESGGGLVQPGGSLRLSCAASGFTFSDYFMSWVRQAPGKGLEWVATISNGGTYTYYPDSVKGRFTISRDNSKNTLYLQMNSLRAEDTAVYYCARFDGYIFDYWGQGTLVTVSSTRGSGIQNPDPAVYQLRDSKSSDKSVCLFTDFDSQTNVSQSKDSDVYITDKTVLDMRSMDFKSNSAVAWSNKSDFACANAFNNSIIPEDTFFPSSDVPCDVKLVEKSFETDTNLNFQNLSVIGFRILLLKVAGFNLLMTLRLWSSRAKRSGSGVKQTLNFDLLKLAGDVESNPGPSRGHMTEYKPTVRLATRDDVPRAVRTLAAAFADYPATRHTVDPDRHIERVTELQELFLTRVGLDIGKVWVADDGAAVAVWTTPESVEAGAVFAEIGPRMAELSGSRLAAQQQMEGLLAPHRPKEPAWFLATVGVSPDHQGKGLGSAVVLPGVEAAERAGVPAFLETSAPRNLPFYERLGFTVTADVEVPEGPRTWCMTRKPGA

SEQ ID NO: 21324 - protein, 671 aa, Artificial Sequence
  Synthetic Polypeptide
MALPVTALLLPLALLLHAARPDIQMTQSPSSLSASVGDRVTITCRASQDISSYLNWYQQKPGKAPKLLIYYTSRLHSGVPSRFSGSGSGTDFTLTISSLQPEDFATYYCQQGNTLPYTFGQGTKVEIKRGGGGSGGGGSGGGGSEVQLVESGGGLVQPGGSLRLSCAASGFTFSDYFMSWVRQAPGKGLEWVATISNGGTYTYYPDSVKGRFTISRDNSKNTLYLQMNSLRAEDTAVYYCARFDGYIFDYWGQGTLVTVSSLEDLKNVFPPEVAVFEPSKAEIAHTQKATLVCLATGFYPDHVELSWWVNGKEVHSGVSTDPQPLKEQPALNDSRYCLSSRLRVSATFWQNPRNHFRCQVQFYGLSENDEWTQDRAKPVTQIVSAEAWGRADCGITSASYHQGVLSATILYEILLGKATLYAVLVSALVLMAMVKRKDSRGRAKRSGSGATNFSLLKQAGDVEENPGPTRGHMTEYKPTVRLATRDDVPRAVRTLAAAFADYPATRHTVDPDRHIERVTELQELFLTRVGLDIGKVWVADDGAAVAVWTTPESVEAGAVFAEIGPRMAELSGSRLAAQQQMEGLLAPHRPKEPAWFLATVGVSPDHQGKGLGSAVVLPGVEAAERAGVPAFLETSAPRNLPFYERLGFTVTADVEVPEGPRTWCMTRKPGA

SEQ ID NO: 21325 - protein, 694 aa, Artificial Sequence
  Synthetic Polypeptide
MALPVTALLLPLALLLHAARPDIQMTQSPSSLSASVGDRVTITCRASQDISSYLNWYQQKPGKAPKLLIYYTSRLHSGVPSRFSGSGSGTDFTLTISSLQPEDFATYYCQQGNTLPYTFGQGTKVEIKRGGGGSGGGGSGGGGSEVQLVESGGGLVQPGGSLRLSCAASGFTFSDYFMSWVRQAPGKGLEWVATISNGGTYTYYPDSVKGRFTISRDNSKNTLYLQMNSLRAEDTAVYYCARFDGYIFDYWGQGTLVTVSSTRGSGGGGSGGGGSGDGNEEMGGITQTPYKVSISGTTVILTCPQYPGSEILWQHNDKNIGGDEDDKNIGSDEDHLSLKEFSELEQSGYYVCYPRGSKPEDANFYLYLRARVCENCMEMDVMSVATIVIVDICITGGLLLLVYYWSKNRKAKAKPVTRGAGAGGRQRGQNKERPPPVPNPDYEPIRKGQRDLYSGLNQRRIRAKRSGSGVKQTLNFDLLKLAGDVESNPGPSRGHMTEYKPTVRLATRDDVPRAVRTLAAAFADYPATRHTVDPDRHIERVTELQELFLTRVGLDIGKVWVADDGAAVAVWTTPESVEAGAVFAEIGPRMAELSGSRLAAQQQMEGLLAPHRPKEPAWFLATVGVSPDHQGKGLGSAVVLPGVEAAERAGVPAFLETSAPRNLPFYERLGFTVTADVEVPEGPRTWCMTRKPGA

SEQ ID NO: 21326 - protein, 659 aa, Artificial Sequence
  Synthetic Polypeptide
MALPVTALLLPLALLLHAARPDIQMTQSPSSLSASVGDRVTITCRASQDISSYLNWYQQKPGKAPKLLIYYTSRLHSGVPSRFSGSGSGTDFTLTISSLQPEDFATYYCQQGNTLPYTFGQGTKVEIKRGGGGSGGGGSGGGGSEVQLVESGGGLVQPGGSLRLSCAASGFTFSDYFMSWVRQAPGKGLEWVATISNGGTYTYYPDSVKGRFTISRDNSKNTLYLQMNSLRAEDTAVYYCARFDGYIFDYWGQGTLVTVSSTRGSGGGGSGGGGSGFKIPIEELEDRVFVNCNTSITWVEGTVGTLLSDITRLDLGKRILDPRGIYRCNGTDIYKDKESTVQVHYRMCQSCVELDPATVAGIIVTDVIATLLLALGVFCFAGHETGRLSGAADTQALLRNDQVYQPLRDRDDAQYSHLGGNWARNKRAKRSGSGVKQTLNFDLLKLAGDVESNPGPSRGHMTEYKPTVRLATRDDVPRAVRTLAAAFADYPATRHTVDPDRHIERVTELQELFLTRVGLDIGKVWVADDGAAVAVWTTPESVEAGAVFAEIGPRMAELSGSRLAAQQQMEGLLAPHRPKEPAWFLATVGVSPDHQGKGLGSAVVLPGVEAAERAGVPAFLETSAPRNLPFYERLGFTVTADVEVPEGPRTWCMTRKPGA

SEQ ID NO: 21327 - protein, 669 aa, Artificial Sequence
  Synthetic Polypeptide
MALPVTALLLPLALLLHAARPDIQMTQSPSSLSASVGDRVTITCRASQDISSYLNWYQQKPGKAPKLLIYYTSRLHSGVPSRFSGSGSGTDFTLTISSLQPEDFATYYCQQGNTLPYTFGQGTKVEIKRGGGGSGGGGSGGGGSEVQLVESGGGLVQPGGSLRLSCAASGFTFSDYFMSWVRQAPGKGLEWVATISNGGTYTYYPDSVKGRFTISRDNSKNTLYLQMNSLRAEDTAVYYCARFDGYIFDYWGQGTLVTVSSTRGSGGGGSGGGGSGQSIKGNHLVKVYDYQEDGSVLLTCDAEAKNITWFKDGKMIGFLTEDKKKWNLGSNAKDPRGMYQCKGSQNKSKPLQVYYRMCQNCIELNAATISGFLFAEIVSIFVLAVGVYFIAGQDGVRQSRASDKQTLLPNDQLYQPLKDREDDQYSHLQGNQLRRNRAKRSGSGVKQTLNFDLLKLAGDVESNPGPSRGHMTEYKPTVRLATRDDVPRAVRTLAAAFADYPATRHTVDPDRHIERVTELQELFLTRVGLDIGKVWVADDGAAVAVWTTPESVEAGAVFAEIGPRMAELSGSRLAAQQQMEGLLAPHRPKEPAWFLATVGVSPDHQGKGLGSAVVLPGVEAAERAGVPAFLETSAPRNLPFYERLGFTVTADVEVPEGPRTWCMTRKPGA

SEQ ID NO: 21328 - protein, 652 aa, Artificial Sequence
  Synthetic Polypeptide
MALPVTALLLPLALLLHAARPDIQMTQSPSSLSASVGDRVTITCRASQDISSYLNWYQQKPGKAPKLLIYYTSRLHSGVPSRFSGSGSGTDFTLTISSLQPEDFATYYCQQGNTLPYTFGQGTKVEIKRGGGGSGGGGSGGGGSEVQLVESGGGLVQPGGSLRLSCAASGFTFSDYFMSWVRQAPGKGLEWVATISNGGTYTYYPDSVKGRFTISRDNSKNTLYLQMNSLRAEDTAVYYCARFDGYIFDYWGQGTLVTVSSTRGSGGGGSGGGGSGQSFGLLDPKLCYLLDGILFIYGVILTALFLRVKFSRSADAPAYQQGQNQLYNELNLGRREEYDVLDKRRGRDPEMGGKPQRRKNPQEGLYNELQKDKMAEAYSEIGMKGERRRGKGHDGLYQGLSTATKDTYDALHMQALPPRRAKRSGSGVKQTLNFDLLKLAGDVESNPGPSRGHMTEYKPTVRLATRDDVPRAVRTLAAAFADYPATRHTVDPDRHIERVTELQELFLTRVGLDIGKVWVADDGAAVAVWTTPESVEAGAVFAEIGPRMAELSGSRLAAQQQMEGLLAPHRPKEPAWFLATVGVSPDHQGKGLGSAVVLPGVEAAERAGVPAFLETSAPRNLPFYERLGFTVTADVEVPEGPRTWCMTRKPGA

SEQ ID NO: 21329 - protein, 753 aa, Artificial Sequence
  Synthetic Polypeptide
MALPVTALLLPLALLLHAARPEVQLVESGGGLVQPGGSLRLSCAASGFSFSDFWMSWVRQAPGKGLEWVATISQAGSEKDYVDSVKGRFTISRDNAKKSLYLQMNSLRAEDTAVYYCASGVYSFDYRGQGTLVTVSSGTGGGGSGGGGSGGGGSEFDIQMTQSPSSLSASVGDRVTITCRASQDISSYLNWYQQKPGKAPKLLIYYTSRLHSGVPSRFSGSGSGTDFTLTISSLQPEDFATYYCQQGNTLPYTFGQGTKVEIKRLEDLKNVFPPEVAVFEPSEAEISHTQKATLVCLATGFYPDHVELSWWVNGKEVHSGVCTDPQPLKEQPALNDSRYCLSSRLRVSATFWQNPRNHFRCQVQFYGLSENDEWTQDRAKPVTQIVSAEAWGRADCGFTSESYQQGVLSATILYEILLGKATLYAVLVSALVLMAMVKRKDSRGRAKRSGSGATNFSLLKQAGDVEENPGPTSMDWIWRILFLVGAATGAHSFEEVQLVESGGGLVQPGGSLRLSCAASGFTFSDYFMSWVRQAPGKGLEWVATISNGGTYTYYPDSVKGRFTISRDNSKNTLYLQMNSLRAEDTAVYYCARFDGYIFDYWGQGTLVTVSSTRIQNPDPAVYQLRDSKSSDKSVCLFTDFDSQTNVSQSKDSDVYITDKCVLDMRSMDFKSNSAVAWSNKSDFACANAFNNSIIPEDTFFPSPESSCDVKLVEKSFETDTNLNFQNLSVIGFRILLLKVAGFNLLMTLRLWSS

SEQ ID NO: 21330 - protein, 757 aa, Artificial Sequence
  Synthetic Polypeptide
MALPVTALLLPLALLLHAARPEVQLVESGGGLVQPGGSLRLSCAASGFSFSDFWMSWVRQAPGKGLEWVATISQAGSEKDYVDSVKGRFTISRDNAKKSLYLQMNSLRAEDTAVYYCASGVYSFDYRGQGTLVTVSSGTGGGGSGGGGSGGGGSEFDIQMTQSPSSLSASVGDRVTITCRASQDISSYLNWYQQKPGKAPKLLIYYTSRLHSGVPSRFSGSGSGTDFTLTISSLQPEDFATYYCQQGNTLPYTFGQGTKVEIKRLEIQNPDPAVYQLRDSKSSDKSVCLFTDFDSQTNVSQSKDSDVYITDKCVLDMRSMDFKSNSAVAWSNKSDFACANAFNNSIIPEDTFFPSPESSCDVKLVEKSFETDTNLNFQNLSVIGFRILLLKVAGFNLLMTLRLWSSRAKRSGSGVKQTLNFDLLKLAGDVESNPGPTSMDWIWRILFLVGAATGAHSFEEVQLVESGGGLVQPGGSLRLSCAASGFTFSDYFMSWVRQAPGKGLEWVATISNGGTYTYYPDSVKGRFTISRDNSKNTLYLQMNSLRAEDTAVYYCARFDGYIFDYWGQGTLVTVSSTREDLKNVFPPEVAVFEPSEAEISHTQKATLVCLATGFYPDHVELSWWVNGKEVHSGVCTDPQPLKEQPALNDSRYCLSSRLRVSATFWQNPRNHFRCQVQFYGLSENDEWTQDRAKPVTQIVSAEAWGRADCGFTSESYQQGVLSATILYEILLGKATLYAVLVSALVLMAMVKRKDSRG

SEQ ID NO: 21331 - protein, 949 aa, Artificial Sequence
  Synthetic Polypeptide
MALPVTALLLPLALLLHAARPEVQLVESGGGLVQPGGSLRLSCAASGFSFSDFWMSWVRQAPGKGLEWVATISQAGSEKDYVDSVKGRFTISRDNAKKSLYLQMNSLRAEDTAVYYCASGVYSFDYRGQGTLVTVSSGTGGGGSGGGGSGGGGSEFDIQMTQSPSSLSASVGDRVTITCRASQDISSYLNWYQQKPGKAPKLLIYYTSRLHSGVPSRFSGSGSGTDFTLTISSLQPEDFATYYCQQGNTLPYTFGQGTKVEIKRLEDLKNVFPPEVAVFEPSEAEISHTQKATLVCLATGFYPDHVELSWWVNGKEVHSGVSTDPQPLKEQPALNDSRYCLSSRLRVSATFWQNPRNHFRCQVQFYGLSENDEWTQDRAKPVTQIVSAEAWGRADCGSQSFGLLDPKLCYLLDGILFIYGVILTALFLRVKFSRSADAPAYQQGQNQLYNELNLGRREEYDVLDKRRGRDPEMGGKPQRRKNPQEGLYNELQKDKMAEAYSEIGMKGERRRGKGHDGLYQGLSTATKDTYDALHMQALPPRRAKRSGSGATNFSLLKQAGDVEENPGPTSMDWIWRILFLVGAATGAHSFEEVQLVESGGGLVQPGGSLRLSCAASGFTFSDYFMSWVRQAPGKGLEWVATISNGGTYTYYPDSVKGRFTISRDNSKNTLYLQMNSLRAEDTAVYYCARFDGYIFDYWGQGTLVTVSSTRIQNPDPAVYQLRDSKSSDKSVCLFTDFDSQTNVSQSKDSDVYITDKTVLDMRSMDFKSNSAVAWSNKSDFACANAFNNSIIPEDTFFPSPESSCGTQSFGLLDPKLCYLLDGILFIYGVILTALFLRVKFSRSADAPAYQQGQNQLYNELNLGRREEYDVLDKRRGRDPEMGGKPQRRKNPQEGLYNELQKDKMAEAYSEIGMKGERRRGKGHDGLYQGLSTATKDTYDALHMQALPPR

SEQ ID NO: 21332 - protein, 779 aa, Artificial Sequence
  Synthetic Polypeptide
MALPVTALLLPLALLLHAARPEVQLVESGGGLVQPGGSLRLSCAASGFSFSDFWMSWVRQAPGKGLEWVATISQAGSEKDYVDSVKGRFTISRDNAKKSLYLQMNSLRAEDTAVYYCASGVYSFDYRGQGTLVTVSSGTGGGGSGGGGSGGGGSEFDIQMTQSPSSLSASVGDRVTITCRASQDISSYLNWYQQKPGKAPKLLIYYTSRLHSGVPSRFSGSGSGTDFTLTISSLQPEDFATYYCQQGNTLPYTFGQGTKVEIKRLEGQPKANPTVTLFPPSSEELQANKATLVCLISDFYPGAVTVAWKADGSPVKAGVETTKPSKQSNNKYAASSYLSLTPEQWKSHRSYSCQVTHEGSTVEKTVAPTECSPIKTDVITMDPKDNCSKDANDTLLLQLTNTSAYYMYLLLLLKSVVYFAIITCCLLRRTAFCCNGEKSRAKRSGSGATNFSLLKQAGDVEENPGPTSMDWIWRILFLVGAATGAHSFEEVQLVESGGGLVQPGGSLRLSCAASGFTFSDYFMSWVRQAPGKGLEWVATISNGGTYTYYPDSVKGRFTISRDNSKNTLYLQMNSLRAEDTAVYYCARFDGYIFDYWGQGTLVTVSSTRASTKGPSVFPLAPSSKSTSGGTAALGCLVKDYFPEPVTVSWNSGALTSGVHTFPAVLQSSGLYSLSSVVTVPSSSLGTQTYICNVNHKPSNTKVDKRVEPKSCEVKTDSTDHVKPKETENTKQPSKSCHKPKAIVHTEKVNMMSLTVLGLRMLFAKTVAVNFLLTAKLFFL

SEQ ID NO: 21333 - protein, 760 aa, Artificial Sequence
  Synthetic Polypeptide
MALPVTALLLPLALLLHAARPEVQLVESGGGLVQPGGSLRLSCAASGFSFSDFWMSWVRQAPGKGLEWVATISQAGSEKDYVDSVKGRFTISRDNAKKSLYLQMNSLRAEDTAVYYCASGVYSFDYRGQGTLVTVSSGTGGGGSGGGGSGGGGSEFDIQMTQSPSSLSASVGDRVTITCRASQDISSYLNWYQQKPGKAPKLLIYYTSRLHSGVPSRFSGSGSGTDFTLTISSLQPEDFATYYCQQGNTLPYTFGQGTKVEIKRLEGQPKANPTVTLFPPSSEELQANKATLVCLISDFYPGAVTVAWKADGSPVKAGVETTKPSKQSNNKYAASSYLSLTPEQWKSHRSYSCQVTHEGSTVEKTVAPTECSGRADCGFTSESYQQGVLSATILYEILLGKATLYAVLVSALVLMAMVKRKDSRGRAKRSGSGVKQTLNFDLLKLAGDVESNPGPTSMDWIWRILFLVGAATGAHSFEEVQLVESGGGLVQPGGSLRLSCAASGFTFSDYFMSWVRQAPGKGLEWVATISNGGTYTYYPDSVKGRFTISRDNSKNTLYLQMNSLRAEDTAVYYCARFDGYIFDYWGQGTLVTVSSTRASTKGPSVFPLAPSSKSTSGGTAALGCLVKDYFPEPVTVSWNSGALTSGVHTFPAVLQSSGLYSLSSVVTVPSSSLGTQTYICNVNHKPSNTKVDKRVEPKSCIPEDTFFPSPESSCDVKLVEKSFETDTNLNFQNLSVIGFRILLLKVAGFNLLMTLRLWSS

SEQ ID NO: 21334 - protein, 894 aa, Artificial Sequence
  Synthetic Polypeptide
MALPVTALLLPLALLLHAARPEVQLVESGGGLVQPGGSLRLSCAASGFSFSDFWMSWVRQAPGKGLEWVATISQAGSEKDYVDSVKGRFTISRDNAKKSLYLQMNSLRAEDTAVYYCASGVYSFDYRGQGTLVTVSSGTGGGGSGGGGSGGGGSEFDIQMTQSPSSLSASVGDRVTITCRASQDISSYLNWYQQKPGKAPKLLIYYTSRLHSGVPSRFSGSGSGTDFTLTISSLQPEDFATYYCQQGNTLPYTFGQGTKVEIKRLEIQNPDPAVYQLRDSKSSDKSVCLFTDFDSQTNVSQSKDSDVYITDKCVLDMRSMDFKSNSAVAWSNKSDFACANAFNNSIIPEDTFFPSPESSCDVKLVEKSFETDTNLNFQNLSVIGFRILLLKVAGFNLLMTLRLWSSRAKRSGSGVKQTLNFDLLKLAGDVESNPGPTSMDWIWRILFLVGAATGAHSGPQLQLQESGPGLVKPSETLSLTCTVSGDSISSGDYYWGWIRQPPGKGLEWIGHIYYSGVTYYNPSLKSRVTISVDTSRNQFSLKLSSVTAADTAVYYCTREDSSNWRSRGQGTLVTVSSGSGGGGSGGGGSGGGGSFEEVQLVESGGGLVQPGGSLRLSCAASGFTFSDYFMSWVRQAPGKGLEWVATISNGGTYTYYPDSVKGRFTISRDNSKNTLYLQMNSLRAEDTAVYYCARFDGYIFDYWGQGTLVTVSSTREDLKNVFPPEVAVFEPSEAEISHTQKATLVCLATGFYPDHVELSWWVNGKEVHSGVCTDPQPLKEQPALNDSRYCLSSRLRVSATFWQNPRNHFRCQVQFYGLSENDEWTQDRAKPVTQIVSAEAWGRADCGFTSESYQQGVLSATILYEILLGKATLYAVLVSALVLMAMVKRKDSRG

SEQ ID NO: 21335 - protein, 1086 aa, Artificial Sequence
  Synthetic Polypeptide
MALPVTALLLPLALLLHAARPEVQLVESGGGLVQPGGSLRLSCAASGFSFSDFWMSWVRQAPGKGLEWVATISQAGSEKDYVDSVKGRFTISRDNAKKSLYLQMNSLRAEDTAVYYCASGVYSFDYRGQGTLVTVSSGTGGGGSGGGGSGGGGSEFDIQMTQSPSSLSASVGDRVTITCRASQDISSYLNWYQQKPGKAPKLLIYYTSRLHSGVPSRFSGSGSGTDFTLTISSLQPEDFATYYCQQGNTLPYTFGQGTKVEIKRLEDLKNVFPPEVAVFEPSEAEISHTQKATLVCLATGFYPDHVELSWWVNGKEVHSGVSTDPQPLKEQPALNDSRYCLSSRLRVSATFWQNPRNHFRCQVQFYGLSENDEWTQDRAKPVTQIVSAEAWGRADCGSQSFGLLDPKLCYLLDGILFIYGVILTALFLRVKFSRSADAPAYQQGQNQLYNELNLGRREEYDVLDKRRGRDPEMGGKPQRRKNPQEGLYNELQKDKMAEAYSEIGMKGERRRGKGHDGLYQGLSTATKDTYDALHMQALPPRRAKRSGSGATNFSLLKQAGDVEENPGPTSMDWIWRILFLVGAATGAHSGPQLQLQESGPGLVKPSETLSLTCTVSGDSISSGDYYWGWIRQPPGKGLEWIGHIYYSGVTYYNPSLKSRVTISVDTSRNQFSLKLSSVTAADTAVYYCTREDSSNWRSRGQGTLVTVSSGSGGGGSGGGGSGGGGSFEEVQLVESGGGLVQPGGSLRLSCAASGFTFSDYFMSWVRQAPGKGLEWVATISNGGTYTYYPDSVKGRFTISRDNSKNTLYLQMNSLRAEDTAVYYCARFDGYIFDYWGQGTLVTVSSTRIQNPDPAVYQLRDSKSSDKSVCLFTDFDSQTNVSQSKDSDVYITDKTVLDMRSMDFKSNSAVAWSNKSDFACANAFNNSIIPEDTFFPSPESSCGTQSFGLLDPKLCYLLDGILFIYGVILTALFLRVKFSRSADAPAYQQGQNQLYNELNLGRREEYDVLDKRRGRDPEMGGKPQRRKNPQEGLYNELQKDKMAEAYSEIGMKGERRRGKGHDGLYQGLSTATKDTYDALHMQALPPR

SEQ ID NO: 21336 - protein, 916 aa, Artificial Sequence
  Synthetic Polypeptide
MALPVTALLLPLALLLHAARPEVQLVESGGGLVQPGGSLRLSCAASGFSFSDFWMSWVRQAPGKGLEWVATISQAGSEKDYVDSVKGRFTISRDNAKKSLYLQMNSLRAEDTAVYYCASGVYSFDYRGQGTLVTVSSGTGGGGSGGGGSGGGGSEFDIQMTQSPSSLSASVGDRVTITCRASQDISSYLNWYQQKPGKAPKLLIYYTSRLHSGVPSRFSGSGSGTDFTLTISSLQPEDFATYYCQQGNTLPYTFGQGTKVEIKRLEGQPKANPTVTLFPPSSEELQANKATLVCLISDFYPGAVTVAWKADGSPVKAGVETTKPSKQSNNKYAASSYLSLTPEQWKSHRSYSCQVTHEGSTVEKTVAPTECSPIKTDVITMDPKDNCSKDANDTLLLQLTNTSAYYMYLLLLLKSVVYFAIITCCLLRRTAFCCNGEKSRAKRSGSGATNFSLLKQAGDVEENPGPTSMDWIWRILFLVGAATGAHSGPQLQLQESGPGLVKPSETLSLTCTVSGDSISSGDYYWGWIRQPPGKGLEWIGHIYYSGVTYYNPSLKSRVTISVDTSRNQFSLKLSSVTAADTAVYYCTREDSSNWRSRGQGTLVTVSSGSGGGGSGGGGSGGGGSFEEVQLVESGGGLVQPGGSLRLSCAASGFTFSDYFMSWVRQAPGKGLEWVATISNGGTYTYYPDSVKGRFTISRDNSKNTLYLQMNSLRAEDTAVYYCARFDGYIFDYWGQGTLVTVSSTRASTKGPSVFPLAPSSKSTSGGTAALGCLVKDYFPEPVTVSWNSGALTSGVHTFPAVLQSSGLYSLSSVVTVPSSSLGTQTYICNVNHKPSNTKVDKRVEPKSCEVKTDSTDHVKPKETENTKQPSKSCHKPKAIVHTEKVNMMSLTVLGLRMLFAKTVAVNFLLTAKLFFL

SEQ ID NO: 21337 - protein, 897 aa, Artificial Sequence
  Synthetic Polypeptide
MALPVTALLLPLALLLHAARPEVQLVESGGGLVQPGGSLRLSCAASGFSFSDFWMSWVRQAPGKGLEWVATISQAGSEKDYVDSVKGRFTISRDNAKKSLYLQMNSLRAEDTAVYYCASGVYSFDYRGQGTLVTVSSGTGGGGSGGGGSGGGGSEFDIQMTQSPSSLSASVGDRVTITCRASQDISSYLNWYQQKPGKAPKLLIYYTSRLHSGVPSRFSGSGSGTDFTLTISSLQPEDFATYYCQQGNTLPYTFGQGTKVEIKRLEGQPKANPTVTLFPPSSEELQANKATLVCLISDFYPGAVTVAWKADGSPVKAGVETTKPSKQSNNKYAASSYLSLTPEQWKSHRSYSCQVTHEGSTVEKTVAPTECSGRADCGFTSESYQQGVLSATILYEILLGKATLYAVLVSALVLMAMVKRKDSRGRAKRSGSGVKQTLNFDLLKLAGDVESNPGPTSMDWIWRILFLVGAATGAHSGPQLQLQESGPGLVKPSETLSLTCTVSGDSISSGDYYWGWIRQPPGKGLEWIGHIYYSGVTYYNPSLKSRVTISVDTSRNQFSLKLSSVTAADTAVYYCTREDSSNWRSRGQGTLVTVSSGSGGGGSGGGGSGGGGSFEEVQLVESGGGLVQPGGSLRLSCAASGFTFSDYFMSWVRQAPGKGLEWVATISNGGTYTYYPDSVKGRFTISRDNSKNTLYLQMNSLRAEDTAVYYCARFDGYIFDYWGQGTLVTVSSTRASTKGPSVFPLAPSSKSTSGGTAALGCLVKDYFPEPVTVSWNSGALTSGVHTFPAVLQSSGLYSLSSVVTVPSSSLGTQTYICNVNHKPSNTKVDKRVEPKSCIPEDTFFPSPESSCDVKLVEKSFETDTNLNFQNLSVIGFRILLLKVAGFNLLMTLRLWSS

SEQ ID NO: 21338 - protein, 754 aa, Artificial Sequence
  Synthetic Polypeptide
MALPVTALLLPLALLLHAARPEVQVLESGGGLVQPGGSLRLSCAASGFTFSNFAMSWVRQAPGKGLEWVSTISGSAGTTDYADSVKGRFTISRDNSKKTLYLQMNSLRVEDTAVYYCADGRGPFFDYRGQGTLVTVSSGTGGGGSGGGGSGGGGSEFDIQMTQSPSSLSASVGDRVTITCRASQDISSYLNWYQQKPGKAPKLLIYYTSRLHSGVPSRFSGSGSGTDFTLTISSLQPEDFATYYCQQGNTLPYTFGQGTKVEIKRLEDLKNVFPPEVAVFEPSEAEISHTQKATLVCLATGFYPDHVELSWWVNGKEVHSGVCTDPQPLKEQPALNDSRYCLSSRLRVSATFWQNPRNHFRCQVQFYGLSENDEWTQDRAKPVTQIVSAEAWGRADCGFTSESYQQGVLSATILYEILLGKATLYAVLVSALVLMAMVKRKDSRGRAKRSGSGATNFSLLKQAGDVEENPGPTSMDWIWRILFLVGAATGAHSFEEVQLVESGGGLVQPGGSLRLSCAASGFTFSDYFMSWVRQAPGKGLEWVATISNGGTYTYYPDSVKGRFTISRDNSKNTLYLQMNSLRAEDTAVYYCARFDGYIFDYWGQGTLVTVSSTRIQNPDPAVYQLRDSKSSDKSVCLFTDFDSQTNVSQSKDSDVYITDKCVLDMRSMDFKSNSAVAWSNKSDFACANAFNNSIIPEDTFFPSPESSCDVKLVEKSFETDTNLNFQNLSVIGFRILLLKVAGFNLLMTLRLWSS

SEQ ID NO: 21339 - protein, 755 aa, Artificial Sequence
  Synthetic Polypeptide
MALPVTALLLPLALLLHAARPDIQMTQSPSSLSASVGDRVTITCRASQDISSYLNWYQQKPGKAPKLLIYYTSRLHSGVPSRFSGSGSGTDFTLTISSLQPEDFATYYCQQGNTLPYTFGQGTKVEIKRLEDLKNVFPPEVAVFEPSEAEISHTQKATLVCLATGFYPDHVELSWWVNGKEVHSGVCTDPQPLKEQPALNDSRYCLSSRLRVSATFWQNPRNHFRCQVQFYGLSENDEWTQDRAKPVTQIVSAEAWGRADCGFTSESYQQGVLSATILYEILLGKATLYAVLVSALVLMAMVKRKDSRGRAKRSGSGATNFSLLKQAGDVEENPGPTSMDWIWRILFLVGAATGAHSGPEVQLVESGGGLVQAGGSLRLSCAASGRTFSMGWFRQAPGKEREFVAAITYSGGSPYYADSVKGRFTISRDNAKNTVYLQMNSLKPEDTAVYYCAANPTYGSDWNAENWGQGTQVTVSSGSGGGGSGGGGSGGGGSFEEVQLVESGGGLVQPGGSLRLSCAASGFTFSDYFMSWVRQAPGKGLEWVATISNGGTYTYYPDSVKGRFTISRDNSKNTLYLQMNSLRAEDTAVYYCARFDGYIFDYWGQGTLVTVSSTRIQNPDPAVYQLRDSKSSDKSVCLFTDFDSQTNVSQSKDSDVYITDKCVLDMRSMDFKSNSAVAWSNKSDFACANAFNNSIIPEDTFFPSPESSCDVKLVEKSFETDTNLNFQNLSVIGFRILLLKVAGFNLLMTLRLWSS

SEQ ID NO: 21340 - protein, 882 aa, Artificial Sequence
  Synthetic Polypeptide
MALPVTALLLPLALLLHAARPDIQMTQSPSSLSASVGDRVTITCRASQDISSYLNWYQQKPGKAPKLLIYYTSRLHSGVPSRFSGSGSGTDFTLTISSLQPEDFATYYCQQGNTLPYTFGQGTKVEIKRLEDLKNVFPPEVAVFEPSEAEISHTQKATLVCLATGFYPDHVELSWWVNGKEVHSGVCTDPQPLKEQPALNDSRYCLSSRLRVSATFWQNPRNHFRCQVQFYGLSENDEWTQDRAKPVTQIVSAEAWGRADCGFTSESYQQGVLSATILYEILLGKATLYAVLVSALVLMAMVKRKDSRGRAKRSGSGATNFSLLKQAGDVEENPGPTSMDWIWRILFLVGAATGAHSQLQLQESGPGLVKPSETLSLTCTVSGGSISSGDYYWGWIRQPPGKGLEWIGSISYSGSTYYNPSLKSRVTISVDTSRNQFSLKLSSVTAADTAVYYCTREDSSNWRSRGQGTLVTVSSSGGGGSGGGGSEVQLVESGGGLVQAGGSLRLSCAASGRTFSMGWFRQAPGKEREFVAAITYSGGSPYYADSVKGRFTISRDNAKNTVYLQMNSLKPEDTAVYYCAANPTYGSDWNAENWGQGTQVTVSSGSGGGGSGGGGSGGGGSFEEVQLVESGGGLVQPGGSLRLSCAASGFTFSDYFMSWVRQAPGKGLEWVATISNGGTYTYYPDSVKGRFTISRDNSKNTLYLQMNSLRAEDTAVYYCARFDGYIFDYWGQGTLVTVSSTRIQNPDPAVYQLRDSKSSDKSVCLFTDFDSQTNVSQSKDSDVYITDKCVLDMRSMDFKSNSAVAWSNKSDFACANAFNNSIIPEDTFFPSPESSCDVKLVEKSFETDTNLNFQNLSVIGFRILLLKVAGFNLLMTLRLWSS

SEQ ID NO: 21341 - protein, 891 aa, Artificial Sequence
  Synthetic Polypeptide
MALPVTALLLPLALLLHAARPEVQVLESGGGLVQPGGSLRLSCAASGFTFSNFAMSWVRQAPGKGLEWVSTISGSAGTTDYADSVKGRFTISRDNSKKTLYLQMNSLRVEDTAVYYCADGRGPFFDYRGQGTLVTVSSGTGGGGSGGGGSGGGGSEFDIQMTQSPSSLSASVGDRVTITCRASQDISSYLNWYQQKPGKAPKLLIYYTSRLHSGVPSRFSGSGSGTDFTLTISSLQPEDFATYYCQQGNTLPYTFGQGTKVEIKRLEDLKNVFPPEVAVFEPSEAEISHTQKATLVCLATGFYPDHVELSWWVNGKEVHSGVCTDPQPLKEQPALNDSRYCLSSRLRVSATFWQNPRNHFRCQVQFYGLSENDEWTQDRAKPVTQIVSAEAWGRADCGFTSESYQQGVLSATILYEILLGKATLYAVLVSALVLMAMVKRKDSRGRAKRSGSGATNFSLLKQAGDVEENPGPTSMDWIWRILFLVGAATGAHSGPEVQLVESGGGLVQAGGSLRLSCAASGRTFSMGWFRQAPGKEREFVAAITYSGGSPYYASSVRGRFTISRDNAKNTVYLQMNSLKPEDTAVYYCAANPTYGSDWNAENWGQGTQVTVSSGSGGGGSGGGGSGGGGSFEEVQLVESGGGLVQPGGSLRLSCAASGFTFSDYFMSWVRQAPGKGLEWVATISNGGTYTYYPDSVKGRFTISRDNSKNTLYLQMNSLRAEDTAVYYCARFDGYIFDYWGQGTLVTVSSTRIQNPDPAVYQLRDSKSSDKSVCLFTDFDSQTNVSQSKDSDVYITDKCVLDMRSMDFKSNSAVAWSNKSDFACANAFNNSIIPEDTFFPSPESSCDVKLVEKSFETDTNLNFQNLSVIGFRILLLKVAGFNLLMTLRLWSS

SEQ ID NO: 21342 - protein, 722 aa, Artificial Sequence
  Synthetic Polypeptide
MALPVTALLLPLALLLHAARPDIQMTQSPSSLSASVGDRVTITCRASQDISNYLNWYQQKPGKAPKLLIYYTSRLHSGVPSRFSGSGSGTDFTLTISSLQPEDFATYYCQQGNTLPWTFGQGTKVEIKRGGGGSGGGGSGGGGSEVQLVESGGGLVQPGGSLRLSCAASGFTFSDYFMSWVRQAPGKGLEWVATISNGGTYTYYPDSVKGRFTISRDNSKNTLYLQMNSLRAEDTAVYYCARFDGYIFDYWGQGTLVTVSSTREQKLISEEDLAKPTTTPAPRPPTPAPTIASQPLSLRPEACRPAAGGAVHTRGLDFACDIYIWAPLAGTCGVLLLSLVITLYCKRGRKKLLYIFKQPFMRPVQTTQEEDGCSCRFPEEEEGGCELRVKFSRSADAPAYQQGQNQLYNELNLGRREEYDVLDKRRGRDPEMGGKPRRKNPQEGLYNELQKDKMAEAYSEIGMKGERRRGKGHDGLYQGLSTATKDTYDALHMQALPPRSSGSGEGRGSLLTCGDVEENPGPHMTEYKPTVRLATRDDVPRAVRTLAAAFADYPATRHTVDPDRHIERVTELQELFLTRVGLDIGKVWVADDGAAVAVWTTPESVEAGAVFAEIGPRMAELSGSRLAAQQQMEGLLAPHRPKEPAWFLATVGVSPDHQGKGLGSAVVLPGVEAAERAGVPAFLETSAPRNLPFYERLGFTVTADVEVPEGPRTWCMTRKPGA

SEQ ID NO: 21343 - protein, 716 aa, Artificial Sequence
  Synthetic Polypeptide
MALPVTALLLPLALLLHAARPDIQMTQSPSSLSASVGDRVTITCRASQDISNYLNWYQQKPGKAPKLLIYYTSRLHSGVPSRFSGSGSGTDFTLTISSLQPEDFATYYCQQGNTLPWTFGQGTKVEIKRGGGGSGGGGSGGGGSEVQLVESGGGLVQPGGSLRLSCAASGFTFSDYFMSWVRQAPGKGLEWVATISNGGTYTYYPDSVKGRFTISRDNSKNTLYLQMNSLRAEDTAVYYCARFDGYIFDYWGQGTLVTVSSTREQKLISEEDLKIEVMYPPPYLDNEKSNGTIIHVKGKHLCPSPLFPGPSKPFWVLVVVGGVLACYSLLVTVAFIIFWVRSKRSRLLHSDYMNMTPRRPGPTRKHYQPYAPPRDFAAYRSRVKFSRSADAPAYQQGQNQLYNELNLGRREEYDVLDKRRGRDPEMGGKPRRKNPQEGLYNELQKDKMAEAYSEIGMKGERRRGKGHDGLYQGLSTATKDTYDALHMQALPPRSSGSGEGRGSLLTCGDVEENPGPHMTEYKPTVRLATRDDVPRAVRTLAAAFADYPATRHTVDPDRHIERVTELQELFLTRVGLDIGKVWVADDGAAVAVWTTPESVEAGAVFAEIGPRMAELSGSRLAAQQQMEGLLAPHRPKEPAWFLATVGVSPDHQGKGLGSAVVLPGVEAAERAGVPAFLETSAPRNLPFYERLGFTVTADVEVPEGPRTWCMTRKPGA

SEQ ID NO: 21344 - protein, 493 aa, Artificial Sequence
  Synthetic Polypeptide
MALPVTALLLPLALLLHAARPDIQMTQSPSSLSASVGDRVTITCRASQDISNYLNWYQQKPGKAPKLLIYYTSRLHSGVPSRFSGSGSGTDFTLTISSLQPEDFATYYCQQGNTLPWTFGQGTKVEIKRGGGGSGGGGSGGGGSEVQLVESGGGLVQPGGSLRLSCAASGFTFSDYFMSWVRQAPGKGLEWVATISNGGTYTYYPDSVKGRFTISRDNSKNTLYLQMNSLRAEDTAVYYCARFDGYIFDYWGQGTLVTVSSTREQKLISEEDLKIEVMYPPPYLDNEKSNGTIIHVKGKHLCPSPLFPGPSKPFWVLVVVGGVLACYSLLVTVAFIIFWVRSKRSRLLHSDYMNMTPRRPGPTRKHYQPYAPPRDFAAYRSRVKFSRSADAPAYQQGQNQLYNELNLGRREEYDVLDKRRGRDPEMGGKPRRKNPQEGLYNELQKDKMAEAYSEIGMKGERRRGKGHDGLYQGLSTATKDTYDALHMQALPPR

SEQ ID NO: 21345 - protein, 499 aa, Artificial Sequence
  Synthetic Polypeptide
MALPVTALLLPLALLLHAARPDIQMTQSPSSLSASVGDRVTITCRASQDISNYLNWYQQKPGKAPKLLIYYTSRLHSGVPSRFSGSGSGTDFTLTISSLQPEDFATYYCQQGNTLPWTFGQGTKVEIKRGGGGSGGGGSGGGGSEVQLVESGGGLVQPGGSLRLSCAASGFTFSDYFMSWVRQAPGKGLEWVATISNGGTYTYYPDSVKGRFTISRDNSKNTLYLQMNSLRAEDTAVYYCARFDGYIFDYWGQGTLVTVSSTREQKLISEEDLAKPTTTPAPRPPTPAPTIASQPLSLRPEACRPAAGGAVHTRGLDFACDIYIWAPLAGTCGVLLLSLVITLYCKRGRKKLLYIFKQPFMRPVQTTQEEDGCSCRFPEEEEGGCELRVKFSRSADAPAYQQGQNQLYNELNLGRREEYDVLDKRRGRDPEMGGKPRRKNPQEGLYNELQKDKMAEAYSEIGMKGERRRGKGHDGLYQGLSTATKDTYDALHMQALPPR

SEQ ID NO: 21346 - protein, 499 aa, Artificial Sequence
  Synthetic Polypeptide
MALPVTALLLPLALLLHAARPEVQLVESGGGLVQPGGSLRLSCAASGFTFSDYFMSWVRQAPGKGLEWVATISNGGTYTYYPDSVKGRFTISRDNSKNTLYLQMNSLRAEDTAVYYCARFDGYIFDYWGQGTLVTVSSGGGGSGGGGSGGGGSDIQMTQSPSSLSASVGDRVTITCRASQDISNYLNWYQQKPGKAPKLLIYYTSRLHSGVPSRFSGSGSGTDFTLTISSLQPEDFATYYCQQGNTLPWTFGQGTKVEIKRTREQKLISEEDLAKPTTTPAPRPPTPAPTIASQPLSLRPEACRPAAGGAVHTRGLDFACDIYIWAPLAGTCGVLLLSLVITLYCKRGRKKLLYIFKQPFMRPVQTTQEEDGCSCRFPEEEEGGCELRVKFSRSADAPAYQQGQNQLYNELNLGRREEYDVLDKRRGRDPEMGGKPRRKNPQEGLYNELQKDKMAEAYSEIGMKGERRRGKGHDGLYQGLSTATKDTYDALHMQALPPR

SEQ ID NO: 21347 - protein, 912 aa, Artificial Sequence
  Synthetic Polypeptide
MALPVTALLLPLALLLHAARPDIQMTQSPSSLSASVGDRVTITCRASQDISNYLNWYQQKPGKAPKLLIYYTSRLHSGVPSRFSGSGSGTDFTLTISSLQPEDFATYYCQQGNTLPWTFGQGTKVEIKRGGGGSGGGGSGGGGSEVQLVESGGGLVQPGGSLRLSCAASGFTFSDYFMSWVRQAPGKGLEWVATISNGGTYTYYPDSVKGRFTISRDNSKNTLYLQMNSLRAEDTAVYYCARFDGYIFDYWGQGTLVTVSSTREQKLISEEDLAKPTTTPAPRPPTPAPTIASQPLSLRPEACRPAAGGAVHTRGLDFACDIYIWAPLAGTCGVLLLSLVITLYCGRARVKFSRSADAPAYQQGQNQLYNELNLGRREEYDVLDKRRGRDPEMGGKPRRKNPQEGLYNELQKDKMAEAYSEIGMKGERRRGKGHDGLYQGLSTATKDTYDALHMQALPPRSRGSGATNFSLLKQAGDVEENPGPGIHMATYEVLCEVARKLGTDDREVVLFLLNVFIPQPTLAQLIGALRALKEEGRLTFPLLAECLFRAGRRDLLRDLLHLDPRFLERHLAGTMSYFSPYQLTVLHVDGELCARDIRSLIFLSKDTIGSRSTPQTFLHWVYCMENLDLLGPTDVDALMSMLRSLSRVDLQRQVQTLMGLHLSGPSHSQHYRHTPLETDFYDYKDDDDKTSGSGEGRGSLLTCGDVEENPGPHMTEYKPTVRLATRDDVPRAVRTLAAAFADYPATRHTVDPDRHIERVTELQELFLTRVGLDIGKVWVADDGAAVAVWTTPESVEAGAVFAEIGPRMAELSGSRLAAQQQMEGLLAPHRPKEPAWFLATVGVSPDHQGKGLGSAVVLPGVEAAERAGVPAFLETSAPRNLPFYERLGFTVTADVEVPEGPRTWCMTRKPGA

SEQ ID NO: 21348 - protein, 852 aa, Artificial Sequence
  Synthetic Polypeptide
MALPVTALLLPLALLLHAARPDIQMTQSPSSLSASVGDRVTITCRASQDISNYLNWYQQKPGKAPKLLIYYTSRLHSGVPSRFSGSGSGTDFTLTISSLQPEDFATYYCQQGNTLPWTFGQGTKVEIKRLEIQNPDPAVYQLRDSKSSDKSVCLFTDFDSQTNVSQSKDSDVYITDKCVLDMRSMDFKSNSAVAWSNKSDFACANAFNNSIIPEDTFFPSSDVPCDVKLVEKSFETDTNLNFQNLSVIGFRILLLKVAGFNLLMTLRLWSSRAKRSGSGVKQTLNFDLLKLAGDVESNPGPTSMDWIWRILFLVGAATGAHSFEEVQLVESGGGLVQPGGSLRLSCAASGFTFSDYFMSWVRQAPGKGLEWVATISNGGTYTYYPDSVKGRFTISRDNSKNTLYLQMNSLRAEDTAVYYCARFDGYIFDYWGQGTLVTVSSTREDLKNVFPPEVAVFEPSKAEIAHTQKATLVCLATGFYPDHVELSWWVNGKEVHSGVCTDPQPLKEQPALNDSRYCLSSRLRVSATFWQNPRNHFRCQVQFYGLSENDEWTQDRAKPVTQIVSAEAWGRADCGITSASYHQGVLSATILYEILLGKATLYAVLVSALVLMAMVKRKDSRGRAKRSGSGATNFSLLKQAGDVEENPGPSRGHMTEYKPTVRLATRDDVPRAVRTLAAAFADYPATRHTVDPDRHIERVTELQELFLTRVGLDIGKVWVADDGAAVAVWTTPESVEAGAVFAEIGPRMAELSGSRLAAQQQMEGLLAPHRPKEPAWFLATVGVSPDHQGKGLGSAVVLPGVEAAERAGVPAFLETSAPRNLPFYERLGFTVTADVEVPEGPRTWCMTRKPGA

SEQ ID NO: 21349 - protein, 851 aa, Artificial Sequence
  Synthetic Polypeptide
MALPVTALLLPLALLLHAARPDIQMTQSPSSLSASVGDRVTITCRASQDISNYLNWYQQKPGKAPKLLIYYTSRLHSGVPSRFSGSGSGTDFTLTISSLQPEDFATYYCQQGNTLPWTFGQGTKVEIKRLEDLKNVFPPEVAVFEPSKAEIAHTQKATLVCLATGFYPDHVELSWWVNGKEVHSGVCTDPQPLKEQPALNDSRYCLSSRLRVSATFWQNPRNHFRCQVQFYGLSENDEWTQDRAKPVTQIVSAEAWGRADCGITSASYHQGVLSATILYEILLGKATLYAVLVSALVLMAMVKRKDSRGRAKRSGSGATNFSLLKQAGDVEENPGPTSMDWIWRILFLVGAATGAHSFEEVQLVESGGGLVQPGGSLRLSCAASGFTFSDYFMSWVRQAPGKGLEWVATISNGGTYTYYPDSVKGRFTISRDNSKNTLYLQMNSLRAEDTAVYYCARFDGYIFDYWGQGTLVTVSSTRIQNPDPAVYQLRDSKSSDKSVCLFTDFDSQTNVSQSKDSDVYITDKCVLDMRSMDFKSNSAVAWSNKSDFACANAFNNSIIPEDTFFPSSDVPCDVKLVEKSFETDTNLNFQNLSVIGFRILLLKVAGFNLLMTLRLWSSRAKRSGSGVKQTLNFDLLKLAGDVESNPGPSRGHMTEYKPTVRLATRDDVPRAVRTLAAAFADYPATRHTVDPDRHIERVTELQELFLTRVGLDIGKVWVADDGAAVAVWTTPESVEAGAVFAEIGPRMAELSGSRLAAQQQMEGLLAPHRPKEPAWFLATVGVSPDHQGKGLGSAVVLPGVEAAERAGVPAFLETSAPRNLPFYERLGFTVTADVEVPEGPRTWCMTRKPGA

SEQ ID NO: 21350 - protein, 618 aa, Artificial Sequence
  Synthetic Polypeptide
MALPVTALLLPLALLLHAARPDIQMTQSPSSLSASVGDRVTITCRASQDISNYLNWYQQKPGKAPKLLIYYTSRLHSGVPSRFSGSGSGTDFTLTISSLQPEDFATYYCQQGNTLPWTFGQGTKVEIKRLEDLKNVFPPEVAVFEPSEAEISHTQKATLVCLATGFYPDHVELSWWVNGKEVHSGVCTDPQPLKEQPALNDSRYCLSSRLRVSATFWQNPRNHFRCQVQFYGLSENDEWTQDRAKPVTQIVSAEAWGRADCGFTSESYQQGVLSATILYEILLGKATLYAVLVSALVLMAMVKRKDSRGRAKRSGSGATNFSLLKQAGDVEENPGPTSMDWIWRILFLVGAATGAHSFEEVQLVESGGGLVQPGGSLRLSCAASGFTFSDYFMSWVRQAPGKGLEWVATISNGGTYTYYPDSVKGRFTISRDNSKNTLYLQMNSLRAEDTAVYYCARFDGYIFDYWGQGTLVTVSSTRIQNPDPAVYQLRDSKSSDKSVCLFTDFDSQTNVSQSKDSDVYITDKCVLDMRSMDFKSNSAVAWSNKSDFACANAFNNSIIPEDTFFPSPESSCDVKLVEKSFETDTNLNFQNLSVIGFRILLLKVAGFNLLMTLRLWSS

SEQ ID NO: 21351 - protein, 843 aa, Artificial Sequence
  Synthetic Polypeptide
MALPVTALLLPLALLLHAARPDIQMTQSPSSLSASVGDRVTITCRASQDISNYLNWYQQKPGKAPKLLIYYTSRLHSGVPSRFSGSGSGTDFTLTISSLQPEDFATYYCQQGNTLPWTFGQGTKVEIKRLEDLKNVFPPEVAVFEPSEAEISHTQKATLVCLATGFYPDHVELSWWVNGKEVHSGVCTDPQPLKEQPALNDSRYCLSSRLRVSATFWQNPRNHFRCQVQFYGLSENDEWTQDRAKPVTQIVSAEAWGRADCGFTSESYQQGVLSATILYEILLGKATLYAVLVSALVLMAMVKRKDSRGRAKRSGSGATNFSLLKQAGDVEENPGPTSMDWIWRILFLVGAATGAHSFEEVQLVESGGGLVQPGGSLRLSCAASGFTFSDYFMSWVRQAPGKGLEWVATISNGGTYTYYPDSVKGRFTISRDNSKNTLYLQMNSLRAEDTAVYYCARFDGYIFDYWGQGTLVTVSSTRIQNPDPAVYQLRDSKSSDKSVCLFTDFDSQTNVSQSKDSDVYITDKCVLDMRSMDFKSNSAVAWSNKSDFACANAFNNSIIPEDTFFPSPESSCDVKLVEKSFETDTNLNFQNLSVIGFRILLLKVAGFNLLMTLRLWSSRAKRSGSGVKQTLNFDLLKLAGDVESNPGPSRGGIHTMATYEVLCEVARKLGTDDREVVLFLLNVFIPQPTLAQLIGALRALKEEGRLTFPLLAECLFRAGRRDLLRDLLHLDPRFLERHLAGTMSYFSPYQLTVLHVDGELCARDIRSLIFLSKDTIGSRSTPQTFLHWVYCMENLDLLGPTDVDALMSMLRSLSRVDLQRQVQTLMGLHLSGPSHSQHYRHTP

SEQ ID NO: 21352 - protein, 622 aa, Artificial Sequence
  Synthetic Polypeptide
MALPVTALLLPLALLLHAARPDIQMTQSPSSLSASVGDRVTITCRASQDISNYLNWYQQKPGKAPKLLIYYTSRLHSGVPSRFSGSGSGTDFTLTISSLQPEDFATYYCQQGNTLPWTFGQGTKVEIKRLEIQNPDPAVYQLRDSKSSDKSVCLFTDFDSQTNVSQSKDSDVYITDKCVLDMRSMDFKSNSAVAWSNKSDFACANAFNNSIIPEDTFFPSPESSCDVKLVEKSFETDTNLNFQNLSVIGFRILLLKVAGFNLLMTLRLWSSRAKRSGSGVKQTLNFDLLKLAGDVESNPGPTSMDWIWRILFLVGAATGAHSFEEVQLVESGGGLVQPGGSLRLSCAASGFTFSDYFMSWVRQAPGKGLEWVATISNGGTYTYYPDSVKGRFTISRDNSKNTLYLQMNSLRAEDTAVYYCARFDGYIFDYWGQGTLVTVSSTREDLKNVFPPEVAVFEPSEAEISHTQKATLVCLATGFYPDHVELSWWVNGKEVHSGVCTDPQPLKEQPALNDSRYCLSSRLRVSATFWQNPRNHFRCQVQFYGLSENDEWTQDRAKPVTQIVSAEAWGRADCGFTSESYQQGVLSATILYEILLGKATLYAVLVSALVLMAMVKRKDSRG

SEQ ID NO: 21353 - protein, 844 aa, Artificial Sequence
  Synthetic Polypeptide
MALPVTALLLPLALLLHAARPDIQMTQSPSSLSASVGDRVTITCRASQDISNYLNWYQQKPGKAPKLLIYYTSRLHSGVPSRFSGSGSGTDFTLTISSLQPEDFATYYCQQGNTLPWTFGQGTKVEIKRLEIQNPDPAVYQLRDSKSSDKSVCLFTDFDSQTNVSQSKDSDVYITDKCVLDMRSMDFKSNSAVAWSNKSDFACANAFNNSIIPEDTFFPSPESSCDVKLVEKSFETDTNLNFQNLSVIGFRILLLKVAGFNLLMTLRLWSSRAKRSGSGVKQTLNFDLLKLAGDVESNPGPTSMDWIWRILFLVGAATGAHSFEEVQLVESGGGLVQPGGSLRLSCAASGFTFSDYFMSWVRQAPGKGLEWVATISNGGTYTYYPDSVKGRFTISRDNSKNTLYLQMNSLRAEDTAVYYCARFDGYIFDYWGQGTLVTVSSTREDLKNVFPPEVAVFEPSEAEISHTQKATLVCLATGFYPDHVELSWWVNGKEVHSGVCTDPQPLKEQPALNDSRYCLSSRLRVSATFWQNPRNHFRCQVQFYGLSENDEWTQDRAKPVTQIVSAEAWGRADCGFTSESYQQGVLSATILYEILLGKATLYAVLVSALVLMAMVKRKDSRGRAKRSGSGATNFSLLKQAGDVEENPGPSRGGIHTMATYEVLCEVARKLGTDDREVVLFLLNVFIPQPTLAQLIGALRALKEEGRLTFPLLAECLFRAGRRDLLRDLLHLDPRFLERHLAGTMSYFSPYQLTVLHVDGELCARDIRSLIFLSKDTIGSRSTPQTFLHWVYCMENLDLLGPTDVDALMSMLRSLSRVDLQRQVQTLMGLHLSGPSHSQHYRHTP

SEQ ID NO: 21354 - protein, 896 aa, Artificial Sequence
  Synthetic Polypeptide
MALPVTALLLPLALLLHAARPLEGKPIPNPLLGLDSTGSGEDLKNVFPPEVAVFEPSKAEIAHTQKATLVCLATGFYPDHVELSWWVNGKEVHSGVCTDPQPLKEQPALNDSRYCLSSRLRVSATFWQNPRNHFRCQVQFYGLSENDEWTQDRAKPVTQIVSAEAWGRADCGITSASYHQGVLSATILYEILLGKATLYAVLVSALVLMAMVKRKDSRGRAKRSGSGATNFSLLKQAGDVEENPGPTSMALPVTALLLPLALLLHAARPDIQMTQSPSSLSASVGDRVTITCRASQDISNYLNWYQQKPGKAPKLLIYYTSRLHSGVPSRFSGSGSGTDFTLTISSLQPEDFATYYCQQGNTLPWTFGQGTKVEIKRGGGGSGGGGSGGGGSEVQLVESGGGLVQPGGSLRLSCAASGFTFSDYFMSWVRQAPGKGLEWVATISNGGTYTYYPDSVKGRFTISRDNSKNTLYLQMNSLRAEDTAVYYCARFDGYIFDYWGQGTLVTVSSTREQKLISEEDGSGIQNPDPAVYQLRDSKSSDKSVCLFTDFDSQTNVSQSKDSDVYITDKCVLDMRSMDFKSNSAVAWSNKSDFACANAFNNSIIPEDTFFPSSDVPCDVKLVEKSFETDTNLNFQNLSVIGFRILLLKVAGFNLLMTLRLWSSRAKRSGSGVKQTLNFDLLKLAGDVESNPGPSRGHMTEYKPTVRLATRDDVPRAVRTLAAAFADYPATRHTVDPDRHIERVTELQELFLTRVGLDIGKVWVADDGAAVAVWTTPESVEAGAVFAEIGPRMAELSGSRLAAQQQMEGLLAPHRPKEPAWFLATVGVSPDHQGKGLGSAVVLPGVEAAERAGVPAFLETSAPRNLPFYERLGFTVTADVEVPEGPRTWCMTRKPGA

SEQ ID NO: 21355 - protein, 897 aa, Artificial Sequence
  Synthetic Polypeptide
MALPVTALLLPLALLLHAARPLEQKLISEEDLGSGDRPDPAVYQLRDSKSSDKSVCLFTDFDSQTNVSQSKDSDVYITDKCVLDMRSMDFKSNSAVAWSNKSDFACANAFNNSIIPEDTFFPSPESSCDVKLVEKSFETDTNLNFQNLSVIGFRILLLKVAGFNLLMTLRLWSSSSRAKRSGSGVKQTLNFDLLKLAGDVESNPGPTSMALPVTALLLPLALLLHAARPDIQMTQSPSSLSASVGDRVTITCRASQDISNYLNWYQQKPGKAPKLLIYYTSRLHSGVPSRFSGSGSGTDFTLTISSLQPEDFATYYCQQGNTLPWTFGQGTKVEIKRGGGGSGGGGSGGGGSEVQLVESGGGLVQPGGSLRLSCAASGFTFSDYFMSWVRQAPGKGLEWVATISNGGTYTYYPDSVKGRFTISRDNSKNTLYLQMNSLRAEDTAVYYCARFDGYIFDYWGQGTLVTVSSTRGKPIPNPLLGLDSTGSGEDLKNVFPPEVAVFEPSEAEISHTQKATLVCLATGFYPDHVELSWWVNGKEVHSGVCTDPQPLKEQPALNDSRYCLSSRLRVSATFWQNPRNHFRCQVQFYGLSENDEWTQDRAKPVTQIVSAEAWGRADCGFTSESYQQGVLSATILYEILLGKATLYAVLVSALVLMAMVKRKDSRGRAKRSGSGATNFSLLKQAGDVEENPGPSRGHMTEYKPTVRLATRDDVPRAVRTLAAAFADYPATRHTVDPDRHIERVTELQELFLTRVGLDIGKVWVADDGAAVAVWTTPESVEAGAVFAEIGPRMAELSGSRLAAQQQMEGLLAPHRPKEPAWFLATVGVSPDHQGKGLGSAVVLPGVEAAERAGVPAFLETSAPRNLPFYERLGFTVTADVEVPEGPRTWCMTRKPGA

SEQ ID NO: 21356 - protein, 851 aa, Artificial Sequence
  Synthetic Polypeptide
MALPVTALLLPLALLLHAARPDIQMTQSPSSLSASVGDRVTITCRASQDISNYLNWYQQKPGKAPKLLIYYTSRLHSGVPSRFSGSGSGTDFTLTISSLQPEDFATYYCQQGNTLPWTFGQGTKVEIKRLEDLKNVFPPEVAVFEPSEAEISHTQKATLVCLATGFYPDHVELSWWVNGKEVHSGVSTDPQPLKEQPALNDSRYCLSSRLRVSATFWQNPRNHFRCQVQFYGLSENDEWTQDRAKPVTQIVSAEAWGRADCGFTSESYQQGVLSATILYEILLGKATLYAVLVSALVLMAMVKRKDSRGRAKRSGSGATNFSLLKQAGDVEENPGPTSMDWIWRILFLVGAATGAHSFEEVQLVESGGGLVQPGGSLRLSCAASGFTFSDYFMSWVRQAPGKGLEWVATISNGGTYTYYPDSVKGRFTISRDNSKNTLYLQMNSLRAEDTAVYYCARFDGYIFDYWGQGTLVTVSSTRIQNPDPAVYQLRDSKSSDKSVCLFTDFDSQTNVSQSKDSDVYITDKTVLDMRSMDFKSNSAVAWSNKSDFACANAFNNSIIPEDTFFPSPESSCDVKLVEKSFETDTNLNFQNLSVIGFRILLLKVAGFNLLMTLRLWSSRAKRSGSGVKQTLNFDLLKLAGDVESNPGPSRGHMTEYKPTVRLATRDDVPRAVRTLAAAFADYPATRHTVDPDRHIERVTELQELFLTRVGLDIGKVWVADDGAAVAVWTTPESVEAGAVFAEIGPRMAELSGSRLAAQQQMEGLLAPHRPKEPAWFLATVGVSPDHQGKGLGSAVVLPGVEAAERAGVPAFLETSAPRNLPFYERLGFTVTADVEVPEGPRTWCMTRKPGA

SEQ ID NO: 21357 - protein, 933 aa, Artificial Sequence
  Synthetic Polypeptide
MALPVTALLLPLALLLHAARPDIQMTQSPSSLSASVGDRVTITCRASQDISNYLNWYQQKPGKAPKLLIYYTSRLHSGVPSRFSGSGSGTDFTLTISSLQPEDFATYYCQQGNTLPWTFGQGTKVEIKRLEDLKNVFPPEVAVFEPSEAEISHTQKATLVCLATGFYPDHVELSWWVNGKEVHSGVSTDPQPLKEQPALNDSRYCLSSRLRVSATFWQNPRNHFRCQVQFYGLSENDEWTQDRAKPVTQIVSAEAWGRADCGFTSESYQQGVLSATILYEILLGKATLYAVLVSALVLMAMVKRKDSRGRAKRSGSGATNFSLLKQAGDVEENPGPTSMDWIWRILFLVGAATGAHSFEEVQLVESGGGLVQPGGSLRLSCAASGFTFSDYFMSWVRQAPGKGLEWVATISNGGTYTYYPDSVKGRFTISRDNSKNTLYLQMNSLRAEDTAVYYCARFDGYIFDYWGQGTLVTVSSTREQKLISEEDGSGTPFPSLAPPIMLLVDGKQQMVVVCLVLDVAPPGLDSPIWFSAGNGSALDAFTYGPSPATDGTWTNLAHLSLPSEELASWEPLVCHTGPGAEGHSRSTQPMHLSGEASTARTCPQEPLRGTPGGALWLGVLRLLLFKLLLFDLLLTCSCLCDPAGPLPSPATTTRLRALGSHRLHPATETGGREATSSPRPQPRDRRWGDTPPGRKPGSPVRAKRSGSGVKQTLNFDLLKLAGDVESNPGPSRGHMTEYKPTVRLATRDDVPRAVRTLAAAFADYPATRHTVDPDRHIERVTELQELFLTRVGLDIGKVWVADDGAAVAVWTTPESVEAGAVFAEIGPRMAELSGSRLAAQQQMEGLLAPHRPKEPAWFLATVGVSPDHQGKGLGSAVVLPGVEAAERAGVPAFLETSAPRNLPFYERLGFTVTADVEVPEGPRTWCMTRKPGA

SEQ ID NO: 21358 - protein, 951 aa, Artificial Sequence
  Synthetic Polypeptide
MALPVTALLLPLALLLHAARPLEDLKNVFPPEVAVFEPSEAEISHTQKATLVCLATGFYPDHVELSWWVNGKEVHSGVSTDPQPLKEQPALNDSRYCLSSRLRVSATFWQNPRNHFRCQVQFYGLSENDEWTQDRAKPVTQIVSAEAWGRADCGFTSESYQQGVLSATILYEILLGKATLYAVLVSALVLMAMVKRKDSRGRAKRSGSGATNFSLLKQAGDVEENPGPTSMALPVTALLLPLALLLHAARPDIQMTQSPSSLSASVGDRVTITCRASQDISNYLNWYQQKPGKAPKLLIYYTSRLHSGVPSRFSGSGSGTDFTLTISSLQPEDFATYYCQQGNTLPWTFGQGTKVEIKRGGGGSGGGGSGGGGSEVQLVESGGGLVQPGGSLRLSCAASGFTFSDYFMSWVRQAPGKGLEWVATISNGGTYTYYPDSVKGRFTISRDNSKNTLYLQMNSLRAEDTAVYYCARFDGYIFDYWGQGTLVTVSSTREQKLISEEDLGSGTPFPSLAPPIMLLVDGKQQMVVVCLVLDVAPPGLDSPIWFSAGNGSALDAFTYGPSPATDGTWTNLAHLSLPSEELASWEPLVCHTGPGAEGHSRSTQPMHLSGEASTARTCPQEPLRGTPGGALWLGVLRLLLFKLLLFDLLLTCSCLCDPAGPLPSPATTTRLRALGSHRLHPATETGGREATSSPRPQPRDRRWGDTPPGRKPGSPVRAKRSGSGVKQTLNFDLLKLAGDVESNPGPSRSRGHMTEYKPTVRLATRDDVPRAVRTLAAAFADYPATRHTVDPDRHIERVTELQELFLTRVGLDIGKVWVADDGAAVAVWTTPESVEAGAVFAEIGPRMAELSGSRLAAQQQMEGLLAPHRPKEPAWFLATVGVSPDHQGKGLGSAVVLPGVEAAERAGVPAFLETSAPRNLPFYERLGFTVTADVEVPEGPRTWCMTRKPGA

SEQ ID NO: 21359 - protein, 888 aa, Artificial Sequence
  Synthetic Polypeptide
MALPVTALLLPLALLLHAARPDIQMTQSPSSLSASVGDRVTITCRASQDISNYLNWYQQKPGKAPKLLIYYTSRLHSGVPSRFSGSGSGTDFTLTISSLQPEDFATYYCQQGNTLPWTFGQGTKVEIKRLEGKPIPNPLLGLDSTGSGDKQLDADVSPKPTIFLPSIAETKLQKAGTYLCLLEKFFPDVIKIHWQEKKSNTILGSQEGNTMKTNDTYMKFSWLTVPEKSLDKEHRCIVRHENNKNGVDQEIIFPPIKTDVITMDPKDNCSKDANDTLLLQLTNTSAYYMYLLLLLKSVVYFAIITCCLLRRTAFCCNGEKSRAKRSGSGATNFSLLKQAGDVEENPGPTSMDWIWRILFLVGAATGAHSFEEVQLVESGGGLVQPGGSLRLSCAASGFTFSDYFMSWVRQAPGKGLEWVATISNGGTYTYYPDSVKGRFTISRDNSKNTLYLQMNSLRAEDTAVYYCARFDGYIFDYWGQGTLVTVSSTREQKLISEEDGSGSQPHTKPSVFVMKNGTNVACLVKEFYPKDIRINLVSSKKITEFDPAIVISPSGKYNAVKLGKYEDSNSVTCSVQHDNKTVHSTDFEVKTDSTDHVKPKETENTKQPSKSCHKPKAIVHTEKVNMMSLTVLGLRMLFAKTVAVNFLLTAKLFFLRAKRSGSGVKQTLNFDLLKLAGDVESNPGPSRGHMTEYKPTVRLATRDDVPRAVRTLAAAFADYPATRHTVDPDRHIERVTELQELFLTRVGLDIGKVWVADDGAAVAVWTTPESVEAGAVFAEIGPRMAELSGSRLAAQQQMEGLLAPHRPKEPAWFLATVGVSPDHQGKGLGSAVVLPGVEAAERAGVPAFLETSAPRNLPFYERLGFTVTADVEVPEGPRTWCMTRKPGA

SEQ ID NO: 21360 - protein, 626 aa, Artificial Sequence
  Synthetic Polypeptide
MALPVTALLLPLALLLHAARPDIQMTQSPSSLSASVGDRVTITCRASQDISNYLNWYQQKPGKAPKLLIYYTSRLHSGVPSRFSGSGSGTDFTLTISSLQPEDFATYYCQQGNTLPWTFGQGTKVEIKRLESQPHTKPSVFVMKNGTNVACLVKEFYPKDIRINLVSSKKITEFDPAIVISPSGKYNAVKLGKYEDSNSVTCSVQHDNKTVHSTDFEVKTDSTDHVKPKETENTKQPSKSCHKPKAIVHTEKVNMMSLTVLGLRMLFAKTVAVNFLLTAKLFFLRAKRSGSGATNFSLLKQAGDVEENPGPTSMDWIWRILFLVGAATGAHSFEEVQLVESGGGLVQPGGSLRLSCAASGFTFSDYFMSWVRQAPGKGLEWVATISNGGTYTYYPDSVKGRFTISRDNSKNTLYLQMNSLRAEDTAVYYCARFDGYIFDYWGQGTLVTVSSTRDKQLDADVSPKPTIFLPSIAETKLQKAGTYLCLLEKFFPDVIKIHWQEKKSNTILGSQEGNTMKTNDTYMKFSWLTVPEKSLDKEHRCIVRHENNKNGVDQEIIFPPIKTDVITMDPKDNCSKDANDTLLLQLTNTSAYYMYLLLLLKSVVYFAIITCCLLRRTAFCCNGEKS

SEQ ID NO: 21361 - protein, 903 aa, Artificial Sequence
  Synthetic Polypeptide
MALPVTALLLPLALLLHAARPLEGKPIPNPLLGLDSTGSGDKQLDADVSPKPTIFLPSIAETKLQKAGTYLCLLEKFFPDVIKIHWQEKKSNTILGSQEGNTMKTNDTYMKFSWLTVPEKSLDKEHRCIVRHENNKNGVDQEIIFPPIKTDVITMDPKDNCSKDANDTLLLQLTNTSAYYMYLLLLLKSVVYFAIITCCLLRRTAFCCNGEKSRAKRSGSGATNFSLLKQAGDVEENPGPTSMALPVTALLLPLALLLHAARPDIQMTQSPSSLSASVGDRVTITCRASQDISNYLNWYQQKPGKAPKLLIYYTSRLHSGVPSRFSGSGSGTDFTLTISSLQPEDFATYYCQQGNTLPWTFGQGTKVEIKRGGGGSGGGGSGGGGSEVQLVESGGGLVQPGGSLRLSCAASGFTFSDYFMSWVRQAPGKGLEWVATISNGGTYTYYPDSVKGRFTISRDNSKNTLYLQMNSLRAEDTAVYYCARFDGYIFDYWGQGTLVTVSSTREQKLISEEDGSGSQPHTKPSVFVMKNGTNVACLVKEFYPKDIRINLVSSKKITEFDPAIVISPSGKYNAVKLGKYEDSNSVTCSVQHDNKTVHSTDFEVKTDSTDHVKPKETENTKQPSKSCHKPKAIVHTEKVNMMSLTVLGLRMLFAKTVAVNFLLTAKLFFLRAKRSGSGVKQTLNFDLLKLAGDVESNPGPSRGHMTEYKPTVRLATRDDVPRAVRTLAAAFADYPATRHTVDPDRHIERVTELQELFLTRVGLDIGKVWVADDGAAVAVWTTPESVEAGAVFAEIGPRMAELSGSRLAAQQQMEGLLAPHRPKEPAWFLATVGVSPDHQGKGLGSAVVLPGVEAAERAGVPAFLETSAPRNLPFYERLGFTVTADVEVPEGPRTWCMTRKPGA

SEQ ID NO: 21362 - protein, 1028 aa, Artificial Sequence
  Synthetic Polypeptide
MALPVTALLLPLALLLHAARPDIQMTQSPSSLSASVGDRVTITCRASQDISNYLNWYQQKPGKAPKLLIYYTSRLHSGVPSRFSGSGSGTDFTLTISSLQPEDFATYYCQQGNTLPWTFGQGTKVEIKRGQPKANPTVTLFPPSSEELQANKATLVCLISDFYPGAVTVAWKADGSPVKAGVETTKPSKQSNNKYAASSYLSLTPEQWKSHRSYSCQVTHEGSTVEKTVAPTECSGSQSFGLLDPKLCYLLDGILFIYGVILTALFLRVKFSRSADAPAYQQGQNQLYNELNLGRREEYDVLDKRRGRDPEMGGKPQRRKNPQEGLYNELQKDKMAEAYSEIGMKGERRRGKGHDGLYQGLSTATKDTYDALHMQALPPRRAKRSGSGATNFSLLKQAGDVEENPGPTSMDWIWRILFLVGAATGAHSFEEVQLVESGGGLVQPGGSLRLSCAASGFTFSDYFMSWVRQAPGKGLEWVATISNGGTYTYYPDSVKGRFTISRDNSKNTLYLQMNSLRAEDTAVYYCARFDGYIFDYWGQGTLVTVSSASTKGPSVFPLAPSSKSTSGGTAALGCLVKDYFPEPVTVSWNSGALTSGVHTFPAVLQSSGLYSLSSVVTVPSSSLGTQTYICNVNHKPSNTKVDKRVEPKSCGTQSFGLLDPKLCYLLDGILFIYGVILTALFLRVKFSRSADAPAYQQGQNQLYNELNLGRREEYDVLDKRRGRDPEMGGKPQRRKNPQEGLYNELQKDKMAEAYSEIGMKGERRRGKGHDGLYQGLSTATKDTYDALHMQALPPRRAKRSGSGVKQTLNFDLLKLAGDVESNPGPSRGHMTEYKPTVRLATRDDVPRAVRTLAAAFADYPATRHTVDPDRHIERVTELQELFLTRVGLDIGKVWVADDGAAVAVWTTPESVEAGAVFAEIGPRMAELSGSRLAAQQQMEGLLAPHRPKEPAWFLATVGVSPDHQGKGLGSAVVLPGVEAAERAGVPAFLETSAPRNLPFYERLGFTVTADVEVPEGPRTWCMTRKPGA

SEQ ID NO: 21363 - protein, 814 aa, Artificial Sequence
  Synthetic Polypeptide
MALPVTALLLPLALLLHAARPDIQMTQSPSSLSASVGDRVTITCRASQDISNYLNWYQQKPGKAPKLLIYYTSRLHSGVPSRFSGSGSGTDFTLTISSLQPEDFATYYCQQGNTLPWTFGQGTKVEIKRLEDLKNVFPPEVAVFEPSEAEISHTQKATLVCLATGFYPDHVELSWWVNGKEVHSGVSTDPQPLKEQPALNDSRYCLSSRLRVSATFWQNPRNHFRCQVQFYGLSENDEWTQDRAKPVTQIVSAEAWGRADCGSQSFGLLDPKLCYLLDGILFIYGVILTALFLRVKFSRSADAPAYQQGQNQLYNELNLGRREEYDVLDKRRGRDPEMGGKPQRRKNPQEGLYNELQKDKMAEAYSEIGMKGERRRGKGHDGLYQGLSTATKDTYDALHMQALPPRRAKRSGSGATNFSLLKQAGDVEENPGPTSMDWIWRILFLVGAATGAHSFEEVQLVESGGGLVQPGGSLRLSCAASGFTFSDYFMSWVRQAPGKGLEWVATISNGGTYTYYPDSVKGRFTISRDNSKNTLYLQMNSLRAEDTAVYYCARFDGYIFDYWGQGTLVTVSSTRIQNPDPAVYQLRDSKSSDKSVCLFTDFDSQTNVSQSKDSDVYITDKTVLDMRSMDFKSNSAVAWSNKSDFACANAFNNSIIPEDTFFPSPESSCGTQSFGLLDPKLCYLLDGILFIYGVILTALFLRVKFSRSADAPAYQQGQNQLYNELNLGRREEYDVLDKRRGRDPEMGGKPQRRKNPQEGLYNELQKDKMAEAYSEIGMKGERRRGKGHDGLYQGLSTATKDTYDALHMQALPPR

SEQ ID NO: 21364 - protein, 814 aa, Artificial Sequence
  Synthetic Polypeptide
MALPVTALLLPLALLLHAARPDIQMTQSPSSLSASVGDRVTITCRASQDISNYLNWYQQKPGKAPKLLIYYTSRLHSGVPSRFSGSGSGTDFTLTISSLQPEDFATYYCQQGNTLPWTFGQGTKVEIKRLEDLKNVFPPEVAVFEPSKAEIAHTQKATLVCLATGFYPDHVELSWWVNGKEVHSGVCTDPQPLKEQPALNDSRYCLSSRLRVSATFWQNPRNHFRCQVQFYGLSENDEWTQDRAKPVTQIVSAEAWGRADCGSQSFGLLDPKLCYLLDGILFIYGVILTALFLRVKFSRSADAPAYQQGQNQLYNELNLGRREEYDVLDKRRGRDPEMGGKPQRRKNPQEGLYNELQKDKMAEAYSEIGMKGERRRGKGHDGLYQGLSTATKDTYDALHMQALPPRRAKRSGSGATNFSLLKQAGDVEENPGPTSMDWIWRILFLVGAATGAHSFEEVQLVESGGGLVQPGGSLRLSCAASGFTFSDYFMSWVRQAPGKGLEWVATISNGGTYTYYPDSVKGRFTISRDNSKNTLYLQMNSLRAEDTAVYYCARFDGYIFDYWGQGTLVTVSSTRIQNPDPAVYQLRDSKSSDKSVCLFTDFDSQTNVSQSKDSDVYITDKCVLDMRSMDFKSNSAVAWSNKSDFACANAFNNSIIPEDTFFPSSDVPCGTQSFGLLDPKLCYLLDGILFIYGVILTALFLRVKFSRSADAPAYQQGQNQLYNELNLGRREEYDVLDKRRGRDPEMGGKPQRRKNPQEGLYNELQKDKMAEAYSEIGMKGERRRGKGHDGLYQGLSTATKDTYDALHMQALPPR

SEQ ID NO: 21365 - protein, 885 aa, Artificial Sequence
  Synthetic Polypeptide
MALPVTALLLPLALLLHAARPDIQMTQSPSSLSASVGDRVTITCRASQDISNYLNWYQQKPGKAPKLLIYYTSRLHSGVPSRFSGSGSGTDFTLTISSLQPEDFATYYCQQGNTLPWTFGQGTKVEIKRLEGKPIPNPLLGLDSTGSGEDLKNVFPPEVAVFEPSEAEISHTQKATLVCLATGFYPDHVELSWWVNGKEVHSGVSTDPQPLKEQPALNDSRYCLSSRLRVSATFWQNPRNHFRCQVQFYGLSENDEWTQDRAKPVTQIVSAEAWGRADCGSQSFGLLDPKLCYLLDGILFIYGVILTALFLRVKFSRSADAPAYQQGQNQLYNELNLGRREEYDVLDKRRGRDPEMGGKPQRRKNPQEGLYNELQKDKMAEAYSEIGMKGERRRGKGHDGLYQGLSTATKDTYDALHMQALPPRRAKRSGSGATNFSLLKQAGDVEENPGPTSMDWIWRILFLVGAATGAHSFEEVQLVESGGGLVQPGGSLRLSCAASGFTFSDYFMSWVRQAPGKGLEWVATISNGGTYTYYPDSVKGRFTISRDNSKNTLYLQMNSLRAEDTAVYYCARFDGYIFDYWGQGTLVTVSSTREQKLISEEDGSGIQNPDPAVYQLRDSKSSDKSVCLFTDFDSQTNVSQSKDSDVYITDKTVLDMRSMDFKSNSAVAWSNKSDFACANAFNNSIIPEDTFFPSPESSCGTQSFGLLDPKLCYLLDGILFIYGVILTALFLRSKRSRLLHSDYMNMTPRRPGPTRKHYQPYAPPRDFAAYRSRVKFSRSADAPAYQQGQNQLYNELNLGRREEYDVLDKRRGRDPEMGGKPQRRKNPQEGLYNELQKDKMAEAYSEIGMKGERRRGKGHDGLYQGLSTATKDTYDALHMQALPPR

SEQ ID NO: 21366 - protein, 926 aa, Artificial Sequence
  Synthetic Polypeptide
MALPVTALLLPLALLLHAARPDIQMTQSPSSLSASVGDRVTITCRASQDISNYLNWYQQKPGKAPKLLIYYTSRLHSGVPSRFSGSGSGTDFTLTISSLQPEDFATYYCQQGNTLPWTFGQGTKVEIKRLEGKPIPNPLLGLDSTGSGEDLKNVFPPEVAVFEPSEAEISHTQKATLVCLATGFYPDHVELSWWVNGKEVHSGVSTDPQPLKEQPALNDSRYCLSSRLRVSATFWQNPRNHFRCQVQFYGLSENDEWTQDRAKPVTQIVSAEAWGRADCGSQSFGLLDPKLCYLLDGILFIYGVILTALFLRSKRSRLLHSDYMNMTPRRPGPTRKHYQPYAPPRDFAAYRSRVKFSRSADAPAYQQGQNQLYNELNLGRREEYDVLDKRRGRDPEMGGKPQRRKNPQEGLYNELQKDKMAEAYSEIGMKGERRRGKGHDGLYQGLSTATKDTYDALHMQALPPRRAKRSGSGATNFSLLKQAGDVEENPGPTSMDWIWRILFLVGAATGAHSFEEVQLVESGGGLVQPGGSLRLSCAASGFTFSDYFMSWVRQAPGKGLEWVATISNGGTYTYYPDSVKGRFTISRDNSKNTLYLQMNSLRAEDTAVYYCARFDGYIFDYWGQGTLVTVSSTREQKLISEEDGSGIQNPDPAVYQLRDSKSSDKSVCLFTDFDSQTNVSQSKDSDVYITDKTVLDMRSMDFKSNSAVAWSNKSDFACANAFNNSIIPEDTFFPSPESSCGTQSFGLLDPKLCYLLDGILFIYGVILTALFLRSKRSRLLHSDYMNMTPRRPGPTRKHYQPYAPPRDFAAYRSRVKFSRSADAPAYQQGQNQLYNELNLGRREEYDVLDKRRGRDPEMGGKPQRRKNPQEGLYNELQKDKMAEAYSEIGMKGERRRGKGHDGLYQGLSTATKDTYDALHMQALPPR

SEQ ID NO: 21367 - protein, 887 aa, Artificial Sequence
  Synthetic Polypeptide
MALPVTALLLPLALLLHAARPDIQMTQSPSSLSASVGDRVTITCRASQDISNYLNWYQQKPGKAPKLLIYYTSRLHSGVPSRFSGSGSGTDFTLTISSLQPEDFATYYCQQGNTLPWTFGQGTKVEIKRLEGKPIPNPLLGLDSTGSGEDLKNVFPPEVAVFEPSEAEISHTQKATLVCLATGFYPDHVELSWWVNGKEVHSGVSTDPQPLKEQPALNDSRYCLSSRLRVSATFWQNPRNHFRCQVQFYGLSENDEWTQDRAKPVTQIVSAEAWGRADCGSQSFGLLDPKLCYLLDGILFIYGVILTALFLRVKFSRSADAPAYQQGQNQLYNELNLGRREEYDVLDKRRGRDPEMGGKPQRRKNPQEGLYNELQKDKMAEAYSEIGMKGERRRGKGHDGLYQGLSTATKDTYDALHMQALPPRRAKRSGSGATNFSLLKQAGDVEENPGPTSMDWIWRILFLVGAATGAHSFEEVQLVESGGGLVQPGGSLRLSCAASGFTFSDYFMSWVRQAPGKGLEWVATISNGGTYTYYPDSVKGRFTISRDNSKNTLYLQMNSLRAEDTAVYYCARFDGYIFDYWGQGTLVTVSSTREQKLISEEDLGSGIQNPDPAVYQLRDSKSSDKSVCLFTDFDSQTNVSQSKDSDVYITDKTVLDMRSMDFKSNSAVAWSNKSDFACANAFNNSIIPEDTFFPSPESSCGTQSFGLLDPKLCYLLDGILFIYGVILTALFLKRGRKKLLYIFKQPFMRPVQTTQEEDGCSCRFPEEEEGGCELRVKFSRSADAPAYQQGQNQLYNELNLGRREEYDVLDKRRGRDPEMGGKPQRRKNPQEGLYNELQKDKMAEAYSEIGMKGERRRGKGHDGLYQGLSTATKDTYDALHMQALPPR

SEQ ID NO: 21368 - protein, 929 aa, Artificial Sequence
  Synthetic Polypeptide
MALPVTALLLPLALLLHAARPDIQMTQSPSSLSASVGDRVTITCRASQDISNYLNWYQQKPGKAPKLLIYYTSRLHSGVPSRFSGSGSGTDFTLTISSLQPEDFATYYCQQGNTLPWTFGQGTKVEIKRLEGKPIPNPLLGLDSTGSGEDLKNVFPPEVAVFEPSEAEISHTQKATLVCLATGFYPDHVELSWWVNGKEVHSGVSTDPQPLKEQPALNDSRYCLSSRLRVSATFWQNPRNHFRCQVQFYGLSENDEWTQDRAKPVTQIVSAEAWGRADCGSQSFGLLDPKLCYLLDGILFIYGVILTALFLKRGRKKLLYIFKQPFMRPVQTTQEEDGCSCRFPEEEEGGCELRVKFSRSADAPAYQQGQNQLYNELNLGRREEYDVLDKRRGRDPEMGGKPQRRKNPQEGLYNELQKDKMAEAYSEIGMKGERRRGKGHDGLYQGLSTATKDTYDALHMQALPPRRAKRSGSGATNFSLLKQAGDVEENPGPTSMDWIWRILFLVGAATGAHSFEEVQLVESGGGLVQPGGSLRLSCAASGFTFSDYFMSWVRQAPGKGLEWVATISNGGTYTYYPDSVKGRFTISRDNSKNTLYLQMNSLRAEDTAVYYCARFDGYIFDYWGQGTLVTVSSTREQKLISEEDLGSGIQNPDPAVYQLRDSKSSDKSVCLFTDFDSQTNVSQSKDSDVYITDKTVLDMRSMDFKSNSAVAWSNKSDFACANAFNNSIIPEDTFFPSPESSCGTQSFGLLDPKLCYLLDGILFIYGVILTALFLKRGRKKLLYIFKQPFMRPVQTTQEEDGCSCRFPEEEEGGCELRVKFSRSADAPAYQQGQNQLYNELNLGRREEYDVLDKRRGRDPEMGGKPQRRKNPQEGLYNELQKDKMAEAYSEIGMKGERRRGKGHDGLYQGLSTATKDTYDALHMQALPPR

SEQ ID NO: 21369 - protein, 819 aa, Artificial Sequence
  Synthetic Polypeptide
MALPVTALLLPLALLLHAARPDIQMTQSPSSLSASVGDRVTITCRASQDISNYLNWYQQKPGKAPKLLIYYTSRLHSGVPSRFSGSGSGTDFTLTISSLQPEDFATYYCQQGNTLPWTFGQGTKVEIKRLEQSFGLLDPKLCYLLDGILFIYGVILTALFLRVKFSRSADAPAYQQGQNQLYNELNLGRREEYDVLDKRRGRDPEMGGKPQRRKNPQEGLYNELQKDKMAEAYSEIGMKGERRRGKGHDGLYQGLSTATKDTYDALHMQALPPRRAKRSGSGATNFSLLKQAGDVEENPGPTSMDWIWRILFLVGAATGAHSFEEVQLVESGGGLVQPGGSLRLSCAASGFTFSDYFMSWVRQAPGKGLEWVATISNGGTYTYYPDSVKGRFTISRDNSKNTLYLQMNSLRAEDTAVYYCARFDGYIFDYWGQGTLVTVSSTRQSFGLLDPKLCYLLDGILFIYGVILTALFLRVKFSRSADAPAYQQGQNQLYNELNLGRREEYDVLDKRRGRDPEMGGKPQRRKNPQEGLYNELQKDKMAEAYSEIGMKGERRRGKGHDGLYQGLSTATKDTYDALHMQALPPRRAKRSGSGVKQTLNFDLLKLAGDVESNPGPSRGHMTEYKPTVRLATRDDVPRAVRTLAAAFADYPATRHTVDPDRHIERVTELQELFLTRVGLDIGKVWVADDGAAVAVWTTPESVEAGAVFAEIGPRMAELSGSRLAAQQQMEGLLAPHRPKEPAWFLATVGVSPDHQGKGLGSAVVLPGVEAAERAGVPAFLETSAPRNLPFYERLGFTVTADVEVPEGPRTWCMTRKPGA

SEQ ID NO: 21370 - protein, 644 aa, Artificial Sequence
  Synthetic Polypeptide
MALPVTALLLPLALLLHAARPDIQMTQSPSSLSASVGDRVTITCRASQDISNYLNWYQQKPGKAPKLLIYYTSRLHSGVPSRFSGSGSGTDFTLTISSLQPEDFATYYCQQGNTLPWTFGQGTKVEIKRLEGQPKANPTVTLFPPSSEELQANKATLVCLISDFYPGAVTVAWKADGSPVKAGVETTKPSKQSNNKYAASSYLSLTPEQWKSHRSYSCQVTHEGSTVEKTVAPTECSPIKTDVITMDPKDNCSKDANDTLLLQLTNTSAYYMYLLLLLKSVVYFAIITCCLLRRTAFCCNGEKSRAKRSGSGATNFSLLKQAGDVEENPGPTSMDWIWRILFLVGAATGAHSFEEVQLVESGGGLVQPGGSLRLSCAASGFTFSDYFMSWVRQAPGKGLEWVATISNGGTYTYYPDSVKGRFTISRDNSKNTLYLQMNSLRAEDTAVYYCARFDGYIFDYWGQGTLVTVSSTRASTKGPSVFPLAPSSKSTSGGTAALGCLVKDYFPEPVTVSWNSGALTSGVHTFPAVLQSSGLYSLSSVVTVPSSSLGTQTYICNVNHKPSNTKVDKRVEPKSCEVKTDSTDHVKPKETENTKQPSKSCHKPKAIVHTEKVNMMSLTVLGLRMLFAKTVAVNFLLTAKLFFL

SEQ ID NO: 21371 - protein, 622 aa, Artificial Sequence
  Synthetic Polypeptide
MALPVTALLLPLALLLHAARPDIQMTQSPSSLSASVGDRVTITCRASQDISNYLNWYQQKPGKAPKLLIYYTSRLHSGVPSRFSGSGSGTDFTLTISSLQPEDFATYYCQQGNTLPWTFGQGTKVEIKRLEGQPKANPTVTLFPPSSEELQANKATLVCLISDFYPGAVTVAWKADGSPVKAGVETTKPSKQSNNKYAASSYLSLTPEQWKSHRSYSCQVTHEGSTVEKTVAPTECSGRADCGITSASYHQGVLSATILYEILLGKATLYAVLVSALVLMAMVKRKDSRGRAKRSGSGATNFSLLKQAGDVEENPGPTSMDWIWRILFLVGAATGAHSFEEVQLVESGGGLVQPGGSLRLSCAASGFTFSDYFMSWVRQAPGKGLEWVATISNGGTYTYYPDSVKGRFTISRDNSKNTLYLQMNSLRAEDTAVYYCARFDGYIFDYWGQGTLVTVSSTRASTKGPSVFPLAPSSKSTSGGTAALGCLVKDYFPEPVTVSWNSGALTSGVHTFPAVLQSSGLYSLSSVVTVPSSSLGTQTYICNVNHKPSNTKVDKRVEPKSCIPEDTFFPSSDVPCDVKLVEKSFETDTNLNFQNLSVIGFRILLLKVAGFNLLMTLRLWSS

SEQ ID NO: 21372 - protein, 622 aa, Artificial Sequence
  Synthetic Polypeptide
MALPVTALLLPLALLLHAARPDIQMTQSPSSLSASVGDRVTITCRASQDISNYLNWYQQKPGKAPKLLIYYTSRLHSGVPSRFSGSGSGTDFTLTISSLQPEDFATYYCQQGNTLPWTFGQGTKVEIKRLEGQPKANPTVTLFPPSSEELQANKATLVCLISDFYPGAVTVAWKADGSPVKAGVETTKPSKQSNNKYAASSYLSLTPEQWKSHRSYSCQVTHEGSTVEKTVAPTECSGRADCGFTSESYQQGVLSATILYEILLGKATLYAVLVSALVLMAMVKRKDSRGRAKRSGSGATNFSLLKQAGDVEENPGPTSMDWIWRILFLVGAATGAHSFEEVQLVESGGGLVQPGGSLRLSCAASGFTFSDYFMSWVRQAPGKGLEWVATISNGGTYTYYPDSVKGRFTISRDNSKNTLYLQMNSLRAEDTAVYYCARFDGYIFDYWGQGTLVTVSSTRASTKGPSVFPLAPSSKSTSGGTAALGCLVKDYFPEPVTVSWNSGALTSGVHTFPAVLQSSGLYSLSSVVTVPSSSLGTQTYICNVNHKPSNTKVDKRVEPKSCIPEDTFFPSPESSCDVKLVEKSFETDTNLNFQNLSVIGFRILLLKVAGFNLLMTLRLWSS

SEQ ID NO: 21373 - protein, 448 aa, Artificial Sequence
  Synthetic Polypeptide
MALPVTALLLPLALLLHAARPDIQMTQSPSSLSASVGDRVTITCRASQDISNYLNWYQQKPGKAPKLLIYYTSRLHSGVPSRFSGSGSGTDFTLTISSLQPEDFATYYCQQGNTLPWTFGQGTKVEIKRGGGGSGGGGSGGGGSEVQLVESGGGLVQPGGSLRLSCAASGFTFSDYFMSWVRQAPGKGLEWVATISNGGTYTYYPDSVKGRFTISRDNSKNTLYLQMNSLRAEDTAVYYCARFDGYIFDYWGQGTLVTVSSTRDGNEEMGGITQTPYKVSISGTTVILTCPQYPGSEILWQHNDKNIGGDEDDKNIGSDEDHLSLKEFSELEQSGYYVCYPRGSKPEDANFYLYLRARVCENCMEMDVMSVATIVIVDICITGGLLLLVYYWSKNRKAKAKPVTRGAGAGGRQRGQNKERPPPVPNPDYEPIRKGQRDLYSGLNQRRI

SEQ ID NO: 21374 - protein, 413 aa, Artificial Sequence
  Synthetic Polypeptide
MALPVTALLLPLALLLHAARPDIQMTQSPSSLSASVGDRVTITCRASQDISNYLNWYQQKPGKAPKLLIYYTSRLHSGVPSRFSGSGSGTDFTLTISSLQPEDFATYYCQQGNTLPWTFGQGTKVEIKRGGGGSGGGGSGGGGSEVQLVESGGGLVQPGGSLRLSCAASGFTFSDYFMSWVRQAPGKGLEWVATISNGGTYTYYPDSVKGRFTISRDNSKNTLYLQMNSLRAEDTAVYYCARFDGYIFDYWGQGTLVTVSSTRFKIPIEELEDRVFVNCNTSITWVEGTVGTLLSDITRLDLGKRILDPRGIYRCNGTDIYKDKESTVQVHYRMCQSCVELDPATVAGIIVTDVIATLLLALGVFCFAGHETGRLSGAADTQALLRNDQVYQPLRDRDDAQYSHLGGNWARNK

SEQ ID NO: 21375 - protein, 423 aa, Artificial Sequence
  Synthetic Polypeptide
MALPVTALLLPLALLLHAARPDIQMTQSPSSLSASVGDRVTITCRASQDISNYLNWYQQKPGKAPKLLIYYTSRLHSGVPSRFSGSGSGTDFTLTISSLQPEDFATYYCQQGNTLPWTFGQGTKVEIKRGGGGSGGGGSGGGGSEVQLVESGGGLVQPGGSLRLSCAASGFTFSDYFMSWVRQAPGKGLEWVATISNGGTYTYYPDSVKGRFTISRDNSKNTLYLQMNSLRAEDTAVYYCARFDGYIFDYWGQGTLVTVSSTRQSIKGNHLVKVYDYQEDGSVLLTCDAEAKNITWFKDGKMIGFLTEDKKKWNLGSNAKDPRGMYQCKGSQNKSKPLQVYYRMCQNCIELNAATISGFLFAEIVSIFVLAVGVYFIAGQDGVRQSRASDKQTLLPNDQLYQPLKDREDDQYSHLQGNQLRRN

SEQ ID NO: 21376 - protein, 406 aa, Artificial Sequence
  Synthetic Polypeptide
MALPVTALLLPLALLLHAARPDIQMTQSPSSLSASVGDRVTITCRASQDISNYLNWYQQKPGKAPKLLIYYTSRLHSGVPSRFSGSGSGTDFTLTISSLQPEDFATYYCQQGNTLPWTFGQGTKVEIKRGGGGSGGGGSGGGGSEVQLVESGGGLVQPGGSLRLSCAASGFTFSDYFMSWVRQAPGKGLEWVATISNGGTYTYYPDSVKGRFTISRDNSKNTLYLQMNSLRAEDTAVYYCARFDGYIFDYWGQGTLVTVSSTRQSFGLLDPKLCYLLDGILFIYGVILTALFLRVKFSRSADAPAYQQGQNQLYNELNLGRREEYDVLDKRRGRDPEMGGKPQRRKNPQEGLYNELQKDKMAEAYSEIGMKGERRRGKGHDGLYQGLSTATKDTYDALHMQALPPR

SEQ ID NO: 21377 - protein, 448 aa, Artificial Sequence
  Synthetic Polypeptide
MALPVTALLLPLALLLHAARPEVQLVESGGGLVQPGGSLRLSCAASGFTFSDYFMSWVRQAPGKGLEWVATISNGGTYTYYPDSVKGRFTISRDNSKNTLYLQMNSLRAEDTAVYYCARFDGYIFDYWGQGTLVTVSSGGGGSGGGGSGGGGSDIQMTQSPSSLSASVGDRVTITCRASQDISNYLNWYQQKPGKAPKLLIYYTSRLHSGVPSRFSGSGSGTDFTLTISSLQPEDFATYYCQQGNTLPWTFGQGTKVEIKRTRDGNEEMGGITQTPYKVSISGTTVILTCPQYPGSEILWQHNDKNIGGDEDDKNIGSDEDHLSLKEFSELEQSGYYVCYPRGSKPEDANFYLYLRARVCENCMEMDVMSVATIVIVDICITGGLLLLVYYWSKNRKAKAKPVTRGAGAGGRQRGQNKERPPPVPNPDYEPIRKGQRDLYSGLNQRRI

SEQ ID NO: 21378 - protein, 413 aa, Artificial Sequence
  Synthetic Polypeptide
MALPVTALLLPLALLLHAARPEVQLVESGGGLVQPGGSLRLSCAASGFTFSDYFMSWVRQAPGKGLEWVATISNGGTYTYYPDSVKGRFTISRDNSKNTLYLQMNSLRAEDTAVYYCARFDGYIFDYWGQGTLVTVSSGGGGSGGGGSGGGGSDIQMTQSPSSLSASVGDRVTITCRASQDISNYLNWYQQKPGKAPKLLIYYTSRLHSGVPSRFSGSGSGTDFTLTISSLQPEDFATYYCQQGNTLPWTFGQGTKVEIKRTRFKIPIEELEDRVFVNCNTSITWVEGTVGTLLSDITRLDLGKRILDPRGIYRCNGTDIYKDKESTVQVHYRMCQSCVELDPATVAGIIVTDVIATLLLALGVFCFAGHETGRLSGAADTQALLRNDQVYQPLRDRDDAQYSHLGGNWARNK

SEQ ID NO: 21379 - protein, 423 aa, Artificial Sequence
  Synthetic Polypeptide
MALPVTALLLPLALLLHAARPEVQLVESGGGLVQPGGSLRLSCAASGFTFSDYFMSWVRQAPGKGLEWVATISNGGTYTYYPDSVKGRFTISRDNSKNTLYLQMNSLRAEDTAVYYCARFDGYIFDYWGQGTLVTVSSGGGGSGGGGSGGGGSDIQMTQSPSSLSASVGDRVTITCRASQDISNYLNWYQQKPGKAPKLLIYYTSRLHSGVPSRFSGSGSGTDFTLTISSLQPEDFATYYCQQGNTLPWTFGQGTKVEIKRTRQSIKGNHLVKVYDYQEDGSVLLTCDAEAKNITWFKDGKMIGFLTEDKKKWNLGSNAKDPRGMYQCKGSQNKSKPLQVYYRMCQNCIELNAATISGFLFAEIVSIFVLAVGVYFIAGQDGVRQSRASDKQTLLPNDQLYQPLKDREDDQYSHLQGNQLRRN

SEQ ID NO: 21380 - protein, 406 aa, Artificial Sequence
  Synthetic Polypeptide
MALPVTALLLPLALLLHAARPEVQLVESGGGLVQPGGSLRLSCAASGFTFSDYFMSWVRQAPGKGLEWVATISNGGTYTYYPDSVKGRFTISRDNSKNTLYLQMNSLRAEDTAVYYCARFDGYIFDYWGQGTLVTVSSGGGGSGGGGSGGGGSDIQMTQSPSSLSASVGDRVTITCRASQDISNYLNWYQQKPGKAPKLLIYYTSRLHSGVPSRFSGSGSGTDFTLTISSLQPEDFATYYCQQGNTLPWTFGQGTKVEIKRTRQSFGLLDPKLCYLLDGILFIYGVILTALFLRVKFSRSADAPAYQQGQNQLYNELNLGRREEYDVLDKRRGRDPEMGGKPQRRKNPQEGLYNELQKDKMAEAYSEIGMKGERRRGKGHDGLYQGLSTATKDTYDALHMQALPPR

SEQ ID NO: 21381 - protein, 639 aa, Artificial Sequence
  Synthetic Polypeptide
MALPVTALLLPLALLLHAARPDIQMTQSPSSLSASVGDRVTITCRASQDISNYLNWYQQKPGKAPKLLIYYTSRLHSGVPSRFSGSGSGTDFTLTISSLQPEDFATYYCQQGNTLPWTFGQGTKVEIKRGGGGSGGGGSGGGGSEVQLVESGGGLVQPGGSLRLSCAASGFTFSDYFMSWVRQAPGKGLEWVATISNGGTYTYYPDSVKGRFTISRDNSKNTLYLQMNSLRAEDTAVYYCARFDGYIFDYWGQGTLVTVSSTRGSGIQNPDPAVYQLRDSKSSDKSVCLFTDFDSQTNVSQSKDSDVYITDKTVLDMRSMDFKSNSAVAWSNKSDFACANAFNNSIIPEDTFFPSPESSCDVKLVEKSFETDTNLNFQNLSVIGFRILLLKVAGFNLLMTLRLWSSRAKRSGSGVKQTLNFDLLKLAGDVESNPGPSRGHMTEYKPTVRLATRDDVPRAVRTLAAAFADYPATRHTVDPDRHIERVTELQELFLTRVGLDIGKVWVADDGAAVAVWTTPESVEAGAVFAEIGPRMAELSGSRLAAQQQMEGLLAPHRPKEPAWFLATVGVSPDHQGKGLGSAVVLPGVEAAERAGVPAFLETSAPRNLPFYERLGFTVTADVEVPEGPRTWCMTRKPGA

SEQ ID NO: 21382 - protein, 671 aa, Artificial Sequence
  Synthetic Polypeptide
MALPVTALLLPLALLLHAARPDIQMTQSPSSLSASVGDRVTITCRASQDISNYLNWYQQKPGKAPKLLIYYTSRLHSGVPSRFSGSGSGTDFTLTISSLQPEDFATYYCQQGNTLPWTFGQGTKVEIKRGGGGSGGGGSGGGGSEVQLVESGGGLVQPGGSLRLSCAASGFTFSDYFMSWVRQAPGKGLEWVATISNGGTYTYYPDSVKGRFTISRDNSKNTLYLQMNSLRAEDTAVYYCARFDGYIFDYWGQGTLVTVSSLEDLKNVFPPEVAVFEPSEAEISHTQKATLVCLATGFYPDHVELSWWVNGKEVHSGVSTDPQPLKEQPALNDSRYCLSSRLRVSATFWQNPRNHFRCQVQFYGLSENDEWTQDRAKPVTQIVSAEAWGRADCGFTSESYQQGVLSATILYEILLGKATLYAVLVSALVLMAMVKRKDSRGRAKRSGSGATNFSLLKQAGDVEENPGPTRGHMTEYKPTVRLATRDDVPRAVRTLAAAFADYPATRHTVDPDRHIERVTELQELFLTRVGLDIGKVWVADDGAAVAVWTTPESVEAGAVFAEIGPRMAELSGSRLAAQQQMEGLLAPHRPKEPAWFLATVGVSPDHQGKGLGSAVVLPGVEAAERAGVPAFLETSAPRNLPFYERLGFTVTADVEVPEGPRTWCMTRKPGA

SEQ ID NO: 21383 - protein, 721 aa, Artificial Sequence
  Synthetic Polypeptide
MALPVTALLLPLALLLHAARPDIQMTQSPSSLSASVGDRVTITCRASQDISNYLNWYQQKPGKAPKLLIYYTSRLHSGVPSRFSGSGSGTDFTLTISSLQPEDFATYYCQQGNTLPWTFGQGTKVEIKRGGGGSGGGGSGGGGSEVQLVESGGGLVQPGGSLRLSCAASGFTFSDYFMSWVRQAPGKGLEWVATISNGGTYTYYPDSVKGRFTISRDNSKNTLYLQMNSLRAEDTAVYYCARFDGYIFDYWGQGTLVTVSSTREQKLISEEDLGSGTPFPSLAPPIMLLVDGKQQMVVVCLVLDVAPPGLDSPIWFSAGNGSALDAFTYGPSPATDGTWTNLAHLSLPSEELASWEPLVCHTGPGAEGHSRSTQPMHLSGEASTARTCPQEPLRGTPGGALWLGVLRLLLFKLLLFDLLLTCSCLCDPAGPLPSPATTTRLRALGSHRLHPATETGGREATSSPRPQPRDRRWGDTPPGRKPGSPVRAKRSGSGVKQTLNFDLLKLAGDVESNPGPSRSRGHMTEYKPTVRLATRDDVPRAVRTLAAAFADYPATRHTVDPDRHIERVTELQELFLTRVGLDIGKVWVADDGAAVAVWTTPESVEAGAVFAEIGPRMAELSGSRLAAQQQMEGLLAPHRPKEPAWFLATVGVSPDHQGKGLGSAVVLPGVEAAERAGVPAFLETSAPRNLPFYERLGFTVTADVEVPEGPRTWCMTRKPGA

SEQ ID NO: 21384 - protein, 539 aa, Artificial Sequence
  Synthetic Polypeptide
MALPVTALLLPLALLLHAARPDIQMTQSPSSLSASVGDRVTITCRASQDISNYLNWYQQKPGKAPKLLIYYTSRLHSGVPSRFSGSGSGTDFTLTISSLQPEDFATYYCQQGNTLPWTFGQGTKVEIKRLEDLKNVFPPEVAVFEPSEAEISHTQKATLVCLATGFYPDHVELSWWVNGKEVHSGVSTDPQPLKEQPALNDSRYCLSSRLRVSATFWQNPRNHFRCQVQFYGLSENDEWTQDRAKPVTQIVSAEAWGRADCGFTSESYQQGVLSATILYEILLGKATLYAVLVSALVLMAMVKRKDSRGRAKRSGSGATNFSLLKQAGDVEENPGPTRGHMTEYKPTVRLATRDDVPRAVRTLAAAFADYPATRHTVDPDRHIERVTELQELFLTRVGLDIGKVWVADDGAAVAVWTTPESVEAGAVFAEIGPRMAELSGSRLAAQQQMEGLLAPHRPKEPAWFLATVGVSPDHQGKGLGSAVVLPGVEAAERAGVPAFLETSAPRNLPFYERLGFTVTADVEVPEGPRTWCMTRKPGA

SEQ ID NO: 21385 - protein, 309 aa, Artificial Sequence
  Synthetic Polypeptide
MALPVTALLLPLALLLHAARPDIQMTQSPSSLSASVGDRVTITCRASQDISNYLNWYQQKPGKAPKLLIYYTSRLHSGVPSRFSGSGSGTDFTLTISSLQPEDFATYYCQQGNTLPWTFGQGTKVEIKRLEDLKNVFPPEVAVFEPSEAEISHTQKATLVCLATGFYPDHVELSWWVNGKEVHSGVSTDPQPLKEQPALNDSRYCLSSRLRVSATFWQNPRNHFRCQVQFYGLSENDEWTQDRAKPVTQIVSAEAWGRADCGFTSESYQQGVLSATILYEILLGKATLYAVLVSALVLMAMVKRKDSRG

SEQ ID NO: 21386 - protein, 446 aa, Artificial Sequence; identical to SEQ ID NO: 21317
  Synthetic Polypeptide

SEQ ID NO: 21387 - protein, 280 aa, Artificial Sequence; identical to SEQ ID NO: 21318
  Synthetic Polypeptide

SEQ ID NO: 21388 - protein, 557 aa, Artificial Sequence
  Synthetic Polypeptide
MALPVTALLLPLALLLHAARPDIQMTQSPSSLSASVGDRVTITCRASQDISNYLNWYQQKPGKAPKLLIYYTSRLHSGVPSRFSGSGSGTDFTLTISSLQPEDFATYYCQQGNTLPWTFGQGTKVEIKRLEGKPIPNPLLGLDSTGSGEDLKNVFPPEVAVFEPSEAEISHTQKATLVCLATGFYPDHVELSWWVNGKEVHSGVCTDPQPLKEQPALNDSRYCLSSRLRVSATFWQNPRNHFRCQVQFYGLSENDEWTQDRAKPVTQIVSAEAWGRADCGFTSESYQQGVLSATILYEILLGKATLYAVLVSALVLMAMVKRKDSRGRAKRSGSGATNFSLLKQAGDVEENPGPTRGHMTEYKPTVRLATRDDVPRAVRTLAAAFADYPATRHTVDPDRHIERVTELQELFLTRVGLDIGKVWVADDGAAVAVWTTPESVEAGAVFAEIGPRMAELSGSRLAAQQQMEGLLAPHRPKEPAWFLATVGVSPDHQGKGLGSAVVLPGVEAAERAGVPAFLETSAPRNLPFYERLGFTVTADVEVPEGPRTWCMTRKPGA

SEQ ID NO: 21389 - protein, 327 aa, Artificial Sequence
  Synthetic Polypeptide
MALPVTALLLPLALLLHAARPDIQMTQSPSSLSASVGDRVTITCRASQDISNYLNWYQQKPGKAPKLLIYYTSRLHSGVPSRFSGSGSGTDFTLTISSLQPEDFATYYCQQGNTLPWTFGQGTKVEIKRLEGKPIPNPLLGLDSTGSGEDLKNVFPPEVAVFEPSEAEISHTQKATLVCLATGFYPDHVELSWWVNGKEVHSGVCTDPQPLKEQPALNDSRYCLSSRLRVSATFWQNPRNHFRCQVQFYGLSENDEWTQDRAKPVTQIVSAEAWGRADCGFTSESYQQGVLSATILYEILLGKATLYAVLVSALVLMAMVKRKDSRG

SEQ ID NO: 21390 - protein, 458 aa, Artificial Sequence; identical to SEQ ID NO: 21321
  Synthetic Polypeptide

SEQ ID NO: 21391 - protein, 292 aa, Artificial Sequence; identical to SEQ ID NO: 21322
  Synthetic Polypeptide

SEQ ID NO: 21392 - protein, 639 aa, Artificial Sequence
  Synthetic Polypeptide
MALPVTALLLPLALLLHAARPDIQMTQSPSSLSASVGDRVTITCRASQDISNYLNWYQQKPGKAPKLLIYYTSRLHSGVPSRFSGSGSGTDFTLTISSLQPEDFATYYCQQGNTLPWTFGQGTKVEIKRGGGGSGGGGSGGGGSEVQLVESGGGLVQPGGSLRLSCAASGFTFSDYFMSWVRQAPGKGLEWVATISNGGTYTYYPDSVKGRFTISRDNSKNTLYLQMNSLRAEDTAVYYCARFDGYIFDYWGQGTLVTVSSTRGSGIQNPDPAVYQLRDSKSSDKSVCLFTDFDSQTNVSQSKDSDVYITDKTVLDMRSMDFKSNSAVAWSNKSDFACANAFNNSIIPEDTFFPSSDVPCDVKLVEKSFETDTNLNFQNLSVIGFRILLLKVAGFNLLMTLRLWSSRAKRSGSGVKQTLNFDLLKLAGDVESNPGPSRGHMTEYKPTVRLATRDDVPRAVRTLAAAFADYPATRHTVDPDRHIERVTELQELFLTRVGLDIGKVWVADDGAAVAVWTTPESVEAGAVFAEIGPRMAELSGSRLAAQQQMEGLLAPHRPKEPAWFLATVGVSPDHQGKGLGSAVVLPGVEAAERAGVPAFLETSAPRNLPFYERLGFTVTADVEVPEGPRTWCMTRKPGA

SEQ ID NO: 21393 - protein, 671 aa, Artificial Sequence
  Synthetic Polypeptide
MALPVTALLLPLALLLHAARPDIQMTQSPSSLSASVGDRVTITCRASQDISNYLNWYQQKPGKAPKLLIYYTSRLHSGVPSRFSGSGSGTDFTLTISSLQPEDFATYYCQQGNTLPWTFGQGTKVEIKRGGGGSGGGGSGGGGSEVQLVESGGGLVQPGGSLRLSCAASGFTFSDYFMSWVRQAPGKGLEWVATISNGGTYTYYPDSVKGRFTISRDNSKNTLYLQMNSLRAEDTAVYYCARFDGYIFDYWGQGTLVTVSSLEDLKNVFPPEVAVFEPSKAEIAHTQKATLVCLATGFYPDHVELSWWVNGKEVHSGVSTDPQPLKEQPALNDSRYCLSSRLRVSATFWQNPRNHFRCQVQFYGLSENDEWTQDRAKPVTQIVSAEAWGRADCGITSASYHQGVLSATILYEILLGKATLYAVLVSALVLMAMVKRKDSRGRAKRSGSGATNFSLLKQAGDVEENPGPTRGHMTEYKPTVRLATRDDVPRAVRTLAAAFADYPATRHTVDPDRHIERVTELQELFLTRVGLDIGKVWVADDGAAVAVWTTPESVEAGAVFAEIGPRMAELSGSRLAAQQQMEGLLAPHRPKEPAWFLATVGVSPDHQGKGLGSAVVLPGVEAAERAGVPAFLETSAPRNLPFYERLGFTVTADVEVPEGPRTWCMTRKPGA

SEQ ID NO: 21394 - protein, 694 aa, Artificial Sequence
  Synthetic Polypeptide
MALPVTALLLPLALLLHAARPDIQMTQSPSSLSASVGDRVTITCRASQDISNYLNWYQQKPGKAPKLLIYYTSRLHSGVPSRFSGSGSGTDFTLTISSLQPEDFATYYCQQGNTLPWTFGQGTKVEIKRGGGGSGGGGSGGGGSEVQLVESGGGLVQPGGSLRLSCAASGFTFSDYFMSWVRQAPGKGLEWVATISNGGTYTYYPDSVKGRFTISRDNSKNTLYLQMNSLRAEDTAVYYCARFDGYIFDYWGQGTLVTVSSTRGSGGGGSGGGGSGDGNEEMGGITQTPYKVSISGTTVILTCPQYPGSEILWQHNDKNIGGDEDDKNIGSDEDHLSLKEFSELEQSGYYVCYPRGSKPEDANFYLYLRARVCENCMEMDVMSVATIVIVDICITGGLLLLVYYWSKNRKAKAKPVTRGAGAGGRQRGQNKERPPPVPNPDYEPIRKGQRDLYSGLNQRRIRAKRSGSGVKQTLNFDLLKLAGDVESNPGPSRGHMTEYKPTVRLATRDDVPRAVRTLAAAFADYPATRHTVDPDRHIERVTELQELFLTRVGLDIGKVWVADDGAAVAVWTTPESVEAGAVFAEIGPRMAELSGSRLAAQQQMEGLLAPHRPKEPAWFLATVGVSPDHQGKGLGSAVVLPGVEAAERAGVPAFLETSAPRNLPFYERLGFTVTADVEVPEGPRTWCMTRKPGA

SEQ ID NO: 21395 - protein, 659 aa, Artificial Sequence
  Synthetic Polypeptide
MALPVTALLLPLALLLHAARPDIQMTQSPSSLSASVGDRVTITCRASQDISNYLNWYQQKPGKAPKLLIYYTSRLHSGVPSRFSGSGSGTDFTLTISSLQPEDFATYYCQQGNTLPWTFGQGTKVEIKRGGGGSGGGGSGGGGSEVQLVESGGGLVQPGGSLRLSCAASGFTFSDYFMSWVRQAPGKGLEWVATISNGGTYTYYPDSVKGRFTISRDNSKNTLYLQMNSLRAEDTAVYYCARFDGYIFDYWGQGTLVTVSSTRGSGGGGSGGGGSGFKIPIEELEDRVFVNCNTSITWVEGTVGTLLSDITRLDLGKRILDPRGIYRCNGTDIYKDKESTVQVHYRMCQSCVELDPATVAGIIVTDVIATLLLALGVFCFAGHETGRLSGAADTQALLRNDQVYQPLRDRDDAQYSHLGGNWARNKRAKRSGSGVKQTLNFDLLKLAGDVESNPGPSRGHMTEYKPTVRLATRDDVPRAVRTLAAAFADYPATRHTVDPDRHIERVTELQELFLTRVGLDIGKVWVADDGAAVAVWTTPESVEAGAVFAEIGPRMAELSGSRLAAQQQMEGLLAPHRPKEPAWFLATVGVSPDHQGKGLGSAVVLPGVEAAERAGVPAFLETSAPRNLPFYERLGFTVTADVEVPEGPRTWCMTRKPGA

SEQ ID NO: 21396 - protein, 669 aa, Artificial Sequence
  Synthetic Polypeptide
MALPVTALLLPLALLLHAARPDIQMTQSPSSLSASVGDRVTITCRASQDISNYLNWYQQKPGKAPKLLIYYTSRLHSGVPSRFSGSGSGTDFTLTISSLQPEDFATYYCQQGNTLPWTFGQGTKVEIKRGGGGSGGGGSGGGGSEVQLVESGGGLVQPGGSLRLSCAASGFTFSDYFMSWVRQAPGKGLEWVATISNGGTYTYYPDSVKGRFTISRDNSKNTLYLQMNSLRAEDTAVYYCARFDGYIFDYWGQGTLVTVSSTRGSGGGGSGGGGSGQSIKGNHLVKVYDYQEDGSVLLTCDAEAKNITWFKDGKMIGFLTEDKKKWNLGSNAKDPRGMYQCKGSQNKSKPLQVYYRMCQNCIELNAATISGFLFAEIVSIFVLAVGVYFIAGQDGVRQSRASDKQTLLPNDQLYQPLKDREDDQYSHLQGNQLRRNRAKRSGSGVKQTLNFDLLKLAGDVESNPGPSRGHMTEYKPTVRLATRDDVPRAVRTLAAAFADYPATRHTVDPDRHIERVTELQELFLTRVGLDIGKVWVADDGAAVAVWTTPESVEAGAVFAEIGPRMAELSGSRLAAQQQMEGLLAPHRPKEPAWFLATVGVSPDHQGKGLGSAVVLPGVEAAERAGVPAFLETSAPRNLPFYERLGFTVTADVEVPEGPRTWCMTRKPGA

SEQ ID NO: 21397 - protein, 652 aa, Artificial Sequence
  Synthetic Polypeptide
MALPVTALLLPLALLLHAARPDIQMTQSPSSLSASVGDRVTITCRASQDISNYLNWYQQKPGKAPKLLIYYTSRLHSGVPSRFSGSGSGTDFTLTISSLQPEDFATYYCQQGNTLPWTFGQGTKVEIKRGGGGSGGGGSGGGGSEVQLVESGGGLVQPGGSLRLSCAASGFTFSDYFMSWVRQAPGKGLEWVATISNGGTYTYYPDSVKGRFTISRDNSKNTLYLQMNSLRAEDTAVYYCARFDGYIFDYWGQGTLVTVSSTRGSGGGGSGGGGSGQSFGLLDPKLCYLLDGILFIYGVILTALFLRVKFSRSADAPAYQQGQNQLYNELNLGRREEYDVLDKRRGRDPEMGGKPQRRKNPQEGLYNELQKDKMAEAYSEIGMKGERRRGKGHDGLYQGLSTATKDTYDALHMQALPPRRAKRSGSGVKQTLNFDLLKLAGDVESNPGPSRGHMTEYKPTVRLATRDDVPRAVRTLAAAFADYPATRHTVDPDRHIERVTELQELFLTRVGLDIGKVWVADDGAAVAVWTTPESVEAGAVFAEIGPRMAELSGSRLAAQQQMEGLLAPHRPKEPAWFLATVGVSPDHQGKGLGSAVVLPGVEAAERAGVPAFLETSAPRNLPFYERLGFTVTADVEVPEGPRTWCMTRKPGA

SEQ ID NO: 21398 - protein, 753 aa, Artificial Sequence
  Synthetic Polypeptide
MALPVTALLLPLALLLHAARPEVQLVESGGGLVQPGGSLRLSCAASGFSFSDFWMSWVRQAPGKGLEWVATISQAGSEKDYVDSVKGRFTISRDNAKKSLYLQMNSLRAEDTAVYYCASGVYSFDYRGQGTLVTVSSGTGGGGSGGGGSGGGGSEFDIQMTQSPSSLSASVGDRVTITCRASQDISNYLNWYQQKPGKAPKLLIYYTSRLHSGVPSRFSGSGSGTDFTLTISSLQPEDFATYYCQQGNTLPWTFGQGTKVEIKRLEDLKNVFPPEVAVFEPSEAEISHTQKATLVCLATGFYPDHVELSWWVNGKEVHSGVCTDPQPLKEQPALNDSRYCLSSRLRVSATFWQNPRNHFRCQVQFYGLSENDEWTQDRAKPVTQIVSAEAWGRADCGFTSESYQQGVLSATILYEILLGKATLYAVLVSALVLMAMVKRKDSRGRAKRSGSGATNFSLLKQAGDVEENPGPTSMDWIWRILFLVGAATGAHSFEEVQLVESGGGLVQPGGSLRLSCAASGFTFSDYFMSWVRQAPGKGLEWVATISNGGTYTYYPDSVKGRFTISRDNSKNTLYLQMNSLRAEDTAVYYCARFDGYIFDYWGQGTLVTVSSTRIQNPDPAVYQLRDSKSSDKSVCLFTDFDSQTNVSQSKDSDVYITDKCVLDMRSMDFKSNSAVAWSNKSDFACANAFNNSIIPEDTFFPSPESSCDVKLVEKSFETDTNLNFQNLSVIGFRILLLKVAGFNLLMTLRLWSS

SEQ ID NO: 21399 - protein, 757 aa, Artificial Sequence
  Synthetic Polypeptide
MALPVTALLLPLALLLHAARPEVQLVESGGGLVQPGGSLRLSCAASGFSFSDFWMSWVRQAPGKGLEWVATISQAGSEKDYVDSVKGRFTISRDNAKKSLYLQMNSLRAEDTAVYYCASGVYSFDYRGQGTLVTVSSGTGGGGSGGGGSGGGGSEFDIQMTQSPSSLSASVGDRVTITCRASQDISNYLNWYQQKPGKAPKLLIYYTSRLHSGVPSRFSGSGSGTDFTLTISSLQPEDFATYYCQQGNTLPWTFGQGTKVEIKRLEIQNPDPAVYQLRDSKSSDKSVCLFTDFDSQTNVSQSKDSDVYITDKCVLDMRSMDFKSNSAVAWSNKSDFACANAFNNSIIPEDTFFPSPESSCDVKLVEKSFETDTNLNFQNLSVIGFRILLLKVAGFNLLMTLRLWSSRAKRSGSGVKQTLNFDLLKLAGDVESNPGPTSMDWIWRILFLVGAATGAHSFEEVQLVESGGGLVQPGGSLRLSCAASGFTFSDYFMSWVRQAPGKGLEWVATISNGGTYTYYPDSVKGRFTISRDNSKNTLYLQMNSLRAEDTAVYYCARFDGYIFDYWGQGTLVTVSSTREDLKNVFPPEVAVFEPSEAEISHTQKATLVCLATGFYPDHVELSWWVNGKEVHSGVCTDPQPLKEQPALNDSRYCLSSRLRVSATFWQNPRNHFRCQVQFYGLSENDEWTQDRAKPVTQIVSAEAWGRADCGFTSESYQQGVLSATILYEILLGKATLYAVLVSALVLMAMVKRKDSRG

SEQ ID NO: 21400 - protein, 949 aa, Artificial Sequence
  Synthetic Polypeptide
MALPVTALLLPLALLLHAARPEVQLVESGGGLVQPGGSLRLSCAASGFSFSDFWMSWVRQAPGKGLEWVATISQAGSEKDYVDSVKGRFTISRDNAKKSLYLQMNSLRAEDTAVYYCASGVYSFDYRGQGTLVTVSSGTGGGGSGGGGSGGGGSEFDIQMTQSPSSLSASVGDRVTITCRASQDISNYLNWYQQKPGKAPKLLIYYTSRLHSGVPSRFSGSGSGTDFTLTISSLQPEDFATYYCQQGNTLPWTFGQGTKVEIKRLEDLKNVFPPEVAVFEPSEAEISHTQKATLVCLATGFYPDHVELSWWVNGKEVHSGVSTDPQPLKEQPALNDSRYCLSSRLRVSATFWQNPRNHFRCQVQFYGLSENDEWTQDRAKPVTQIVSAEAWGRADCGSQSFGLLDPKLCYLLDGILFIYGVILTALFLRVKFSRSADAPAYQQGQNQLYNELNLGRREEYDVLDKRRGRDPEMGGKPQRRKNPQEGLYNELQKDKMAEAYSEIGMKGERRRGKGHDGLYQGLSTATKDTYDALHMQALPPRRAKRSGSGATNFSLLKQAGDVEENPGPTSMDWIWRILFLVGAATGAHSFEEVQLVESGGGLVQPGGSLRLSCAASGFTFSDYFMSWVRQAPGKGLEWVATISNGGTYTYYPDSVKGRFTISRDNSKNTLYLQMNSLRAEDTAVYYCARFDGYIFDYWGQGTLVTVSSTRIQNPDPAVYQLRDSKSSDKSVCLFTDFDSQTNVSQSKDSDVYITDKTVLDMRSMDFKSNSAVAWSNKSDFACANAFNNSIIPEDTFFPSPESSCGTQSFGLLDPKLCYLLDGILFIYGVILTALFLRVKFSRSADAPAYQQGQNQLYNELNLGRREEYDVLDKRRGRDPEMGGKPQRRKNPQEGLYNELQKDKMAEAYSEIGMKGERRRGKGHDGLYQGLSTATKDTYDALHMQALPPR

SEQ ID NO: 21401 - protein, 779 aa, Artificial Sequence
  Synthetic Polypeptide
MALPVTALLLPLALLLHAARPEVQLVESGGGLVQPGGSLRLSCAASGFSFSDFWMSWVRQAPGKGLEWVATISQAGSEKDYVDSVKGRFTISRDNAKKSLYLQMNSLRAEDTAVYYCASGVYSFDYRGQGTLVTVSSGTGGGGSGGGGSGGGGSEFDIQMTQSPSSLSASVGDRVTITCRASQDISNYLNWYQQKPGKAPKLLIYYTSRLHSGVPSRFSGSGSGTDFTLTISSLQPEDFATYYCQQGNTLPWTFGQGTKVEIKRLEGQPKANPTVTLFPPSSEELQANKATLVCLISDFYPGAVTVAWKADGSPVKAGVETTKPSKQSNNKYAASSYLSLTPEQWKSHRSYSCQVTHEGSTVEKTVAPTECSPIKTDVITMDPKDNCSKDANDTLLLQLTNTSAYYMYLLLLLKSVVYFAIITCCLLRRTAFCCNGEKSRAKRSGSGATNFSLLKQAGDVEENPGPTSMDWIWRILFLVGAATGAHSFEEVQLVESGGGLVQPGGSLRLSCAASGFTFSDYFMSWVRQAPGKGLEWVATISNGGTYTYYPDSVKGRFTISRDNSKNTLYLQMNSLRAEDTAVYYCARFDGYIFDYWGQGTLVTVSSTRASTKGPSVFPLAPSSKSTSGGTAALGCLVKDYFPEPVTVSWNSGALTSGVHTFPAVLQSSGLYSLSSVVTVPSSSLGTQTYICNVNHKPSNTKVDKRVEPKSCEVKTDSTDHVKPKETENTKQPSKSCHKPKAIVHTEKVNMMSLTVLGLRMLFAKTVAVNFLLTAKLFFL

SEQ ID NO: 21402 - protein, 760 aa, Artificial Sequence
  Synthetic Polypeptide
MALPVTALLLPLALLLHAARPEVQLVESGGGLVQPGGSLRLSCAASGFSFSDFWMSWVRQAPGKGLEWVATISQAGSEKDYVDSVKGRFTISRDNAKKSLYLQMNSLRAEDTAVYYCASGVYSFDYRGQGTLVTVSSGTGGGGSGGGGSGGGGSEFDIQMTQSPSSLSASVGDRVTITCRASQDISNYLNWYQQKPGKAPKLLIYYTSRLHSGVPSRFSGSGSGTDFTLTISSLQPEDFATYYCQQGNTLPWTFGQGTKVEIKRLEGQPKANPTVTLFPPSSEELQANKATLVCLISDFYPGAVTVAWKADGSPVKAGVETTKPSKQSNNKYAASSYLSLTPEQWKSHRSYSCQVTHEGSTVEKTVAPTECSGRADCGFTSESYQQGVLSATILYEILLGKATLYAVLVSALVLMAMVKRKDSRGRAKRSGSGVKQTLNFDLLKLAGDVESNPGPTSMDWIWRILFLVGAATGAHSFEEVQLVESGGGLVQPGGSLRLSCAASGFTFSDYFMSWVRQAPGKGLEWVATISNGGTYTYYPDSVKGRFTISRDNSKNTLYLQMNSLRAEDTAVYYCARFDGYIFDYWGQGTLVTVSSTRASTKGPSVFPLAPSSKSTSGGTAALGCLVKDYFPEPVTVSWNSGALTSGVHTFPAVLQSSGLYSLSSVVTVPSSSLGTQTYICNVNHKPSNTKVDKRVEPKSCIPEDTFFPSPESSCDVKLVEKSFETDTNLNFQNLSVIGFRILLLKVAGFNLLMTLRLWSS

SEQ ID NO: 21403 - protein, 894 aa, Artificial Sequence
  Synthetic Polypeptide
MALPVTALLLPLALLLHAARPEVQLVESGGGLVQPGGSLRLSCAASGFSFSDFWMSWVRQAPGKGLEWVATISQAGSEKDYVDSVKGRFTISRDNAKKSLYLQMNSLRAEDTAVYYCASGVYSFDYRGQGTLVTVSSGTGGGGSGGGGSGGGGSEFDIQMTQSPSSLSASVGDRVTITCRASQDISNYLNWYQQKPGKAPKLLIYYTSRLHSGVPSRFSGSGSGTDFTLTISSLQPEDFATYYCQQGNTLPWTFGQGTKVEIKRLEIQNPDPAVYQLRDSKSSDKSVCLFTDFDSQTNVSQSKDSDVYITDKCVLDMRSMDFKSNSAVAWSNKSDFACANAFNNSIIPEDTFFPSPESSCDVKLVEKSFETDTNLNFQNLSVIGFRILLLKVAGFNLLMTLRLWSSRAKRSGSGVKQTLNFDLLKLAGDVESNPGPTSMDWIWRILFLVGAATGAHSGPQLQLQESGPGLVKPSETLSLTCTVSGDSISSGDYYWGWIRQPPGKGLEWIGHIYYSGVTYYNPSLKSRVTISVDTSRNQFSLKLSSVTAADTAVYYCTREDSSNWRSRGQGTLVTVSSGSGGGGSGGGGSGGGGSFEEVQLVESGGGLVQPGGSLRLSCAASGFTFSDYFMSWVRQAPGKGLEWVATISNGGTYTYYPDSVKGRFTISRDNSKNTLYLQMNSLRAEDTAVYYCARFDGYIFDYWGQGTLVTVSSTREDLKNVFPPEVAVFEPSEAEISHTQKATLVCLATGFYPDHVELSWWVNGKEVHSGVCTDPQPLKEQPALNDSRYCLSSRLRVSATFWQNPRNHFRCQVQFYGLSENDEWTQDRAKPVTQIVSAEAWGRADCGFTSESYQQGVLSATILYEILLGKATLYAVLVSALVLMAMVKRKDSRG

SEQ ID NO: 21404 - protein, 1086 aa, Artificial Sequence
  Synthetic Polypeptide
MALPVTALLLPLALLLHAARPEVQLVESGGGLVQPGGSLRLSCAASGFSFSDFWMSWVRQAPGKGLEWVATISQAGSEKDYVDSVKGRFTISRDNAKKSLYLQMNSLRAEDTAVYYCASGVYSFDYRGQGTLVTVSSGTGGGGSGGGGSGGGGSEFDIQMTQSPSSLSASVGDRVTITCRASQDISNYLNWYQQKPGKAPKLLIYYTSRLHSGVPSRFSGSGSGTDFTLTISSLQPEDFATYYCQQGNTLPWTFGQGTKVEIKRLEDLKNVFPPEVAVFEPSEAEISHTQKATLVCLATGFYPDHVELSWWVNGKEVHSGVSTDPQPLKEQPALNDSRYCLSSRLRVSATFWQNPRNHFRCQVQFYGLSENDEWTQDRAKPVTQIVSAEAWGRADCGSQSFGLLDPKLCYLLDGILFIYGVILTALFLRVKFSRSADAPAYQQGQNQLYNELNLGRREEYDVLDKRRGRDPEMGGKPQRRKNPQEGLYNELQKDKMAEAYSEIGMKGERRRGKGHDGLYQGLSTATKDTYDALHMQALPPRRAKRSGSGATNFSLLKQAGDVEENPGPTSMDWIWRILFLVGAATGAHSGPQLQLQESGPGLVKPSETLSLTCTVSGDSISSGDYYWGWIRQPPGKGLEWIGHIYYSGVTYYNPSLKSRVTISVDTSRNQFSLKLSSVTAADTAVYYCTREDSSNWRSRGQGTLVTVSSGSGGGGSGGGGSGGGGSFEEVQLVESGGGLVQPGGSLRLSCAASGFTFSDYFMSWVRQAPGKGLEWVATISNGGTYTYYPDSVKGRFTISRDNSKNTLYLQMNSLRAEDTAVYYCARFDGYIFDYWGQGTLVTVSSTRIQNPDPAVYQLRDSKSSDKSVCLFTDFDSQTNVSQSKDSDVYITDKTVLDMRSMDFKSNSAVAWSNKSDFACANAFNNSIIPEDTFFPSPESSCGTQSFGLLDPKLCYLLDGILFIYGVILTALFLRVKFSRSADAPAYQQGQNQLYNELNLGRREEYDVLDKRRGRDPEMGGKPQRRKNPQEGLYNELQKDKMAEAYSEIGMKGERRRGKGHDGLYQGLSTATKDTYDALHMQALPPR

SEQ ID NO: 21405 - protein, 916 aa, Artificial Sequence
  Synthetic Polypeptide
MALPVTALLLPLALLLHAARPEVQLVESGGGLVQPGGSLRLSCAASGFSFSDFWMSWVRQAPGKGLEWVATISQAGSEKDYVDSVKGRFTISRDNAKKSLYLQMNSLRAEDTAVYYCASGVYSFDYRGQGTLVTVSSGTGGGGSGGGGSGGGGSEFDIQMTQSPSSLSASVGDRVTITCRASQDISNYLNWYQQKPGKAPKLLIYYTSRLHSGVPSRFSGSGSGTDFTLTISSLQPEDFATYYCQQGNTLPWTFGQGTKVEIKRLEGQPKANPTVTLFPPSSEELQANKATLVCLISDFYPGAVTVAWKADGSPVKAGVETTKPSKQSNNKYAASSYLSLTPEQWKSHRSYSCQVTHEGSTVEKTVAPTECSPIKTDVITMDPKDNCSKDANDTLLLQLTNTSAYYMYLLLLLKSVVYFAIITCCLLRRTAFCCNGEKSRAKRSGSGATNFSLLKQAGDVEENPGPTSMDWIWRILFLVGAATGAHSGPQLQLQESGPGLVKPSETLSLTCTVSGDSISSGDYYWGWIRQPPGKGLEWIGHIYYSGVTYYNPSLKSRVTISVDTSRNQFSLKLSSVTAADTAVYYCTREDSSNWRSRGQGTLVTVSSGSGGGGSGGGGSGGGGSFEEVQLVESGGGLVQPGGSLRLSCAASGFTFSDYFMSWVRQAPGKGLEWVATISNGGTYTYYPDSVKGRFTISRDNSKNTLYLQMNSLRAEDTAVYYCARFDGYIFDYWGQGTLVTVSSTRASTKGPSVFPLAPSSKSTSGGTAALGCLVKDYFPEPVTVSWNSGALTSGVHTFPAVLQSSGLYSLSSVVTVPSSSLGTQTYICNVNHKPSNTKVDKRVEPKSCEVKTDSTDHVKPKETENTKQPSKSCHKPKAIVHTEKVNMMSLTVLGLRMLFAKTVAVNFLLTAKLFFL

SEQ ID NO: 21406 - protein, 897 aa, Artificial Sequence
  Synthetic Polypeptide
MALPVTALLLPLALLLHAARPEVQLVESGGGLVQPGGSLRLSCAASGFSFSDFWMSWVRQAPGKGLEWVATISQAGSEKDYVDSVKGRFTISRDNAKKSLYLQMNSLRAEDTAVYYCASGVYSFDYRGQGTLVTVSSGTGGGGSGGGGSGGGGSEFDIQMTQSPSSLSASVGDRVTITCRASQDISNYLNWYQQKPGKAPKLLIYYTSRLHSGVPSRFSGSGSGTDFTLTISSLQPEDFATYYCQQGNTLPWTFGQGTKVEIKRLEGQPKANPTVTLFPPSSEELQANKATLVCLISDFYPGAVTVAWKADGSPVKAGVETTKPSKQSNNKYAASSYLSLTPEQWKSHRSYSCQVTHEGSTVEKTVAPTECSGRADCGFTSESYQQGVLSATILYEILLGKATLYAVLVSALVLMAMVKRKDSRGRAKRSGSGVKQTLNFDLLKLAGDVESNPGPTSMDWIWRILFLVGAATGAHSGPQLQLQESGPGLVKPSETLSLTCTVSGDSISSGDYYWGWIRQPPGKGLEWIGHIYYSGVTYYNPSLKSRVTISVDTSRNQFSLKLSSVTAADTAVYYCTREDSSNWRSRGQGTLVTVSSGSGGGGSGGGGSGGGGSFEEVQLVESGGGLVQPGGSLRLSCAASGFTFSDYFMSWVRQAPGKGLEWVATISNGGTYTYYPDSVKGRFTISRDNSKNTLYLQMNSLRAEDTAVYYCARFDGYIFDYWGQGTLVTVSSTRASTKGPSVFPLAPSSKSTSGGTAALGCLVKDYFPEPVTVSWNSGALTSGVHTFPAVLQSSGLYSLSSVVTVPSSSLGTQTYICNVNHKPSNTKVDKRVEPKSCIPEDTFFPSPESSCDVKLVEKSFETDTNLNFQNLSVIGFRILLLKVAGFNLLMTLRLWSS

SEQ ID NO: 21407 - protein, 754 aa, Artificial Sequence
  Synthetic Polypeptide
MALPVTALLLPLALLLHAARPEVQVLESGGGLVQPGGSLRLSCAASGFTFSNFAMSWVRQAPGKGLEWVSTISGSAGTTDYADSVKGRFTISRDNSKKTLYLQMNSLRVEDTAVYYCADGRGPFFDYRGQGTLVTVSSGTGGGGSGGGGSGGGGSEFDIQMTQSPSSLSASVGDRVTITCRASQDISNYLNWYQQKPGKAPKLLIYYTSRLHSGVPSRFSGSGSGTDFTLTISSLQPEDFATYYCQQGNTLPWTFGQGTKVEIKRLEDLKNVFPPEVAVFEPSEAEISHTQKATLVCLATGFYPDHVELSWWVNGKEVHSGVCTDPQPLKEQPALNDSRYCLSSRLRVSATFWQNPRNHFRCQVQFYGLSENDEWTQDRAKPVTQIVSAEAWGRADCGFTSESYQQGVLSATILYEILLGKATLYAVLVSALVLMAMVKRKDSRGRAKRSGSGATNFSLLKQAGDVEENPGPTSMDWIWRILFLVGAATGAHSFEEVQLVESGGGLVQPGGSLRLSCAASGFTFSDYFMSWVRQAPGKGLEWVATISNGGTYTYYPDSVKGRFTISRDNSKNTLYLQMNSLRAEDTAVYYCARFDGYIFDYWGQGTLVTVSSTRIQNPDPAVYQLRDSKSSDKSVCLFTDFDSQTNVSQSKDSDVYITDKCVLDMRSMDFKSNSAVAWSNKSDFACANAFNNSIIPEDTFFPSPESSCDVKLVEKSFETDTNLNFQNLSVIGFRILLLKVAGFNLLMTLRLWSS

SEQ ID NO: 21408 - protein, 755 aa, Artificial Sequence
  Synthetic Polypeptide
MALPVTALLLPLALLLHAARPDIQMTQSPSSLSASVGDRVTITCRASQDISNYLNWYQQKPGKAPKLLIYYTSRLHSGVPSRFSGSGSGTDFTLTISSLQPEDFATYYCQQGNTLPWTFGQGTKVEIKRLEDLKNVFPPEVAVFEPSEAEISHTQKATLVCLATGFYPDHVELSWWVNGKEVHSGVCTDPQPLKEQPALNDSRYCLSSRLRVSATFWQNPRNHFRCQVQFYGLSENDEWTQDRAKPVTQIVSAEAWGRADCGFTSESYQQGVLSATILYEILLGKATLYAVLVSALVLMAMVKRKDSRGRAKRSGSGATNFSLLKQAGDVEENPGPTSMDWIWRILFLVGAATGAHSGPEVQLVESGGGLVQAGGSLRLSCAASGRTFSMGWFRQAPGKEREFVAAITYSGGSPYYADSVKGRFTISRDNAKNTVYLQMNSLKPEDTAVYYCAANPTYGSDWNAENWGQGTQVTVSSGSGGGGSGGGGSGGGGSFEEVQLVESGGGLVQPGGSLRLSCAASGFTFSDYFMSWVRQAPGKGLEWVATISNGGTYTYYPDSVKGRFTISRDNSKNTLYLQMNSLRAEDTAVYYCARFDGYIFDYWGQGTLVTVSSTRIQNPDPAVYQLRDSKSSDKSVCLFTDFDSQTNVSQSKDSDVYITDKCVLDMRSMDFKSNSAVAWSNKSDFACANAFNNSIIPEDTFFPSPESSCDVKLVEKSFETDTNLNFQNLSVIGFRILLLKVAGFNLLMTLRLWSS

SEQ ID NO: 21409 - protein, 882 aa, Artificial Sequence
  Synthetic Polypeptide
MALPVTALLLPLALLLHAARPDIQMTQSPSSLSASVGDRVTITCRASQDISNYLNWYQQKPGKAPKLLIYYTSRLHSGVPSRFSGSGSGTDFTLTISSLQPEDFATYYCQQGNTLPWTFGQGTKVEIKRLEDLKNVFPPEVAVFEPSEAEISHTQKATLVCLATGFYPDHVELSWWVNGKEVHSGVCTDPQPLKEQPALNDSRYCLSSRLRVSATFWQNPRNHFRCQVQFYGLSENDEWTQDRAKPVTQIVSAEAWGRADCGFTSESYQQGVLSATILYEILLGKATLYAVLVSALVLMAMVKRKDSRGRAKRSGSGATNFSLLKQAGDVEENPGPTSMDWIWRILFLVGAATGAHSQLQLQESGPGLVKPSETLSLTCTVSGGSISSGDYYWGWIRQPPGKGLEWIGSISYSGSTYYNPSLKSRVTISVDTSRNQFSLKLSSVTAADTAVYYCTREDSSNWRSRGQGTLVTVSSSGGGGSGGGGSEVQLVESGGGLVQAGGSLRLSCAASGRTFSMGWFRQAPGKEREFVAAITYSGGSPYYADSVKGRFTISRDNAKNTVYLQMNSLKPEDTAVYYCAANPTYGSDWNAENWGQGTQVTVSSGSGGGGSGGGGSGGGGSFEEVQLVESGGGLVQPGGSLRLSCAASGFTFSDYFMSWVRQAPGKGLEWVATISNGGTYTYYPDSVKGRFTISRDNSKNTLYLQMNSLRAEDTAVYYCARFDGYIFDYWGQGTLVTVSSTRIQNPDPAVYQLRDSKSSDKSVCLFTDFDSQTNVSQSKDSDVYITDKCVLDMRSMDFKSNSAVAWSNKSDFACANAFNNSIIPEDTFFPSPESSCDVKLVEKSFETDTNLNFQNLSVIGFRILLLKVAGFNLLMTLRLWSS

SEQ ID NO: 21410 - protein, 891 aa, Artificial Sequence
  Synthetic Polypeptide
MALPVTALLLPLALLLHAARPEVQVLESGGGLVQPGGSLRLSCAASGFTFSNFAMSWVRQAPGKGLEWVSTISGSAGTTDYADSVKGRFTISRDNSKKTLYLQMNSLRVEDTAVYYCADGRGPFFDYRGQGTLVTVSSGTGGGGSGGGGSGGGGSEFDIQMTQSPSSLSASVGDRVTITCRASQDISNYLNWYQQKPGKAPKLLIYYTSRLHSGVPSRFSGSGSGTDFTLTISSLQPEDFATYYCQQGNTLPWTFGQGTKVEIKRLEDLKNVFPPEVAVFEPSEAEISHTQKATLVCLATGFYPDHVELSWWVNGKEVHSGVCTDPQPLKEQPALNDSRYCLSSRLRVSATFWQNPRNHFRCQVQFYGLSENDEWTQDRAKPVTQIVSAEAWGRADCGFTSESYQQGVLSATILYEILLGKATLYAVLVSALVLMAMVKRKDSRGRAKRSGSGATNFSLLKQAGDVEENPGPTSMDWIWRILFLVGAATGAHSGPEVQLVESGGGLVQAGGSLRLSCAASGRTFSMGWFRQAPGKEREFVAAITYSGGSPYYASSVRGRFTISRDNAKNTVYLQMNSLKPEDTAVYYCAANPTYGSDWNAENWGQGTQVTVSSGSGGGGSGGGGSGGGGSFEEVQLVESGGGLVQPGGSLRLSCAASGFTFSDYFMSWVRQAPGKGLEWVATISNGGTYTYYPDSVKGRFTISRDNSKNTLYLQMNSLRAEDTAVYYCARFDGYIFDYWGQGTLVTVSSTRIQNPDPAVYQLRDSKSSDKSVCLFTDFDSQTNVSQSKDSDVYITDKCVLDMRSMDFKSNSAVAWSNKSDFACANAFNNSIIPEDTFFPSPESSCDVKLVEKSFETDTNLNFQNLSVIGFRILLLKVAGFNLLMTLRLWSS

SEQ ID NO: 21411 - protein, 30 aa, Artificial Sequence
  Synthetic Polypeptide
EVQLVESGGGLVQPGGSLRLSCAASGFNIK

SEQ ID NO: 21412 - protein, 14 aa, Artificial Sequence
  Synthetic Polypeptide
WVRRAPGKGTELVA

SEQ ID NO: 21413 - protein, 32 aa, Artificial Sequence
  Synthetic Polypeptide
RFTISCDTSKNTAYLQMNSLRAEDTAVYYCAS

SEQ ID NO: 21414 - protein, 11 aa, Artificial Sequence
  Synthetic Polypeptide
WGQGTTVTVSS

SEQ ID NO: 21415 - protein, 30 aa, Artificial Sequence
  Synthetic Polypeptide
EVQLVESGGGLVQPGGSLRLSCAASSFNIK

SEQ ID NO: 21416 - protein, 14 aa, Artificial Sequence
  Synthetic Polypeptide
WVRRAPGKGTELVA

SEQ ID NO: 21417 - protein, 32 aa, Artificial Sequence; identical to SEQ ID NO: 21413
  Synthetic Polypeptide

SEQ ID NO: 21418 - protein, 11 aa, Artificial Sequence
  Synthetic Polypeptide
WGQGTTVTVSS

SEQ ID NO: 21419 - protein, 25 aa, Artificial Sequence
  Synthetic Polypeptide
QVQLVESGGGLVQPGGSLRLSCAAS

SEQ ID NO: 21420 - protein, 15 aa, Artificial Sequence
  Synthetic Polypeptide
WVRQAPGKGLELVSS

SEQ ID NO: 21421 - protein, 37 aa, Artificial Sequence
  Synthetic Polypeptide
YYADSVKGRFTISRDISKNTLDLQMNSLRAEDTAVYY

SEQ ID NO: 21422 - protein, 11 aa, Artificial Sequence
  Synthetic Polypeptide
RGQGTLVTVSS

SEQ ID NO: 21423 - protein, 25 aa, Artificial Sequence
  Synthetic Polypeptide
EVQLLESGGGLVQPGGSLRLSCAAS

SEQ ID NO: 21424 - protein, 17 aa, Artificial Sequence
  Synthetic Polypeptide
MSWVRQAPGKGLEWVSS

SEQ ID NO: 21425 - protein, 37 aa, Artificial Sequence
  Synthetic Polypeptide
YYADSVKGRFTISRDISKNTLYLQMNSLRAEDTAVYY

SEQ ID NO: 21426 - protein, 11 aa, Artificial Sequence
  Synthetic Polypeptide
RGQGTLVTVSS

SEQ ID NO: 21427 - protein, 25 aa, Artificial Sequence
  Synthetic Polypeptide
EVQLLESGGGLIQPGGSLRLSCAAS

SEQ ID NO: 21428 - protein, 17 aa, Artificial Sequence
  Synthetic Polypeptide
MTWVRQAPGKGLEWVSA

SEQ ID NO: 21429 - protein, 37 aa, Artificial Sequence
  Synthetic Polypeptide
HYADSVKGRFTISRDNSKNTVYLQMNSLRAEDSAVYY

SEQ ID NO: 21430 - protein, 11 aa, Artificial Sequence
  Synthetic Polypeptide
RGQGTLVTVSS

SEQ ID NO: 21431 - protein, 25 aa, Artificial Sequence
  Synthetic Polypeptide
EVQVLESGGGLVQPGGSLRLSCEAS

SEQ ID NO: 21432 - protein, 17 aa, Artificial Sequence
  Synthetic Polypeptide
MSWVRQAPGKGLEWVST

SEQ ID NO: 21433 - protein, 37 aa, Artificial Sequence
  Synthetic Polypeptide
DYADSVKGRFTISRDNSKKTLYLQMNSLRVEDTAVYY

SEQ ID NO: 21434 - protein, 11 aa, Artificial Sequence
  Synthetic Polypeptide
RGQGTLVTVSS

SEQ ID NO: 21435 - protein, 25 aa, Artificial Sequence [sequence omitted]

SEQ ID NO: 21436 - protein, 17 aa, Artificial Sequence
  Synthetic Polypeptide
MSWVRQAPGKGLEWVAT

SEQ ID NO: 21437 - protein, 37 aa, Artificial Sequence
  Synthetic Polypeptide
DYVDSVKGRFTISRDNAKKSLYLQMNSLRAEDTAVYY

SEQ ID NO: 21438 - protein, 11 aa, Artificial Sequence
  Synthetic Polypeptide
RGQGTLVTVSS

SEQ ID NO: 21439 - protein, 25 aa, Artificial Sequence
  Synthetic Polypeptide
EVQLLESGGGLVQPGGSLRLSCAAS

SEQ ID NO: 21440 - protein, 17 aa, Artificial Sequence
  Synthetic Polypeptide
LSWVRQAPGKGLEWVSS

SEQ ID NO: 21441 - protein, 37 aa, Artificial Sequence
  Synthetic Polypeptide
DYADAVKGRFTISRDNSKNTLYLQMNSLRVEDTAVYY

SEQ ID NO: 21442 - protein, 11 aa, Artificial Sequence
  Synthetic Polypeptide
WGQGTLVTVSS

SEQ ID NO: 21443 - protein, 9 aa, Artificial Sequence
  Synthetic Polypeptide
IMDQVPFSV

SEQ ID NO: 21444 - protein, 9 aa, Artificial Sequence
  Synthetic Polypeptide
YLEPGPVTV

SEQ ID NO: 21445 - protein, 9 aa, Artificial Sequence
  Synthetic Polypeptide
KTWGQYWQV

SEQ ID NO: 21446 - protein, 9 aa, Artificial Sequence
  Synthetic Polypeptide
NLTISDVSV

SEQ ID NO: 21447 - protein, 9 aa, Artificial Sequence
  Synthetic Polypeptide
LLLTVLTVV

SEQ ID NO: 21448 - protein, 9 aa, Artificial Sequence
  Synthetic Polypeptide
LLFGYPVYV

SEQ ID NO: 21449 - protein, 9 aa, Artificial Sequence
  Synthetic Polypeptide
ILAKFLHWL

SEQ ID NO: 21450 - protein, 9 aa, Artificial Sequence
  Synthetic Polypeptide
RLVDDFLLV

SEQ ID NO: 21451 - protein, 9 aa, Artificial Sequence
  Synthetic Polypeptide
SLYNTVATL

SEQ ID NO: 21452 - protein, 9 aa, Artificial Sequence
  Synthetic Polypeptide
NLVPMVATV

SEQ ID NO: 21453 - protein, 10 aa, Artificial Sequence
  Synthetic Polypeptide
EAAGIGILTV

SEQ ID NO: 21454 - protein, 9 aa, Artificial Sequence
  Synthetic Polypeptide
SVRDRLARL

SEQ ID NO: 21455 - protein, 10 aa, Artificial Sequence
  Synthetic Polypeptide
LLDFVRFMGV

SEQ ID NO: 21456 - protein, 9 aa, Artificial Sequence
  Synthetic Polypeptide
RMFPNAPYL

SEQ ID NO: 21457 - protein, 9 aa, Artificial Sequence
  Synthetic Polypeptide
VLQELNVTV

SEQ ID NO: 21458 - protein, 8 aa, Artificial Sequence
  Synthetic Polypeptide
LVWGAVGV

SEQ ID NO: 21459 - protein, 9 aa, Artificial Sequence
  Synthetic Polypeptide
YMLDLQPET

SEQ ID NO: 21460 - protein, 9 aa, Artificial Sequence
  Synthetic Polypeptide
QLSLLMWIT

SEQ ID NO: 21461 - protein, 9 aa, Artificial Sequence
  Synthetic Polypeptide
SLLMWITQC

SEQ ID NO: 21462 - protein, 11 aa, Artificial Sequence
  Synthetic Polypeptide
SLLMWITQCFL

SEQ ID NO: 21463 - protein, 10 aa, Artificial Sequence
  Synthetic Polypeptide
KLLGPHVEGL

SEQ ID NO: 21464 - protein, 9 aa, Artificial Sequence
  Synthetic Polypeptide
FLWGPRALV

SEQ ID NO: 21465 - protein, 9 aa, Artificial Sequence
  Synthetic Polypeptide
FMNKFIYEI

SEQ ID NO: 21466 - skipped

SEQ ID NO: 21467 - protein, 12 aa, Artificial Sequence
  Synthetic Polypeptide
NYHLENEVARLK

SEQ ID NO: 21468 - protein, 16 aa, Artificial Sequence
  Synthetic Polypeptide
LLPKNYHLENEVARLK

SEQ ID NO: 21469 - protein, 15 aa, Artificial Sequence
  Synthetic Polypeptide
KNYHLENEVARLKKL

SEQ ID NO: 21470 - skipped

SEQ ID NO: 21471 - protein, 269 aa, Artificial Sequence
  Synthetic Polypeptide
KNYHLENEVARLKKLGGGGSGGGGSDIQMTQSPSSLSASVGDRVTITCSASQDISNYLNWYQQKPGKAPKLLIYYTSNLHSGVPSRFSGSGSGTDFTLTISSLQPEDFATYYCQQYRKLPWTFGQGTKLEIKRGGGGSGGGGSGGGGSQVQLVQSGAEVKKPGSSVKVSCKASGGTFSNYWMHWVRQAPGQGLEWMGATYRGHSDTYYNQKFKGRVTITADKSTSTAYMELSSLRSEDTAVYYCARGAIYDGYDVLDNWGQGTLVTVSS

SEQ ID NO: 21472 - protein, 152 aa, Artificial Sequence
  Synthetic Polypeptide
KNYHLENEVARLKKLGGGGSGGGGSEVQLVESGGGVVQPGRSLRLSCAASGFSFSGYGMHWVRQAPGKGLEWVAYISYDGSNKYYADSVKGRFTISRDNSKNTLYLQMNSLRAEDTAVYYCAKDPAWGLRLGESSSYDFDIWGQGTMVTVSS

SEQ ID NO: 21473 - protein, 141 aa, Artificial Sequence
  Synthetic Polypeptide
KNYHLENEVARLKKLGGGGSGGGGSEVQLVESGGGLVQPGGSLRLSCAASGFSFSDFWMSWVRQAPGKGLEWVATISQAGSEKDYVDSVKGRFTISRDNAKKSLYLQMNSLRAEDTAVYYCASGVYSFDYRGQGTLVTVSS

SEQ ID NO: 21474 - protein, 145 aa, Artificial Sequence
  Synthetic Polypeptide
KNYHLENEVARLKKLGGGGSGGGGSEVQLQESGGGLVQPGGSLRLSCAASGRTFSSLFMGWFRQAPGKERELVAAISRYSLYTYYADSVKGRFTISADNAKNAVYLQMNSLKPEDTAVYYCASKLEYTSNDYDSWGQGTQVTVSS

SEQ ID NO: 21475 - protein, 153 aa, Artificial Sequence
  Synthetic Polypeptide
KNYHLENEVARLKKLGGGGSGGGGSEVQLVESGGGLVQPGGSLRLSCAASGFASDYYIIGWFRQAPGKEREGVSCISSRYANTNYADSVKGRFTISRDNAKNTVYLQMNSLKPEDTAVYYCAADTRRYTCPDIATMHRNFDSWGQGTLVTVSS

SEQ ID NO: 21476 - protein, 269 aa, Artificial Sequence
  Synthetic Polypeptide
KNYHLENEVARLKKLGGGGSGGGGSDIQMTQSPSSLSASVGDRVTITCKASDHINNWLAWYQQKPGQAPKLLIYGATTLETGVPSRFSGSGSGTDYTLTISSLQPEDFATYYCQQSWNTPWTFGQGTKLEIKRGGGGSGGGGSGGGGSQVQLQQPGAELVKPGASVKMSCKASGYAFSSYWINWMKQKPGQGLEWIGQIYPGDGDTNYNGKFKGRATLTADTSSSTAYMQLSSLTSEDSAVYFCARSITTVVGCAMDYWGQGTSVTVSS

SEQ ID NO: 21477 - protein, 288 aa, Artificial Sequence
  Synthetic Polypeptide
KNYHLENEVARLKKLGGGGSGGGGSDVQITQSPSYLAASPGETITINCRASKSISKDLAKNYHLENEVARLKKLGGGGSGGGGSWYQEKPGKTNKLLIYSGSTLQSGIPSRFSGSGSGTDFTLTISSLEPEDFAMYYCQQHNKYPYTFGGGTKLEIKRGGGGSGGGGSGGGGSQVQLQQPGAELVRPGASVKLSCKASGYTFTSYWMNWVKQRPDQGLEWIGRIDPYDSETHYNQKFKDKAILTVDKSSSTAYMQLSSLTSEDSAVYYCARGNWDDYWGQGTTLTVSS

SEQ ID NO: 21478 - protein, 265 aa, Artificial Sequence
  Synthetic Polypeptide
KNYHLENEVARLKKLGGGGSGGGGSDIQMTQSPSSLSASVGDRVTITCRASQDISNYLNWYQQKPGKAPKLLIYYTSRLHSGVPSRFSGSGSGTDFTLTISSLQPEDFATYYCQQGNTLPYTFGQGTKVEIKRGGGGSGGGGSGGGGSEVQLVESGGGLVQPGGSLRLSCAASGFTFSDYFMSWVRQAPGKGLEWVATISNGGTYTYYPDSVKGRFTISRDNSKNTLYLQMNSLRAEDTAVYYCARFDGYIFDYWGQGTLVTVSS

SEQ ID NO: 21479 - protein, 143 aa, Artificial Sequence
  Synthetic Polypeptide
KNYHLENEVARLKKLGGGGSGGGGSQLQLQESGPGLVKPSETLSLTCTVSGGSISSGDYYWGWIRQPPGKGLEWIGHIYYSGATYYNPSLKSRVTISVDTSRNQFSLKLSSVTAADTAVYYCTRDDSSNWRSRGQGTLVTVSS

SEQ ID NO: 21480 - protein, 265 aa, Artificial Sequence
  Synthetic Polypeptide
KNYHLENEVARLKKLGGGGSGGGGSDVVMTQSPSSLSASVGDRVTITCMASEDIYIRLAWYQQKPGNAPKLLIYAATSLETGVPSRFSGSGSGTDFTLTISSLQPEDFATYYCQQYWSSPWTFGGGTKVEIKGGGGSGGGGSGGGGSQVQLQESGPGLVKPSQTLSLTCTVSGYSITSDYTWNWIRQPPGNGLEWIGYITYSGSTSYNPSLKSRVLISVDTSKNQVSLKLSSVTAADTAVYYCARLGRRYTMDYWGQGTTVTVSS

SEQ ID NO: 21481 - protein, 264 aa, Artificial Sequence
  Synthetic Polypeptide
KNYHLENEVARLKKLGGGGSGGGGSDIQMTQSPATIENTSLSASVGDRVTITCRASQGISSWLTWYQQKPEKAPKSLIYAASSLQSGVPSRFSGSGSGTDFTLTISSLQPEDFATYYCQQYDSYPITFGQGTRLEIKGGGGSGGGGSGGGGSQVQLQQWGAGLLKPSETLSLTCAVYGGSFSAYYWSWIRQPPGKGLEWIGDINHGGGTNYNPSLKSRVTISVDTSKNQFSLKLNSVTAADTAVYYCASLTAYWGQGSLVTVSS

SEQ ID NO: 21482 - protein, 271 aa, Artificial Sequence
  Synthetic Polypeptide
KNYHLENEVARLKKLGGGGSGGGGSDIQMTQSPSSLSASVGDRVTITCRASQSISSYLNWYQQKPGKAPKLLIYAASSLQSGVPSRFSGSGSGTDFTLTISSLQPEDLATYYCQQSYSTPFTFGPGTKVDIKGGGGSGGGGSGGGGSVHEVQLVQSGAEVKKPGSSVKVSCKASGGTFSSYAISWVRQAPGQGLEWMGGIIPIFGTANYAQKFQGRVTITADKSTSTAYMELSSLRSEDTAVYYCATFALFGFREQAFDIWGQGTTVTVSS

SEQ ID NO: 21483 - protein, 275 aa, Artificial Sequence
  Synthetic Polypeptide
KNYHLENEVARLKKLGGGGSGGGGSDIVMTQSPDSLTVSLGERTTINCKSSQSVLDSSKNKNSLAWYQQKPGQPPKLLLSWASTRESGIPDRFSGSGSGTDFTLTIDSLQPEDSATYYCQQSAHFPITFGQGTRLEIKGGGGSGGGGSGGGGSQVQLVQSGAEVKKPGASVKVSCKASGYTFTNYGMNWVKQAPGQGLKWMGWINTYTGEPTYADDFKGRVTMTSDTSTSTAYLELHNLRSDDTAVYYCARWSWSDGYYVYFDYWGQGTTVTVSS

SEQ ID NO: 21484 - protein, 267 aa, Artificial Sequence
  Synthetic Polypeptide
KNYHLENEVARLKKLGGGGSGGGGSDIQMTQSPSSLSASVGDRVTITCRASQDVNTAVAWYQQKPGKAPKLLIYSASFLESGVPSRFSGSRSGTDFTLTISSLQPEDFATYYCQQHYTTPPTFGQTKVEIKRGGGGSGGGGSGGGGSEVQLVESGGGLVQPGGSLRLSCAASGFNIKDTYIHWVRQAPGKGLEWVARIYPTNGYTRYADSVKGRFTISADTSKNTAYLQMNSLRAEDTAVYYCSRWGGDGFYAMDVWGQGTLVTVSS

SEQ ID NO: 21485 - DNA, 2523 bp, Artificial Sequence
  Synthetic Polynucleotide
atggccttaccagtgaccgccttgctcctgccgctggccttgctgctccacgccgccaggccggacatccagatgacacagagccctagcagcctgtctgccagcgtgggagacagagtgaccatcacatgcaaggccagccaggatgtgggcacagccgtggattggtatcagcagaagcctggcaaggcccctaagctgctgatctactgggccagcacaagacacacaggcgtgcccagcagattttctggcagcggctctggcaccgacttcaccctgacaatatccagcctccagcctgaggacttcgccacctactactgccagcagtacaacagctaccctctgaccttcggccagggcaccaaggtggaaatcaaaagactcgaggacctgaagaacgtgttcccacctgaggtggccgtgttcgagcctagcaaggccgagatcgcccacacccagaaagccaccctcgtgtgcctggctaccggcttctaccccgaccatgtggaactgtcttggtgggtcaacggcaaagaggtgcacagcggcgtgtgtaccgacccccagccactgaaagaacagcccgccctgaacgacagccggtactgcctgagcagcagactgagagtgtccgccaccttctggcagaacccccggaaccacttcagatgccaggtgcagttctacggcctgagcgagaacgacgagtggacccaggacagagccaagcccgtgacccagatcgtgtctgccgaagcctggggcagagccgattgcggcatcaccagcgccagctaccaccagggcgtgctgagcgccaccatcctgtacgagatcctgctgggcaaggccaccctgtacgccgtgctggtgtctgccctggtgctgatggctatggtcaagcggaaggacagccggggaagggccaagcgatctggatctggagcaacaaacttctcactactcaaacaagcaggtgacgtggaggagaatcccgggcctactagtatggactggatttggcgcatccttttccttgtcggcgctgctaccggcgcgcattccttcgaagaagtgcagctggttgaatcaggtggcggcctggttcaacctggcggatctctgagactgagctgtgccgccagcggctacacctttaccgagtacacaatccactgggtccgacaggcccctggcaaaggacttgagtgggtcgccaacatcaaccccaacaatggcggcaccacctacaaccagaagttcgaggacagattcaccatcagccgggacaacagcaagaacaccctgtacctccagatgaactccctgagagccgaggacaccgccgtgtactattgtgccagaggctggaacttcgactactggggccagggaacactggtcaccgttagctctacgcgtatccagaaccctgatcctgccgtgtaccagctgcgggatagcaagagcagcgacaagagcgtgtgtctgttcaccgacttcgacagccagaccaacgtgtcccagagcaaggactccgacgtgtacatcaccgataagtgcgtgctggacatgcggagcatggacttcaagagcaactccgccgtggcctggtccaacaagtccgatttcgcctgcgccaacgccttcaacaacagcattatccccgaggacacattcttcccaagcagcgacgtgccctgcgacgtgaagctggtggaaaagagcttcgagacagacaccaacctgaacttccagaacctgagcgtgatcggcttcagaatcctgctgctgaaagtggccggctttaacctgctgatgaccctgcggctgtggtccagccgcgccaagagaagcggatctggcgtgaagcagaccctgaatttcgacctgctgaagctggctggcgacgtggaatccaacccaggcccttctagaggcgggatccacaccatggctacctacgaggtgctgtgcgaggtggcaagaaagctgggcaccgacgacagagaagtggtgctgttcctgctgaacgtgttcatccctcagcctacactggcccagctgatcggtgcactgagagccctgaaagaggaaggccggctgacctttcctctgctggccgaatgcctgttcagagccggaagaagggatctgctgcgggacctgctgcatctggaccccagatttctggaaagacacctggccggcaccatgagctacttcagcccttaccagctgaccgtgctgcacgttgacggcgaactgtgcgccagagatattcggagcctgatcttcctgagcaaggacaccatcggcagccggtctacccctcagacatttctgcactgggtgtactgcatggaaaacctggacctgctcggccccacagatgtggatgccctgatgtccatgctgagaagcctgagcagagtggacctccagagacaggtgcagacactgatgggactgcacctgagcggacctagccacagccagcactacagacacacccct

SEQ ID NO: 21486-21489 - skipped (4 entries)

SEQ ID NO: 21490 - DNA, 324 bp, Artificial Sequence
  Synthetic Polynucleotide
gacatccagatgacacagagccctagcagcctgtctgccagcgtgggagacagagtgaccatcacatgcaaggccagccaggatgtgggcacagccgtggattggtatcagcagaagcctggcaaggcccctaagctgctgatctactgggccagcacaagacacacaggcgtgcccagcagattttctggcagcggctctggcaccgacttcaccctgacaatatccagcctccagcctgaggacttcgccacctactactgccagcaggccaacagctaccctctgaccttcggccagggcaccaaggtggaaatcaaaaga

SEQ ID NO: 21491 - DNA, 327 bp, Artificial Sequence
  Synthetic Polynucleotide
gacatccagatgacacagagccctagcagcctgtctgccagcgtgggagacagagtgaccatcacctgtagagccagccaggacgtgaacacagccgtggcttggtatcagcagaagcctggcaaggcccctaagctgctgatctacagcgccagctttctggaaagcggcgtgcccagcagattcagcggaagcagaagcggcaccgacttcaccctgacaatatccagcctccagcctgaggacttcgccacctactactgccagcaggcttacaccacacctccaacattcggccagggcaccaaggtggaaatcaagagaaca

SEQ ID NO: 21492 - DNA, 324 bp, Artificial Sequence; identical to SEQ ID NO: 194
  Synthetic Polynucleotide

SEQ ID NO: 21493 - DNA, 324 bp, Artificial Sequence; identical to SEQ ID NO: 281
  Synthetic Polynucleotide

SEQ ID NO: 21494 - DNA, 324 bp, Artificial Sequence; identical to SEQ ID NO: 282
  Synthetic Polynucleotide

SEQ ID NO: 21495 - DNA, 324 bp, Artificial Sequence; identical to SEQ ID NO: 81
  Synthetic Polynucleotide

SEQ ID NO: 21496 - DNA, 327 bp, Artificial Sequence
  Synthetic Polynucleotide
caggccgtggttacacaagagcctagcctgacagtgtcccctggcggaacagtgacactgacatgtggcagctctacaggcgccgtgaccaccagcaattacgcctcttgggtgcaagagaagcccgaccacctgttcagaggactgatcggcggcaccaacaatagagcacctggcgtgccagccagattcagcggatcactgctcggaggaaaggccgctctgacaatctctggtgcccagcctgaggacgaggccatctacttttgcgtgctgtggtacagcgaccactgggttttcggcggaggcaccaagctgacagttgat

SEQ ID NO: 21497-21503 - skipped (7 entries)

SEQ ID NO: 21504 - DNA, 345 bp, Artificial Sequence
  Synthetic Polynucleotide
gaagtgcagctggttgaatcaggtggcggcctggttcaacctggcggatctctgagactgagctgtgccgccagcggcttcacctttaccgactacacaatccactgggtccgacaggcccctggcaaaggacttgagtgggtcgccaacatcaaccccaacaatggcggcaccacctacaaccagaagttcgaggacagattcaccatcagccgggacaacagcaagaacaccctgtacctccagatgaactccctgagagccgaggacaccgccgtgtactattgtgccagaggctggaacttcgactactggggccagggaacactggtcaccgttagctct

SEQ ID NO: 21505 - DNA, 360 bp, Artificial Sequence
  Synthetic Polynucleotide
gaagtgcaactggtggaatctggcggcggactggtgcagcctggcggatctctgagactgagctgtgccgccagcggcttcaacatcaaggacacctacatccactgggtgcgccaggcccctggaaagggactggaatgggtggcccggatctaccccaccaacggctacaccagatacgccgacagcgtgaagggccggttcaccatcagcgccgacaccagcaagaataccgcctacctccagatgaacagcctgcgggccgaggataccgccgtgtactactgctcaagatggggaggcgacggcttcgctgctatggacgtgtggggccagggcacccttgtgaccgtgtcatct

SEQ ID NO: 21506 - DNA, 351 bp, Artificial Sequence; identical to SEQ ID NO: 522
  Synthetic Polynucleotide

SEQ ID NO: 21507 - DNA, 351 bp, Artificial Sequence; identical to SEQ ID NO: 522
  Synthetic Polynucleotide

SEQ ID NO: 21508 - DNA, 351 bp, Artificial Sequence; identical to SEQ ID NO: 522
  Synthetic Polynucleotide

SEQ ID NO: 21509 - DNA, 357 bp, Artificial Sequence
  Synthetic Polynucleotide
gaagtgcaactggtggaatcaggcggcggactggtgcagcctggcggatctctgagactgagctgtgccgccagcggcttcgacttcagccggtactggatgagctgggtgcgccaggcccctggcaaaggactggaatggatcggcgagatcaaccccgacagcagcaccatcaactacacccccagcctgaaggacaagttcatcatcagccgggacaacgccaagaacagcctgtacctccagatgaactccctgcgggccgaggacaccgccgtgtactattgcgccagacccgacggcaactactggtacttcgacgtgtggggccagggaaccctcgtgaccgtgtcatct

SEQ ID NO: 21510 - DNA, 327 bp, Artificial Sequence; identical to SEQ ID NO: 21496
  Synthetic Polynucleotide

SEQ ID NO: 21511-21517 - skipped (7 entries)

SEQ ID NO: 21518 - DNA, 714 bp, Artificial Sequence
  Synthetic Polynucleotide
gacatccagatgacacagagccctagcagcctgtctgccagcgtgggagacagagtgaccatcacatgcaaggccagccaggatgtgggcacagccgtggattggtatcagcagaagcctggcaaggcccctaagctgctgatctactgggccagcacaagacacacaggcgtgcccagcagattttctggcagcggctctggcaccgacttcaccctgacaatatccagcctccagcctgaggacttcgccacctactactgccagcaggccaacagctaccctctgaccttcggccagggcaccaaggtggaaatcaaaagaggcggaggcggatctggcggcggaggtagcggtggcggaggatctgaagtgcagctggttgaatcaggtggcggcctggttcaacctggcggatctctgagactgagctgtgccgccagcggcttcacctttaccgactacacaatccactgggtccgacaggcccctggcaaaggacttgagtgggtcgccaacatcaaccccaacaatggcggcaccacctacaaccagaagttcgaggacagattcaccatcagccgggacaacagcaagaacaccctgtacctccagatgaactccctgagagccgaggacaccgccgtgtactattgtgccagaggctggaacttcgactactggggccagggaacactggtcaccgttagctct

SEQ ID NO: 21519 - DNA, 732 bp, Artificial Sequence
  Synthetic Polynucleotide
gacatccagatgacacagagccctagcagcctgtctgccagcgtgggagacagagtgaccatcacctgtagagccagccaggacgtgaacacagccgtggcttggtatcagcagaagcctggcaaggcccctaagctgctgatctacagcgccagctttctggaaagcggcgtgcccagcagattcagcggaagcagaagcggcaccgacttcaccctgacaatatccagcctccagcctgaggacttcgccacctactactgccagcaggcttacaccacacctccaacattcggccagggcaccaaggtggaaatcaagagaacaggcggaggcggaagtggaggcggaggatctggcggcggaggctctgaagtgcaactggtggaatctggcggcggactggtgcagcctggcggatctctgagactgagctgtgccgccagcggcttcaacatcaaggacacctacatccactgggtgcgccaggcccctggaaagggactggaatgggtggcccggatctaccccaccaacggctacaccagatacgccgacagcgtgaagggccggttcaccatcagcgccgacaccagcaagaataccgcctacctccagatgaacagcctgcgggccgaggataccgccgtgtactactgctcaagatggggaggcgacggcttcgctgctatggacgtgtggggccagggcacccttgtgaccgtgtcatct

SEQ ID NO: 21520 - DNA, 720 bp, Artificial Sequence; identical to SEQ ID NO: 764
  Synthetic Polynucleotide

SEQ ID NO: 21521 - DNA, 720 bp, Artificial Sequence; identical to SEQ ID NO: 807
  Synthetic Polynucleotide

SEQ ID NO: 21522 - DNA, 720 bp, Artificial Sequence; identical to SEQ ID NO: 809
  Synthetic Polynucleotide

SEQ ID NO: 21523 - DNA, 666 bp, Artificial Sequence
  Synthetic Polynucleotide
atcacatgcaaggccagccaggacgtgggaatcgccgtggcctggtatcagcagaaacccggcaaggtgcccaagctgctgatctactgggccagcaccagacacaccggcgtgcccgatagattttccggcagcggctccggcaccgacttcaccctgacaatcagctccctccagcccgaggacgtggcaacctactactgccagcagtacagcagctacccctacaccttcggccagggcaccaaggtggaaatcaagagaggcggaggcggaagtggaggcggaggatctggcggcggaggctctgaagtgcaactggtggaatcaggcggcggactggtgcagcctggcggatctctgagactgagctgtgccgccagcggcttcgacttcagccggtactggatgagctgggtgcgccaggcccctggcaaaggactggaatggatcggcgagatcaaccccgacagcagcaccatcaactacacccccagcctgaaggacaagttcatcatcagccgggacaacgccaagaacagcctgtacctccagatgaactccctgcgggccgaggacaccgccgtgtactattgcgccagacccgacggcaactactggtacttcgacgtgtggggccagggaaccctcgtgaccgtgtcatct

SEQ ID NO: 21524 - DNA, 711 bp, Artificial Sequence
  Synthetic Polynucleotide
caggccgtggttacacaagagcctagcctgacagtgtcccctggcggaacagtgacactgacatgtggcagctctacaggcgccgtgaccaccagcaattacgcctcttgggtgcaagagaagcccgaccacctgttcagaggactgatcggcggcaccaacaatagagcacctggcgtgccagccagattcagcggatcactgctcggaggaaaggccgctctgacaatctctggtgcccagcctgaggacgaggccatctacttttgcgtgctgtggtacagcgaccactgggttttcggcggaggcaccaagctgacagttgatggcggaggcggaagtggaggcggaggatctggcggcggaggctctcaagttcagctccagcaatctggccctggcctggtcaagcctagcgagacactgagcatcacctgtaccgtgtccggcttcctgctgaccgattacggcgtgaactgggtccgacagcctcctggcaaaggactggaatggctgggagtgatctggggcgacggcatcaccgactacaacccaagcctgaagtcccggctgaccgtgtccaaggacaccagcaagaatcaggtgtccctgaagatgagcagcctgaccgatgccgacacagcccggtactactgtgtgaccggcctgttcgattattggggccagggcacaaccctgactgtgtctagt

SEQ ID NO: 21525-21531 - skipped (7 entries)

SEQ ID NO: 21532 - DNA, 345 bp, Artificial Sequence
  Synthetic Polynucleotide
gaggtgcagctggttgaatctggcggaggactggttcaggctggcggatctctgagactgtcttgtgccgccagcggctctgtgttcagcggcaatgtgatgggctggtacagacaggcccctggcaaagaaagagagtgggttgccgccattgccagcggcggcagcatctactacagagactctgtgaagggcagattcaccatcagccgggacaacgccaagaacaccgtgtacctccagatgaacagcctgaagcctgaggacaccgccgtgtactactgcaactctcaccctcctacactgccctattggggcctgggaacccaagtgacagtgtcctct

SEQ ID NO: 21533 - DNA, 339 bp, Artificial Sequence
  Synthetic Polynucleotide
gaagttcagctgctggaatctggcggaggactcgttcaacctggcggctctctgagactgagctgtgccgcttctggcttcagcttctctggctacgccctgagctgggttcgacaagctcccggaaagggccttgaatgggtgtccagcatcggcgagaatgacggcaccacagactatgccgatgccgtgaaaggccggtttaccatcagcagagacaattccaagaacacgctctatctgcaaatgaactccctgcgcgtggaagatacagccgtgtattattgcgtgaaggacggcgtgcactggggacagggaaccctggttacagtgtctagc

SEQ ID NO: 21534 - DNA, 339 bp, Artificial Sequence
  Synthetic Polynucleotide
gaagttcagctgctggaatctggcggaggactcgttcaacctggcggctctctgagactgagctgtgccgcttctggcttcagcttctctagctacgccctgagctgggttcgacaagctcccggaaagggccttgaatgggtgtccagcatcggcgagaatgacggcaccacagactatgccgatgccgtgaaaggccggtttaccatcagcagagacaattccaagaacacgctctatctgcaaatgaactccctgcgcgtggaagatacagccgtgtattattgcgtgaaggacggcatccactggggacagggaaccctggttacagtgtctagc

SEQ ID NO: 21535 - DNA, 339 bp, Artificial Sequence
  Synthetic Polynucleotide
gaagttcagctgctggaatctggcggaggactcgttcaacctggcggctctctgagactgagctgtgccgcttctggcttcagcttctctggctacgccctgagctgggttcgacaagctcccggaaagggccttgaatgggtgtccagcatcggcgagaatgacggcaccacagactatgccgatgccgtgaaaggccggtttaccatcagcagagacaattccaagaacacgctctatctgcaaatgaactccctgcgcgtggaagatacagccgtgtattattgcgtgaaggacggcatccactggggacagggaaccctggttacagtgtctagc

SEQ ID NO: 21536 - DNA, 381 bp, Artificial Sequence
  Synthetic Polynucleotide
gaggtgcagctggttgaatctggtggcggagttgtgcagcctggcagaagcctgagactgtcttgtgccgccagcggctttagcttcagcggctatggaatgcactgggtccgacaggcccctggcaaaggacttgagtgggtcgcctacatcagctacgacggcagcaacaagtattacgccgacagcgtgaagggcagattcaccatcagccgggacaacagcaagaacaccctgtacctccagatgaacagcctgagagccgaggacaccgccgtgtactactgcgccaaagatcctgcctggggactgagactgggcgagagcagcagctacgatttcgactactggggccagggcacaatggtcacagtttctagc

SEQ ID NO: 21537 - DNA, 369 bp, Artificial Sequence
  Synthetic Polynucleotide
gaggtgcagctggttgaatctggtggcggagttgtgcagcctggcagaagcctgagactgtcttgtgccgcctctggcttccctctgatctcctacggaatgcactgggtccgacaggcccctggcaaaggacttgagtgggtcgccttcatgacctacgacggcagcaatcggtactacgccgacagcgtgaagggcagattcaccatcagccgggacaacagcaagaacaccctgtacctccagatgaacagcctgcgcgacgaggacacagccctgtactactgcgccagagacagaatcgttggcggcagagtgcccgacagctttgactactggggccagggcacaatggtcaccgtgtctagt

SEQ ID NO: 21538 - DNA, 378 bp, Artificial Sequence
  Synthetic Polynucleotide
caggttcagctgcaagaatctggcgctggcctgctgaagcctagcgagacactgtctctgacctgtgccgtgtacggcggcagctttagcgcctacaactggaactggatcagacagcctcctggcaaaggactggaatggattggcgagatcaaccacagaggcgacaccgcctacaatcccagcctgaagtccagagtgaccatcagcgtggacaccagcaagaaccagttcagcctgaacctgaccagcgtgacagccgccgatacagccgtgtactattgtgccgccagaggctacagctacggatggcctcctggatatatcagcgacgccttcgacatctggggccagggaacacaagtgaccgtgtctagt

SEQ ID NO: 21539 - DNA, 357 bp, Artificial Sequence
  Synthetic Polynucleotide
gacgtgcagctggttgaatctggtggcggagtggtgcagcctggcaagtctctgagactgtcttgtgccgccagcggcagcatcttcagcatccatgctatgggctggttcagacaggcccctggcaaagagagagagttcgtcgccgccatcacttggagcggcggcatcacctactacgaggactctgtgaagggcagattcaccatcagccgggacaacagcaagaacaccgtgtacctccagatgaacagcctgcggcctgaggacaccgccatctactattgcgccgctgatagagccgagtcctcttggtacgattactggggccagggcaccctggtcacagtctcttct

SEQ ID NO: 21540 - DNA, 357 bp, Artificial Sequence
  Synthetic Polynucleotide
gaggttcagctgcttgagtctggcggaggactggttcaacctggcggaagcctgagactgtcttgtgccgcctctggctctatcgccagcatccatgctatgggctggttcagacaggcccctggcaaagaacgggaatttgtggccgtgattacttggagcggcggcatcacctactacgccgattctgtgaagggcagattcaccatcagccgggacaacagcaagaacaccgtgtacctccagatgaacagcctgcggcctgaggacacagccctgtattattgtgccggcgacaaacatcagtcctcttggtacgactactggggccagggcacactggtcacagtctcttct

SEQ ID NO: 21541 - DNA, 357 bp, Artificial Sequence
  Synthetic Polynucleotide
gaggtgcagctggttgaatctggcggaggactggttcaggctggcggatctctgagactgtcttgtgccgcctctggctctatcgccagcatccatgctatgggctggttcagacaggcccctggcaaagaacgggaatttgtggccgtgattacttggagcggcggcatcacctactacgccgattctgtgaagggcagattcaccatcagccgggacaacgccaagaacaccgtgtacctccagatgaacagcctgaagcctgaggacaccgccatctactactgtgccggcgataagcaccaaagctcttggtacgactactggggccagggcacccaagtgacagtctcttct

SEQ ID NO: 21542 - DNA, 354 bp, Artificial Sequence
  Synthetic Polynucleotide
cagctccagttgcaagagagcggccctggcttggtaaaaccttccgagacccttagcctcacatgcacggttagtgggggcagcattgattcacggatttactattggggatggattcggcaacccccgggtaaaggattggagtggattggtcatatttattatagtggagcgacgtactacaacccaagtctcaaatccagggttacaatatccgtcgatacgagcaggaaccaattcagcttgaaactttctagtgtcaccgcagcagacacagccgtctattactgtacgcgggatgactccagtaattggcggtcccgagggcaagggacactggtcacggtctcctca

SEQ ID NO: 21543-21546 - skipped (4 entries)

SEQ ID NO: 21547 - DNA, 504 bp, Artificial Sequence
  Synthetic Polynucleotide
atgggcagttggttcgagttctacgaccggctgaatgccatcgacgccagactgtgggctctcggaggatctgaagctgagctggccgccttcgagaaagagatcgccgcctttgagagcgagctgcaagcctacaaaggcaagggcaaccccgaggtggaaaacctgagagtgcacgccgctgccatcagagaatggctccaggcttacagacacaacggcggaggcggatctggtggcggtggatctggaatgggaagctggcttgagttctaccacagactcaacgccattgacagcaggctgtgggcacttggcggaagcgaagctgaactcgccgcttttgaaaaagaaattgccgctttcgagtccgagcttcaggcttacaaaggcaaagggaatcctgaggtcgagagcctgagagatcacgctgcccacattagagagtggttgcaggcataccggcacaatggtggcggaggtagtggcggcggaggttctgga

SEQ ID NO: 21548 - DNA, 219 bp, Artificial Sequence
  Synthetic Polynucleotide
atgggatcttggagcgagttctgggtccgactgggagccatcagagaaagactggatgccctcggaggaagcgaagccgaactggccgccttcgagaaagagatcgccgcctttgagagcgagctgcaagcctacaaaggcaagggcaaccccgaggtggaaaagctgagatacaccgccgctaccatccggcggtttctccaggcttacagacacaat

SEQ ID NO: 21549 - DNA, 219 bp, Artificial Sequence
  Synthetic Polynucleotide
atgggcagctgggatgagttcggcagaaggctgtacgccattgagtggcggctgtatgcccttggcggatctgaagctgagctggccgcttttgaaaaagaaattgccgctttcgagtccgagcttcaggcttacaaaggcaaagggaatcctgaggtcgagaaactgcgggaaatcgccgccgtgatccggtccaatctccaggcatatcggcataat

SEQ ID NO: 21550 - DNA, 1424 bp, Artificial Sequence
  Synthetic Polynucleotide
atggccttaccagtgaccgccttgctcctgccgctggccttgctgctccacgccgccaggccggcatgcgatgaaggtggcggcggatctatgggatcttggagcgagttctgggtccgactgggagccatcagagaaagactggatgccctcggaggaagcgaagccgaactggccgccttcgagaaagagatcgccgcctttgagagcgagctgcaagcctacaaaggcaagggcaaccccgaggtggaaaagctgagatacaccgccgctaccatccggcggtttctccaggcttacagacacaatggtaccggcggaggcggatcaggcggcggaggtagcggtggcggtggttctggactggaaaagtgcttccagaccgagaatcccctggaatgccaggacaagggcgaagaggaactccagaagtacatccaagagtctcaggccctggctaagagaagctgcggcctgtttcagaagctgggcgagtattacctccagaacgccttcctggtggcctacaccaagaaagcccctcagctgacaagcagcgagctgatggctatcacccggaagatggccgccacagccgctacatgttgtcagctcagcgaggacaaactgctggcctgtggcgaaggcgctgccgacatcattatcggccacctgtgcatccggcacgaaatgacccctgtgaatcctggcgtgggccagtgttgtacaagcagctacgccaacagacggccctgctttagcagcctggtggtggacgaaacctacgtgccaccagccttcagcgacgacaagttcatcttccacaaggacctgtgtcaggcccagggcgttgccctccagacaatgaagcaagagttcctgattaacctggtcaagcagaagccccagatcaccgaggaacagctggaagccgtgatcgccgatttcagcggcctgctggaaaaatgctgtcagggccaagagcaagaagtgtgcttcgccgaggaaggccagaagctgatctccaagacaagagccgctctcggcgttggaggcggaggttctggtggtggtggaagcggaggtggtggtagtgggcccatgggcagctgggatgagttcggcagaaggctgtacgccattgagtggcggctgtatgcccttggcggatctgaagctgagctggccgcttttgaaaaagaaattgccgctttcgagtccgagcttcaggcttacaaaggcaaagggaatcctgaggtcgagaaactgcgggaaatcgccgccgtgatccggtccaatctccaggcatatcggcataatggatccggtggtggcggtagtggtggcggaggaagtggcggcggaggatctcaccaccatcaccatcatcatcaccaccatacgcgtcctcgactgtgccttct

SEQ ID NO: 21551 - DNA, 219 bp, Artificial Sequence
  Synthetic Polynucleotide
atgggcagctgggaagagttcgagctgagactgaacgccatcgaggaacggctgtatgccctcggaggatctgaagccgagctggcctacttcgagtacgtgatcgccgacttcgagggcaacctgcagcggtacaaaggcaagggcaaccctgaagtggaagccctgtacttcgaggccgacgccatcttcgaggaactggtggcctacagacacaac

SEQ ID NO: 21552 - DNA, 219 bp, Artificial Sequence
  Synthetic Polynucleotide
atgggcagttggttcgagttcaaccaccggctgtgggccatctttgagagactgatggccctcggcggaagcgaagctgaactggccgccttcgagaaagagatcgccgcctttgagagcgagctgcaggcttacaaaggcaaagggaatccagaggtggaatacctgagagctatggccgccgtgatccgctaccatctgcaagcctaccggcacaac

SEQ ID NO: 21553 - DNA, 219 bp, Artificial Sequence
  Synthetic Polynucleotide
atgggcagctgggtcgagttctacaacagactgtgggccatcgaccacagactgcacgcccttggaggatctgaagccgaactggccgccttcgagaaagagatcgccgcctttgagagcgagctgcaagcctacaaaggcaagggcaaccccgaggtggaagtgctgagataccacgccgccagcatcagagtgaccctccaggcttacagacacaat

SEQ ID NO: 21554 - DNA, 219 bp, Artificial Sequence
  Synthetic Polynucleotide
atgggatcttggagcgagttttacgatcggctgcacgccattcaccaccggctgtatgctctcggaggaagcgaagctgagctggccgcttttgaaaaagaaattgccgctttcgagtccgagcttcaggcttacaaaggcaaagggaatcctgaggtcgaggccctgagagataccgccgccttcatcagaacccggttgcaggcataccggcacaac

SEQ ID NO: 21555 - DNA, 828 bp, Artificial Sequence
  Synthetic Polynucleotide
gagcctcacagcctgagatacaacctgaccgtgctgagctgggatggctctgtgcagagcggctttctgaccgaagtgcacctggacggccagcctttcctgagatgcgacagacagaagtgccgggccaagcctcaaggacagtgggctgaagatgtgctgggcaacaagacctgggacagagagacaagggacctgaccggcaacggcaaggacctgagaatgacactggcccacatcaaggaccagaaagagggcctgcactccctgcaagagatcagagtgtgcgagatccatgaggacaacagcaccagaagcagccagcacttctactacgacggcgagctgttcctgagccagaacctggaaacaaaagaatggaccatgcctcagagcagcagagcccagacactggctatgaacgtgcggaacttcctgaaagaggacgccatgaagaccaagacacactaccacgccatgcacgccgactgtctgcaagagctgcggagatacctgaagtccggcgtggtgctgagaagaaccgtgcctcctatggtcaacgtgaccagaagcgaagcctccgagggcaacatcaccgtgacatgtagagccagcggcttctacccctggaacatcaccctgtcttggagacaggatggcgtgtccctgagccacgatacacagcagtggggagatgtcctgcctgacggcaatggcacctaccagacatgggtcgccaccagaatctgccagggcgaagaacagcggttcacctgttacatggaacacagcggcaaccacagcacacaccctgtgccatctggaaag

SEQ ID NO: 21556 - DNA, 567 bp, Artificial Sequence
  Synthetic Polynucleotide
gccgctgagcctcacagcctgagctacgacatcacagtgatccccaagttcagacccggaccacgttggtgcgctgtgcagggacaagtggacgagaaaaccttcctgcactacgactgcggcaacaagaccgtgacacccgtgtctccactgggcaagaaactgaacgtgaccaccgcctggaaggcccagaatcctgtgctgagagaagtggtggacatcctgaccgagcagctgcgggacattcagctggaaaactacacccctaaagagcccctgacactccaggccagaatgagctgtgaacagaaggccgagggccacagctctggctcttggcagttcagcttcgacggccagattttcctgctgttcgacagcgagaagcggatgtggaccacagtgcatcccggcgctcgcaagatgaaggaaaagtgggagaacgacaaggtggtcgccatgagcttccactacttcagcatgggcgactgcatcggctggctggaagatttcctgatgggcatggacagcaccctggaaccatctgctggtgcccctccaatggtt

SEQ ID NO: 21557-21559 - skipped (3 entries)

SEQ ID NO: 21560 - DNA, 345 bp, Artificial Sequence
  Synthetic Polynucleotide
aagaaccaggtggaacagagccctcagagcctgattatcctggaaggcaagaactgcaccctccagtgcaactacaccgtgtctcccttcagcaacctgcggtggtacaagcaggatacaggcagaggccctgtgtctctgaccatcatgaccttctccgagaacaccaagagcaacggcagatacaccgccacactggacgccgatacaaagcagagcagcctgcacatcacagccagccagctgagcgatagcgccagctacatctgcgtggtgtccgatagaggcagcaccctgggcagactgtactttggcagaggcacccagctgaccgtgtggcccgat

SEQ ID NO: 21561 - DNA, 333 bp, Artificial Sequence
  Synthetic Polynucleotide
gacatctaccagacacctagatacctggtcatcggcaccggcaagaaaatcaccctggaatgcagccagacaatgggccacgacaagatgtactggtatcagcaggaccccggcatggaactgcacctgatccactacagctacggcgtgaacagcaccgagaagggcgatctgtctagcgagagcaccgtgtccagaatcagaaccgagcacttcccactgacactggaaagcgccagacctagccacaccagccagtacctgtgtgccagcagcgagaatatcggcacagcctacgagcagtatttcggccctggcaccagactgaccgtg

SEQ ID NO: 21562 - skipped

SEQ ID NO: 21563 - DNA, 357 bp, Artificial Sequence
  Synthetic Polynucleotide
ggcgtgacacagagccccacacacctgattaagaccagaggccagcaggccacactgagatgcagccctatcagcggccacaccagcgtgtactggtatcagcaggctctcggactgggcctccagttcctgctttggtacgacgagggcgaagagagaaaccggggcaacttccctcctcggttttccggcagacagttccccaactacagcagcgagctgaacgtgaacgccctggaactggaagatagcgccctgtacctgtgtgcctcttctcttggtggacctcgcggactggctggactgagaggggatgagcagtttttcggccctggcaccagactgaccgtgctggaa

SEQ ID NO: 21564 - DNA, 351 bp, Artificial Sequence
  Synthetic Polynucleotide
ggcgtgacacagagccccacacacctgattaagaccagaggccagcaggccacactgagatgcagccctatcagcggccacaccagcgtgtactggtatcagcaggctctcggactgggcctccagttcctgctttggtacgacgagggcgaagagagaaaccggggcaacttccctcctcggttttccggcagacagttccccaactacagcagcgagctgaacgtgaacgccctggaactggaagatagcgccctgtacctgtgtgccagctctctcggcggagatgaactgggagccgatggcaacgagcagttctttggccctggcaccagactgaccgtgctggaa

SEQ ID NO: 21565 - skipped

SEQ ID NO: 21566 - DNA, 402 bp, Artificial Sequence
  Synthetic Polynucleotide
gtgctgcacctggtgcctatcaatgccaccagcaaggacgacagcgacgtgaccgaagtgatgtggcagcccgctctgagaagaggcagaggactgcaagcccaaggctacggcgtcagaatccaggatgctggcgtgtacctgctgtatagccaggtgctgttccaggacgtgaccttcacaatgggccaagtggtgtccagagaaggccagggcagacaagagacactgttccggtgcatccggtccatgccttctcaccccgacagagcctacaacagctgctattctgccggcgtgttccatctgcaccagggcgatattctgtccgtgattatccccagagccagggccaagctgaatctgtctcctcacggcacctttctgggcttcgtgaagctg

SEQ ID NO: 21567 - DNA, 402 bp, Artificial Sequence
  Synthetic Polynucleotide
gtcctgcatctggtccccattaacgccacctccaaggacgattccgatgtcactgaagtcatgtggcaacctgcactgcggagaggaaggggacttcaggctcaaggatatggcgtgcggattcaggacgcaggggtctacctgctctactcccaagtcctgtttcaggatgtcacgtttactatggggcaagtcgtcagccgcgaaggccaaggacgtcaagaaaccctgttcagatgtattcgctctatgcccagccatcctgaccgggcctacaactcctgttatagcgcaggggtgttccacctccatcaaggcgacatcctgtctgtcatcatccctcgggccagagctaaactgaatctgagcccacacggcacattcctcggatttgtgaagctg

SEQ ID NO: 21568 - DNA, 516 bp, Artificial Sequence
  Synthetic Polynucleotide
ggactgctggatctgagacagggcatgtttgcccagctggtggcccagaatgtgctgctgattgatggccctctgagctggtacagcgatcctggacttgctggcgttagcctgactggcggcctgagctacaaagaggacaccaaagaactggtggtggctaaggccggcgtgtactacgtgttctttcagctggaactgcggagagtggtggccggcgaaggatctggatctgtgtctctggccctgcacctccagcctcttagatcagctgctggtgctgctgccctggctctgacagttgatctgcctcctgccagcagcgaggccagaaatagcgcctttggcttccaaggcagactgctgcacctgtctgctggacagagactgggagtgcatctgcacacagaggccagagccagacatgcctggcaactgacacagggcgctacagtgctgggcctgtttagagtgacccctgagattcctgccggcctgccttctccaagaagcgaa

SEQ ID NO: 21569 - skipped

SEQ ID NO: 21570 - DNA, 663 bp, Artificial Sequence
  Synthetic Polynucleotide
gagtgggtcaagttcgccaagccttgcagagaaggcgaggacaacagcaagcggaaccctatcgccaagatcaccagcgactaccaggccacacagaagatcacctaccggatctctggcgtgggcatcgaccagcctccattcggcatcttcgtggtggacaagaacaccggcgacatcaacatcaccgccatcgtggacagagaggaaacccctagcttcctgattacctgtagagccctgaacgcccagggcctcgatgtggaaaagcctctgatcctgaccgtgaagatcctggacatcaacgacaaccctccagtgttcagccagcagattttcatgggcgagatcgaggaaaacagcgccagcaacagcctggtcatgatcctgaatgccaccgacgccgacgagcccaaccacctgaatagcaagatcgccttcaagatcgtgtcccaagagcctgccggcacacccatgtttctgctgtccagaaataccggcgaagtgcggaccctgaccaatagcctggatagagagcaggccagcagctacagactggtggtgtctggcgctgacaaggatggcgagggactgagcacccagtgcgagtgcaacatcaaagtgaaggacgtgaacgacaacttccccatgttccgggacagc

SEQ ID NO: 21571 - DNA, 1350 bp, Artificial Sequence
  Synthetic Polynucleotide
gagtgggtcaagttcgccaagccttgcagagaaggcgaggacaacagcaagcggaaccctatcgccaagatcaccagcgactaccaggccacacagaagatcacctaccggatctctggcgtgggcatcgaccagcctccattcggcatcttcgtggtggacaagaacaccggcgacatcaacatcaccgccatcgtggacagagaggaaacccctagcttcctgattacctgtagagccctgaacgcccagggcctcgatgtggaaaagcctctgatcctgaccgtgaagatcctggacatcaacgacaaccctccagtgttcagccagcagattttcatgggcgagatcgaggaaaacagcgccagcaacagcctggtcatgatcctgaatgccaccgacgccgacgagcccaaccacctgaatagcaagatcgccttcaagatcgtgtcccaagagcctgccggcacacccatgtttctgctgtccagaaataccggcgaagtgcggaccctgaccaatagcctggatagagagcaggccagcagctacagactggtggtgtctggcgctgacaaggatggcgagggactgagcacccagtgcgagtgcaacatcaaagtgaaggacgtgaacgacaacttccccatgttccgggacagccagtatagcgcccggatcgaagagaacatcctgagcagcgagctgctgcggttccaagtgaccgacctggacgaagagtacaccgacaactggctggccgtgtacttcttcaccagcggcaacgaaggcaactggttcgagatccagacagaccccaggaccaacgagggcatcctgaaggttgtgaaggccctggactacgagcagctccagagcgtgaagctgtctatcgccgtgaagaacaaggccgagttccaccagtccgtgatctcccggtacagagtgcagagcacccctgtgaccatccaagtgattaacgtgcgcgagggcattgccttcagacccgccagcaagaccttcaccgtgcagaagggcatcagcagcaagaaactggtggactacatcctgggcacctatcaggccatcgacgaggacacaaacaaagccgcctccaacgtgaaatacgtgatgggcagaaacgacggcggctacctgatgatcgactccaagaccgccgagatcaagttcgtgaagaatatgaaccgggactccaccttcatcgtgaacaagaccatcacagccgaggtgctggctatcgacgagtataccggcaagaccagcaccggcacagtgtatgtgcgggtgcccgacttcaacgataactgccctacagccgtgctggaaaag

SEQ ID NO: 21572 - DNA, 693 bp, Artificial Sequence
  Synthetic Polynucleotide
gacagccagtatagcgcccggatcgaagagaacatcctgagcagcgagctgctgcggttccaagtgaccgacctggacgaagagtacaccgacaactggctggccgtgtacttcttcaccagcggcaacgaaggcaactggttcgagatccagacagaccccaggaccaacgagggcatcctgaaggttgtgaaggccctggactacgagcagctccagagcgtgaagctgtctatcgccgtgaagaacaaggccgagttccaccagtccgtgatctcccggtacagagtgcagagcacccctgtgaccatccaagtgattaacgtgcgcgagggcattgccttcagacccgccagcaagaccttcaccgtgcagaagggcatcagcagcaagaaactggtggactacatcctgggcacctatcaggccatcgacgaggacacaaacaaagccgcctccaacgtgaaatacgtgatgggcagaaacgacggcggctacctgatgatcgactccaagaccgccgagatcaagttcgtgaagaatatgaaccgggactccaccttcatcgtgaacaagaccatcacagccgaggtgctggctatcgacgagtataccggcaagaccagcaccggcacagtgtatgtgcgggtgcccgacttcaacgataactgccctacagccgtgctggaaaag

SEQ ID NO: 21573 - DNA, 783 bp, Artificial Sequence
  Synthetic Polynucleotide
gacagccagtatagcgcccggatcgaagagaacatcctgagcagcgagctgctgcggttccaagtgaccgacctggacgaagagtacaccgacaactggctggccgtgtacttcttcaccagcggcaacgaaggcaactggttcgagatccagacagaccccaggaccaacgagggcatcctgaaggttgtgaaggccctggactacgagcagctccagagcgtgaagctgtctatcgccgtgaagaacaaggccgagttccaccagtccgtgatctcccggtacagagtgcagagcacccctgtgaccatccaagtgattaacgtgcgcgagggcattgccttcagacccgccagcaagaccttcaccgtgcagaagggcatcagcagcaagaaactggtggactacatcctgggcacctatcaggccatcgacgaggacacaaacaaagccgcctccaacgtgaaatacgtgatgggcagaaacgacggcggctacctgatgatcgactccaagaccgccgagatcaagttcgtgaagaatatgaaccgggactccaccttcatcgtgaacaagaccatcacagccgaggtgctggctatcgacgagtataccggcaagaccagcaccggcacagtgtatgtgcgggtgcccgacttcaacgataactgccctacagccgtgctggaaaaggacgccgtgtgtagctctagccctagcgtggtcgtgtccgccagaacactgaacaacagatacacaggcccctacacattcgccctggaa

SEQ ID NO: 21574 - skipped

SEQ ID NO: 21575 - DNA, 51 bp, Artificial Sequence
  Synthetic Polynucleotide
atcaacatctacaacgccgagcctgccaatcctagcgagaagaacagcccc

SEQ ID NO: 21576 - DNA, 69 bp, Artificial Sequence
  Synthetic Polynucleotide
tacatcaacatctacaacgccgagcctgccaatcctagcgagaagaacagccccacacagtacgcctac

SEQ ID NO: 21577 - DNA, 72 bp, Artificial Sequence
  Synthetic Polynucleotide
tatatcaatatctataatgccgaaccggctaacccctccgaaaagaactcccctagcactcagtatgcttac

SEQ ID NO: 21578 - DNA, 426 bp, Artificial Sequence
  Synthetic Polynucleotide
tacatcaacatctacaacgccgagcctgccaatcctagcgagaagaacagccccagcacacagtacgcctacggcagcggcagcagctatatcaatatctataatgccgaaccggctaacccctccgaaaagaactcccctagcactcagtatgcttatggctccggcggctcctatattaacatatacaatgctgagcccgcaaatccctccgagaaaaattccccatccacgcaatacgcctatggctctggctccagctcctacattaacatctataacgctgaaccagcaaacccgtctgaaaaaaacagcccctctactcaatatgcctacggatctggcagcgggtcctacatcaatatctacaatgctgaacccgccaatccgagcgaaaaaaactctccatccacacagtatgcatat

SEQ ID NO: 21579 - DNA, 84 bp, Artificial Sequence
  Synthetic Polynucleotide
tacatcaacatctacaacgccgagcctgccaatcctagcgagaagaacagccccagcacacagtacgcctatggcggcggaagc

SEQ ID NO: 21580 - DNA, 177 bp, Artificial Sequence
  Synthetic Polynucleotide
tacataaacatatacaatgcagagcccgccaacccgagtgaaaaaaactccccgagcacccaatacgcatacggcggatctggcgggagttatatcaacatctacaatgcagaacctgctaacccgtcagagaaaaacagtccctccacgcaatacgcctatagtggctctggttca

SEQ ID NO: 21581 - DNA, 156 bp, Artificial Sequence
  Synthetic Polynucleotide
tacatcaacatctacaacgccgagcctgccaatcctagcgagaagaacagccccagcacacagtacgcctatggcggcggaagctatatcaatatctataatgccgaaccggctaacccctccgaaaagaactcccctagcactcagtatgcttac

SEQ ID NO: 21582 - DNA, 81 bp, Artificial Sequence
  Synthetic Polynucleotide
agcggctctggttgtccttactctaatcctagcctgtgtagcggcagcggtggatgcccatacagcaatccgtccctgtgc

SEQ ID NO: 21583 - DNA, 423 bp, Artificial Sequence
  Synthetic Polynucleotide
caggacaagctgacccagtggcctaaatggcttgaaggcggcggaggaagcgagctgcctacacagggcaccttcagcaacgtgtccaccaatgtttctggcggaggcggccaggataagctcacacaatggcccaagtggctggaaggtggtggcggatctgaactgccaactcagggcacattctccaatgtgtctacgaatgtgtctaagatcgaagtgatgtaccctcctccttacctggacaacgagaagtccaacggcaccatcatccacgtgaagggcaagcacctgtgtccttctccactgttccccggacctagcaagcctttctgggtgctcgttgttgttggcggcgtgctggcctgttacagcctgctggttaccgtggccttcatcatcttttgggtccgaagcaagcgg

SEQ ID NO: 21584 - DNA, 129 bp, Artificial Sequence
  Synthetic Polynucleotide
tacatcaacatctacaacgccgagcctgccaatcctagcgagaagaacagccccagcacacagtacgcctatggcggcggaagccagctgggaccttatgagctgtgggagctgtctcacggcagcgga

SEQ ID NO: 21585 - DNA, 96 bp, Artificial Sequence
  Synthetic Polynucleotide
ggctctgggagctgtcaatttgatctgtctacgagacgattgaaatgtgggagtggatcctgccagtttgacctttctacacggagacttaagtgc

SEQ ID NO: 21586 - DNA, 96 bp, Artificial Sequence
  Synthetic Polynucleotide
tgtcagtttgacctcagcacacgccgcctgaaatgtggaggtggcagctgccagttcgacttgagcacgagacgactcaaatgtggcggtggtagc

SEQ ID NO: 21587 - DNA, 39 bp, Artificial Sequence
  Synthetic Polynucleotide
tcctgtcagtttgacctcagcacacgccgcctgaaatgt

SEQ ID NO: 21588 - DNA, 96 bp, Artificial Sequence
  Synthetic Polynucleotide
tgtcaatataacctctctagtagagcactcaaatgcggtggtggtagctgccaatacaatttgagttcccgcgccctgaagtgtggcggtggtagc

SEQ ID NO: 21589 - DNA, 39 bp, Artificial Sequence
  Synthetic Polynucleotide
tcctgtcaatataacctctctagtagagcactcaaatgc

SEQ ID NO: 21590 - DNA, 51 bp, Artificial Sequence
  Synthetic Polynucleotide
gggttcctgctgattcaggcttggcccgagaacagaaccgatctgcacgct

SEQ ID NO: 21591 - DNA, 45 bp, Artificial Sequence
  Synthetic Polynucleotide
atctaccctccactgctgagaaccagccaggctatgggctctgga

SEQ ID NO: 21592 - DNA, 45 bp, Artificial Sequence
  Synthetic Polynucleotide
ggctgccccaaatgggatgctgcgagatgttctggcgggggttcc

SEQ ID NO: 21593 - DNA, 39 bp, Artificial Sequence
  Synthetic Polynucleotide
ggctgcggaccatatacgtggaacagttgctctggcggg

SEQ ID NO: 21594 - DNA, 87 bp, Artificial Sequence
  Synthetic Polynucleotide
tcctatccccctctcctccgcacatcacaggcaatgagcggcggcgggagctaccctccgttgttgaggacgagtcaagcgatgtct

SEQ ID NO: 21595 - DNA, 39 bp, Artificial Sequence
  Synthetic Polynucleotide
tcctatccccctctcctccgcacatcacaggcaatgagc

SEQ ID NO: 21596 - DNA, 45 bp, Artificial Sequence
  Synthetic Polynucleotide
cagctgggaccttatgagctgtgggagctgtctcacggcagcgga

SEQ ID NO: 21597 - DNA, 159 bp, Artificial Sequence
  Synthetic Polynucleotide
cagctgggaccttatgagctgtgggagctgtctcacggcagcggctctggatctggatctcagctcggcccttacgaactctgggaactgagccattctggcggcggatctggacagcttggaccctacgagctttgggaactctcccacggatctagc

SEQ ID NO: 21598-21601 - skipped (4 entries)

SEQ ID NO: 21602 - DNA, 27 bp, Artificial Sequence
  Synthetic Polynucleotide
ggggggggggggggggggggggggggg

SEQ ID NO: 21603 - skipped

SEQ ID NO: 21604 - DNA, 27 bp, Artificial Sequence
  Synthetic Polynucleotide
ggggggggggggggggggggggggggg

SEQ ID NO: 21605 - skipped

SEQ ID NO: 21606 - DNA, 27 bp, Artificial Sequence
  Synthetic Polynucleotide
ggggggggggggggggggggggggggg

SEQ ID NO: 21607-21608 - skipped (2 entries)

SEQ ID NO: 21609 - DNA, 1722 bp, Artificial Sequence
  Synthetic Polynucleotide
atggccttaccagtgaccgccttgctcctgccgctggccttgctgctccacgccgccaggccgatggaccccgacctggaaatcagagccgccttcctgcggcagagaaacacagccctgagaacagaggtggccgagctggaacaagaggtgcagcggctggaaaacgaggtgtcccagtacgagacaagatacggccctctcggaggcggaaaactcgagggacagcctaaggccaatcctaccgtgacactgttccctccaagcagcgaagaactccaggccaacaaggccacacttgtgtgcctgatctccgacttctaccctggggctgtgacagtggcttggaaggccgatggatctcctgtgaaagccggcgtggaaaccaccaagccatccaagcagagcaacaacaaatacgccgccagctcctacctgagcctgacacctgagcagtggaagtcccacagatcctacagctgccaagtgacccacgaaggcagcaccgtggaaaagacagtggcccctacagagtgcagcggcagagccgattgcggctttaccagcgagagctaccagcagggcgtgctgagcgccaccatcctgtacgagatcctgctgggcaaggccaccctgtacgccgtgctggtgtctgccctggtgctgatggctatggtcaagcggaaggacagccggggaagggccaagcgatctggatctggagcaacaaacttctcactactcaaacaagcaggtgacgtggaggagaatcccgggcctactagtatggactggatttggcgcatccttttccttgtcggcgctgctaccggcgcgcattccttcgaagttcagttggtagagtctggaggcggagtggtacaaccggggcggtctcttagacttagttgcgcagcaagcggtttctctttctctggctatgggatgcactgggtgagacaggcccctgggaaaggactggagtgggtggcctacatttcatacgacgggagtaataaatactatgcagactccgttaagggcaggttcacgatctctcgggacaattccaagaatacattgtatcttcagatgaatagtctccgagctgaagacacggcggtttactactgcgctaaagacccggcctggggacttcgacttggagagagttctagctacgattttgacatttggggacaagggacaatggtcactgtctcaagtacgcgtgcctctacaaagggaccctccgtgtttcctctggctcccagcagcaagtctacaagcggaggaacagccgctctgggctgcctggtcaaggattactttcccgagcctgtgaccgtgtcctggaatagcggagcactgacaagcggcgtgcacacctttccagccgtgctgcaaagcagcggcctgtactctctgagcagcgtggtcacagtgcctagctctagcctgggcacccagacctacatctgcaatgtgaaccacaagcctagcaacaccaaggtggacaagagagtggaacccaagagctgtatccccgaggacacattcttcccaagccccgagagcagctgcgacgtgaagctggtggaaaagagcttcgagacagacaccaacctgaacttccagaacctgagcgtgatcggcttcagaatcctgctgctgaaagtggccggctttaacctgctgatgaccctgcggctgtggtccagc

SEQ ID NO: 21610 - DNA, 1497 bp, Artificial Sequence
  Synthetic Polynucleotide
atggccttaccagtgaccgccttgctcctgccgctggccttgctgctccacgccgccaggccgatggaccccgacctggaaatcagagccgccttcctgcggcagagaaacacagccctgagaacagaggtggccgagctggaacaagaggtgcagcggctggaaaacgaggtgtcccagtacgagacaagatacggccctctcggaggcggaaaactcgagggacagcctaaggccaatcctaccgtgacactgttccctccaagcagcgaagaactccaggccaacaaggccacacttgtgtgcctgatctccgacttctaccctggggctgtgacagtggcttggaaggccgatggatctcctgtgaaagccggcgtggaaaccaccaagccatccaagcagagcaacaacaaatacgccgccagctcctacctgagcctgacacctgagcagtggaagtcccacagatcctacagctgccaagtgacccacgaaggcagcaccgtggaaaagacagtggcccctacagagtgcagcggcagagccgattgcggctttaccagcgagagctaccagcagggcgtgctgagcgccaccatcctgtacgagatcctgctgggcaaggccaccctgtacgccgtgctggtgtctgccctggtgctgatggctatggtcaagcggaaggacagccggggaagggccaagcgatctggatctggagcaacaaacttctcactactcaaacaagcaggtgacgtggaggagaatcccgggcctactagtatggactggatttggcgcatccttttccttgtcggcgctgctaccggcgcgcattccttcgaaatggaccccgacctggaaatcagagccgccttcctgcggcagagaaacacagccctgagaacagaggtggccgagctggaacaagaggtgcagcggctggaaaacgaggtgtcccagtacgagacaagatacggccctctcggaggcggaaaaacgcgtgcctctacaaagggaccctccgtgtttcctctggctcccagcagcaagtctacaagcggaggaacagccgctctgggctgcctggtcaaggattactttcccgagcctgtgaccgtgtcctggaatagcggagcactgacaagcggcgtgcacacctttccagccgtgctgcaaagcagcggcctgtactctctgagcagcgtggtcacagtgcctagctctagcctgggcacccagacctacatctgcaatgtgaaccacaagcctagcaacaccaaggtggacaagagagtggaacccaagagctgtatccccgaggacacattcttcccaagccccgagagcagctgcgacgtgaagctggtggaaaagagcttcgagacagacaccaacctgaacttccagaacctgagcgtgatcggcttcagaatcctgctgctgaaagtggccggctttaacctgctgatgaccctgcggctgtggtccagc

SEQ ID NO: 21611 - DNA, 1428 bp, Artificial Sequence
  Synthetic Polynucleotide
atggccttaccagtgaccgccttgctcctgccgctggccttgctgctccacgccgccaggccggaagttgctgccctcgagaaggaggtagcagctttggaaaaagaagtcgcagcccttgagaaagaagttgcggctctggagaagctcgagggacagcctaaggccaatcctaccgtgacactgttccctccaagcagcgaagaactccaggccaacaaggccacacttgtgtgcctgatctccgacttctaccctggggctgtgacagtggcttggaaggccgatggatctcctgtgaaagccggcgtggaaaccaccaagccatccaagcagagcaacaacaaatacgccgccagctcctacctgagcctgacacctgagcagtggaagtcccacagatcctacagctgccaagtgacccacgaaggcagcaccgtggaaaagacagtggcccctacagagtgcagcggcagagccgattgcggctttaccagcgagagctaccagcagggcgtgctgagcgccaccatcctgtacgagatcctgctgggcaaggccaccctgtacgccgtgctggtgtctgccctggtgctgatggctatggtcaagcggaaggacagccggggaagggccaagcgatctggatctggagcaacaaacttctcactactcaaacaagcaggtgacgtggaggagaatcccgggcctactagtatggactggatttggcgcatccttttccttgtcggcgctgctaccggcgcgcattccttcgaaatggaccccgacctggaaatcagagccgccttcctgcggcagagaaacacagccctgagaacagaggtggccgagctggaacaagaggtgcagcggctggaaaacgaggtgtcccagtacgagacaagatacggccctctcggaggcggaaaaacgcgtgcctctacaaagggaccctccgtgtttcctctggctcccagcagcaagtctacaagcggaggaacagccgctctgggctgcctggtcaaggattactttcccgagcctgtgaccgtgtcctggaatagcggagcactgacaagcggcgtgcacacctttccagccgtgctgcaaagcagcggcctgtactctctgagcagcgtggtcacagtgcctagctctagcctgggcacccagacctacatctgcaatgtgaaccacaagcctagcaacaccaaggtggacaagagagtggaacccaagagctgtatccccgaggacacattcttcccaagccccgagagcagctgcgacgtgaagctggtggaaaagagcttcgagacagacaccaacctgaacttccagaacctgagcgtgatcggcttcagaatcctgctgctgaaagtggccggctttaacctgctgatgaccctgcggctgtggtccagc

SEQ ID NO: 21612 - DNA, 1359 bp, Artificial Sequence
  Synthetic Polynucleotide
atggccttaccagtgaccgccttgctcctgccgctggccttgctgctccacgccgccaggccggaagttgctgccctcgagaaggaggtagcagctttggaaaaagaagtcgcagcccttgagaaagaagttgcggctctggagaagctcgagggacagcctaaggccaatcctaccgtgacactgttccctccaagcagcgaagaactccaggccaacaaggccacacttgtgtgcctgatctccgacttctaccctggggctgtgacagtggcttggaaggccgatggatctcctgtgaaagccggcgtggaaaccaccaagccatccaagcagagcaacaacaaatacgccgccagctcctacctgagcctgacacctgagcagtggaagtcccacagatcctacagctgccaagtgacccacgaaggcagcaccgtggaaaagacagtggcccctacagagtgcagcggcagagccgattgcggctttaccagcgagagctaccagcagggcgtgctgagcgccaccatcctgtacgagatcctgctgggcaaggccaccctgtacgccgtgctggtgtctgccctggtgctgatggctatggtcaagcggaaggacagccggggaagggccaagcgatctggatctggagcaacaaacttctcactactcaaacaagcaggtgacgtggaggagaatcccgggcctactagtatggactggatttggcgcatccttttccttgtcggcgctgctaccggcgcgcattccttcgaagaagttgctgccctcgagaaggaggtagcagctttggaaaaagaagtcgcagcccttgagaaagaagttgcggctctggagaagacgcgtgcctctacaaagggaccctccgtgtttcctctggctcccagcagcaagtctacaagcggaggaacagccgctctgggctgcctggtcaaggattactttcccgagcctgtgaccgtgtcctggaatagcggagcactgacaagcggcgtgcacacctttccagccgtgctgcaaagcagcggcctgtactctctgagcagcgtggtcacagtgcctagctctagcctgggcacccagacctacatctgcaatgtgaaccacaagcctagcaacaccaaggtggacaagagagtggaacccaagagctgtatccccgaggacacattcttcccaagccccgagagcagctgcgacgtgaagctggtggaaaagagcttcgagacagacaccaacctgaacttccagaacctgagcgtgatcggcttcagaatcctgctgctgaaagtggccggctttaacctgctgatgaccctgcggctgtggtccagc

SEQ ID NO: 21613 - DNA, 1974 bp, Artificial Sequence
  Synthetic Polynucleotide
atggccttaccagtgaccgccttgctcctgccgctggccttgctgctccacgccgccaggccgctgttcaatcaagaggtgcagatccctctgaccgagagctactgtggcccctgtcctaagaactggatctgctacaagaacaactgctaccagttcttcgacgagagcaagaattggtacgagagccaggccagctgcatgagccagaatgccagcctgctgaaggtgtacagcaaagaggaccaggacctgctgaaactggtcaagagcgcccactggatgggccttgtgcacatccccaccaatggctcttggcagtgggaggacggcagcattctgagccctaacctgctgaccatcatcgagatgcagaagggcgactgcgccctgtacgccagcagctttaagggcttcatcgagaattgcagcaccccgaacacctacatctgtatgcagagaaccgttctcgagggacagcctaaggccaatcctaccgtgacactgttccctccaagcagcgaagaactccaggccaacaaggccacacttgtgtgcctgatctccgacttctaccctggggctgtgacagtggcttggaaggccgatggatctcctgtgaaagccggcgtggaaaccaccaagccatccaagcagagcaacaacaaatacgccgccagctcctacctgagcctgacacctgagcagtggaagtcccacagatcctacagctgccaagtgacccacgaaggcagcaccgtggaaaagacagtggcccctacagagtgcagcggcagagccgattgcggctttaccagcgagagctaccagcagggcgtgctgagcgccaccatcctgtacgagatcctgctgggcaaggccaccctgtacgccgtgctggtgtctgccctggtgctgatggctatggtcaagcggaaggacagccggggaagggccaagcgatctggatctggagcaacaaacttctcactactcaaacaagcaggtgacgtggaggagaatcccgggcctactagtatggactggatttggcgcatccttttccttgtcggcgctgctaccggcgcgcattccttcgaagttcagttggtagagtctggaggcggagtggtacaaccggggcggtctcttagacttagttgcgcagcaagcggtttctctttctctggctatgggatgcactgggtgagacaggcccctgggaaaggactggagtgggtggcctacatttcatacgacgggagtaataaatactatgcagactccgttaagggcaggttcacgatctctcgggacaattccaagaatacattgtatcttcagatgaatagtctccgagctgaagacacggcggtttactactgcgctaaagacccggcctggggacttcgacttggagagagttctagctacgattttgacatttggggacaagggacaatggtcactgtctcaagtacgcgtgcctctacaaagggaccctccgtgtttcctctggctcccagcagcaagtctacaagcggaggaacagccgctctgggctgcctggtcaaggattactttcccgagcctgtgaccgtgtcctggaatagcggagcactgacaagcggcgtgcacacctttccagccgtgctgcaaagcagcggcctgtactctctgagcagcgtggtcacagtgcctagctctagcctgggcacccagacctacatctgcaatgtgaaccacaagcctagcaacaccaaggtggacaagagagtggaacccaagagctgtatccccgaggacacattcttcccaagccccgagagcagctgcgacgtgaagctggtggaaaagagcttcgagacagacaccaacctgaacttccagaacctgagcgtgatcggcttcagaatcctgctgctgaaagtggccggctttaacctgctgatgaccctgcggctgtggtccagc

SEQ ID NO: 21614 - DNA, 2001 bp, Artificial Sequence
  Synthetic Polynucleotide
atggccttaccagtgaccgccttgctcctgccgctggccttgctgctccacgccgccaggccgctgttcaatcaagaggtgcagatccctctgaccgagagctactgtggcccctgtcctaagaactggatctgctacaagaacaactgctaccagttcttcgacgagagcaagaattggtacgagagccaggccagctgcatgagccagaatgccagcctgctgaaggtgtacagcaaagaggaccaggacctgctgaaactggtcaagagcgcccactggatgggccttgtgcacatccccaccaatggctcttggcagtgggaggacggcagcattctgagccctaacctgctgaccatcatcgagatgcagaagggcgactgcgccctgtacgccagcagctttaagggcttcatcgagaattgcagcaccccgaacacctacatctgtatgcagagaaccgttctcgagggacagcctaaggccaatcctaccgtgacactgttccctccaagcagcgaagaactccaggccaacaaggccacacttgtgtgcctgatctccgacttctaccctggggctgtgacagtggcttggaaggccgatggatctcctgtgaaagccggcgtggaaaccaccaagccatccaagcagagcaacaacaaatacgccgccagctcctacctgagcctgacacctgagcagtggaagtcccacagatcctacagctgccaagtgacccacgaaggcagcaccgtggaaaagacagtggcccctacagagtgcagcggcagagccgattgcggctttaccagcgagagctaccagcagggcgtgctgagcgccaccatcctgtacgagatcctgctgggcaaggccaccctgtacgccgtgctggtgtctgccctggtgctgatggctatggtcaagcggaaggacagccggggaagggccaagcgatctggatctggagcaacaaacttctcactactcaaacaagcaggtgacgtggaggagaatcccgggcctactagtatggactggatttggcgcatccttttccttgtcggcgctgctaccggcgcgcattccttcgaactgttcaatcaagaggtgcagatccctctgaccgagagctactgtggcccctgtcctaagaactggatctgctacaagaacaactgctaccagttcttcgacgagagcaagaattggtacgagagccaggccagctgcatgagccagaatgccagcctgctgaaggtgtacagcaaagaggaccaggacctgctgaaactggtcaagagcgcccactggatgggccttgtgcacatccccaccaatggctcttggcagtgggaggacggcagcattctgagccctaacctgctgaccatcatcgagatgcagaagggcgactgcgccctgtacgccagcagctttaagggcttcatcgagaattgcagcaccccgaacacctacatctgtatgcagagaaccgttacgcgtgcctctacaaagggaccctccgtgtttcctctggctcccagcagcaagtctacaagcggaggaacagccgctctgggctgcctggtcaaggattactttcccgagcctgtgaccgtgtcctggaatagcggagcactgacaagcggcgtgcacacctttccagccgtgctgcaaagcagcggcctgtactctctgagcagcgtggtcacagtgcctagctctagcctgggcacccagacctacatctgcaatgtgaaccacaagcctagcaacaccaaggtggacaagagagtggaacccaagagctgtatccccgaggacacattcttcccaagccccgagagcagctgcgacgtgaagctggtggaaaagagcttcgagacagacaccaacctgaacttccagaacctgagcgtgatcggcttcagaatcctgctgctgaaagtggccggctttaacctgctgatgaccctgcggctgtggtccagc

SEQ ID NO: 21615 - DNA, 2145 bp, Artificial Sequence
  Synthetic Polynucleotide
atggccttaccagtgaccgccttgctcctgccgctggccttgctgctccacgccgccaggccgggcatgcggactgaagacctcccaaaggctgtggtgttcctggagcctcaatggtacagggtgctggagaaggacagtgtgactctgaagtgccagggagcctactcccctgaggacaattccacacagtggtttcacaatgagagcctcatctcaagccaggcctccagctacttcattgacgctgccacagtggacgacagtggagagtacaggtgccagacaaacctctccaccctcagtgacccggtgcagctagaagtccatatcggctggctgttgctccaggcccctcggtgggtgttcaaggaggaagaccctattcacctgaggtgtcacagctggaagaacactgctctgcataaggtcacatatttacagaatggcaaaggcaggaagtattttcatcataattctgacttctacattccaaaagccacactcaaagacagcggctcctacttctgcagggggcttgttgggagtaaaaatgtgtcttcagagactgtgaacatcaccatcactcaaggtttggcagtgtcaaccatctcatcattctttccacctggctaccaactcgagggacagcctaaggccaatcctaccgtgacactgttccctccaagcagcgaagaactccaggccaacaaggccacacttgtgtgcctgatctccgacttctaccctggggctgtgacagtggcttggaaggccgatggatctcctgtgaaagccggcgtggaaaccaccaagccatccaagcagagcaacaacaaatacgccgccagctcctacctgagcctgacacctgagcagtggaagtcccacagatcctacagctgccaagtgacccacgaaggcagcaccgtggaaaagacagtggcccctacagagtgcagcggcagagccgattgcggctttaccagcgagagctaccagcagggcgtgctgagcgccaccatcctgtacgagatcctgctgggcaaggccaccctgtacgccgtgctggtgtctgccctggtgctgatggctatggtcaagcggaaggacagccggggaagggccaagcgatctggatctggagcaacaaacttctcactactcaaacaagcaggtgacgtggaggagaatcccgggcctactagtatggactggatttggcgcatccttttccttgtcggcgctgctaccggcgcgcattccttcgaagttcagttggtagagtctggaggcggagtggtacaaccggggcggtctcttagacttagttgcgcagcaagcggtttctctttctctggctatgggatgcactgggtgagacaggcccctgggaaaggactggagtgggtggcctacatttcatacgacgggagtaataaatactatgcagactccgttaagggcaggttcacgatctctcgggacaattccaagaatacattgtatcttcagatgaatagtctccgagctgaagacacggcggtttactactgcgctaaagacccggcctggggacttcgacttggagagagttctagctacgattttgacatttggggacaagggacaatggtcactgtctcaagtacgcgtgcctctacaaagggaccctccgtgtttcctctggctcccagcagcaagtctacaagcggaggaacagccgctctgggctgcctggtcaaggattactttcccgagcctgtgaccgtgtcctggaatagcggagcactgacaagcggcgtgcacacctttccagccgtgctgcaaagcagcggcctgtactctctgagcagcgtggtcacagtgcctagctctagcctgggcacccagacctacatctgcaatgtgaaccacaagcctagcaacaccaaggtggacaagagagtggaacccaagagctgtatccccgaggacacattcttcccaagccccgagagcagctgcgacgtgaagctggtggaaaagagcttcgagacagacaccaacctgaacttccagaacctgagcgtgatcggcttcagaatcctgctgctgaaagtggccggctttaacctgctgatgaccctgcggctgtggtccagc

SEQ ID NO: 21616 - DNA, 2343 bp, Artificial Sequence
  Synthetic Polynucleotide
atggccttaccagtgaccgccttgctcctgccgctggccttgctgctccacgccgccaggccgggcatgcggactgaagacctcccaaaggctgtggtgttcctggagcctcaatggtacagggtgctggagaaggacagtgtgactctgaagtgccagggagcctactcccctgaggacaattccacacagtggtttcacaatgagagcctcatctcaagccaggcctccagctacttcattgacgctgccacagtggacgacagtggagagtacaggtgccagacaaacctctccaccctcagtgacccggtgcagctagaagtccatatcggctggctgttgctccaggcccctcggtgggtgttcaaggaggaagaccctattcacctgaggtgtcacagctggaagaacactgctctgcataaggtcacatatttacagaatggcaaaggcaggaagtattttcatcataattctgacttctacattccaaaagccacactcaaagacagcggctcctacttctgcagggggcttgttgggagtaaaaatgtgtcttcagagactgtgaacatcaccatcactcaaggtttggcagtgtcaaccatctcatcattctttccacctggctaccaactcgagggacagcctaaggccaatcctaccgtgacactgttccctccaagcagcgaagaactccaggccaacaaggccacacttgtgtgcctgatctccgacttctaccctggggctgtgacagtggcttggaaggccgatggatctcctgtgaaagccggcgtggaaaccaccaagccatccaagcagagcaacaacaaatacgccgccagctcctacctgagcctgacacctgagcagtggaagtcccacagatcctacagctgccaagtgacccacgaaggcagcaccgtggaaaagacagtggcccctacagagtgcagcggcagagccgattgcggctttaccagcgagagctaccagcagggcgtgctgagcgccaccatcctgtacgagatcctgctgggcaaggccaccctgtacgccgtgctggtgtctgccctggtgctgatggctatggtcaagcggaaggacagccggggaagggccaagcgatctggatctggagcaacaaacttctcactactcaaacaagcaggtgacgtggaggagaatcccgggcctactagtatggactggatttggcgcatccttttccttgtcggcgctgctaccggcgcgcattccttcgaaggcatgagaaccgaggacctgcctaaggccgtggtgttcctggaaccccagtggtacagagtgctggaaaaggacagcgtgaccctgaagtgccagggcgcctacagccccgaggacaatagcacccagtggttccacaacgagagcctgatctccagccaggccagcagctacttcatcgacgccgccaccgtggacgacagcggcgagtatagatgccagaccaacctgagcaccctgagcgaccccgtgcagctggaagtgcacatcggatggctgctgctgcaggcccccagatgggtgttcaaagaagaggaccccatccacctgagatgccactcttggaagaacaccgccctgcacaaagtgacctacctgcagaacggcaagggcagaaagtacttccaccacaacagcgacttctacatccccaaggccaccctgaaggactccggctcctacttctgcagaggcctcgtgggcagcaagaacgtgtccagcgagacagtgaacatcaccatcacccagggcctggccgtgtctaccatcagcagctttttcccacccggctaccagacgcgtgcctctacaaagggaccctccgtgtttcctctggctcccagcagcaagtctacaagcggaggaacagccgctctgggctgcctggtcaaggattactttcccgagcctgtgaccgtgtcctggaatagcggagcactgacaagcggcgtgcacacctttccagccgtgctgcaaagcagcggcctgtactctctgagcagcgtggtcacagtgcctagctctagcctgggcacccagacctacatctgcaatgtgaaccacaagcctagcaacaccaaggtggacaagagagtggaacccaagagctgtatccccgaggacacattcttcccaagccccgagagcagctgcgacgtgaagctggtggaaaagagcttcgagacagacaccaacctgaacttccagaacctgagcgtgatcggcttcagaatcctgctgctgaaagtggccggctttaacctgctgatgaccctgcggctgtggtccagc

SEQ ID NO: 21617 - DNA, 1788 bp, Artificial Sequence
  Synthetic Polynucleotide
atggccttaccagtgaccgccttgctcctgccgctggccttgctgctccacgccgccaggccgatggaccccgacctggaaatcagagccgccttcctgcggcagagaaacacagccctgagaacagaggtggccgagctggaacaagaggtgcagcggctggaaaacgaggtgtcccagtacgagacaagatacggccctctcggaggcggaaaactcgagggacagcctaaggccaatcctaccgtgacactgttccctccaagcagcgaagaactccaggccaacaaggccacacttgtgtgcctgatctccgacttctaccctggggctgtgacagtggcttggaaggccgatggatctcctgtgaaagccggcgtggaaaccaccaagccatccaagcagagcaacaacaaatacgccgccagctcctacctgagcctgacacctgagcagtggaagtcccacagatcctacagctgccaagtgacccacgaaggcagcaccgtggaaaagacagtggcccctacagagtgcagccccatcaagaccgatgtgattacaatggaccccaaggacaactgctccaaggacgccaacgataccctgctgctccagctgaccaacaccagcgcctactacatgtacttgttgctgctgctgaagtccgtggtgtacttcgccatcatcacatgctgcctgctgcggagaaccgccttctgctgcaacggcgagaagtctagggccaagcgatctggatctggagcaacaaacttctcactactcaaacaagcaggtgacgtggaggagaatcccgggcctactagtatggactggatttggcgcatccttttccttgtcggcgctgctaccggcgcgcattccttcgaagttcagttggtagagtctggaggcggagtggtacaaccggggcggtctcttagacttagttgcgcagcaagcggtttctctttctctggctatgggatgcactgggtgagacaggcccctgggaaaggactggagtgggtggcctacatttcatacgacgggagtaataaatactatgcagactccgttaagggcaggttcacgatctctcgggacaattccaagaatacattgtatcttcagatgaatagtctccgagctgaagacacggcggtttactactgcgctaaagacccggcctggggacttcgacttggagagagttctagctacgattttgacatttggggacaagggacaatggtcactgtctcaagtacgcgtgcctctacaaagggaccctccgtgtttcctctggctcccagcagcaagtctacaagcggaggaacagccgctctgggctgcctggtcaaggattactttcccgagcctgtgaccgtgtcctggaatagcggagcactgacaagcggcgtgcacacctttccagccgtgctgcaaagcagcggcctgtactctctgagcagcgtggtcacagtgcctagctctagcctgggcacccagacctacatctgcaatgtgaaccacaagcctagcaacaccaaggtggacaagagagtggaacccaagagctgtgaagtgaaaaccgactccaccgaccacgtgaagcccaaagagacagagaacaccaagcagcccagcaagagctgccacaagcccaaggccatcgtgcacaccgagaaagtgaacatgatgagcctgaccgtgctgggcctgcggatgctgttcgccaaaaccgtggccgtgaacttcctgctgaccgccaagctgttcttcctc

SEQ ID NO: 21618 - DNA, 1563 bp, Artificial Sequence
  Synthetic Polynucleotide
atggccttaccagtgaccgccttgctcctgccgctggccttgctgctccacgccgccaggccgatggaccccgacctggaaatcagagccgccttcctgcggcagagaaacacagccctgagaacagaggtggccgagctggaacaagaggtgcagcggctggaaaacgaggtgtcccagtacgagacaagatacggccctctcggaggcggaaaactcgagggacagcctaaggccaatcctaccgtgacactgttccctccaagcagcgaagaactccaggccaacaaggccacacttgtgtgcctgatctccgacttctaccctggggctgtgacagtggcttggaaggccgatggatctcctgtgaaagccggcgtggaaaccaccaagccatccaagcagagcaacaacaaatacgccgccagctcctacctgagcctgacacctgagcagtggaagtcccacagatcctacagctgccaagtgacccacgaaggcagcaccgtggaaaagacagtggcccctacagagtgcagccccatcaagaccgatgtgattacaatggaccccaaggacaactgctccaaggacgccaacgataccctgctgctccagctgaccaacaccagcgcctactacatgtacttgttgctgctgctgaagtccgtggtgtacttcgccatcatcacatgctgcctgctgcggagaaccgccttctgctgcaacggcgagaagtctagggccaagcgatctggatctggagcaacaaacttctcactactcaaacaagcaggtgacgtggaggagaatcccgggcctactagtatggactggatttggcgcatccttttccttgtcggcgctgctaccggcgcgcattccttcgaaatggaccccgacctggaaatcagagccgccttcctgcggcagagaaacacagccctgagaacagaggtggccgagctggaacaagaggtgcagcggctggaaaacgaggtgtcccagtacgagacaagatacggccctctcggaggcggaaaaacgcgtgcctctacaaagggaccctccgtgtttcctctggctcccagcagcaagtctacaagcggaggaacagccgctctgggctgcctggtcaaggattactttcccgagcctgtgaccgtgtcctggaatagcggagcactgacaagcggcgtgcacacctttccagccgtgctgcaaagcagcggcctgtactctctgagcagcgtggtcacagtgcctagctctagcctgggcacccagacctacatctgcaatgtgaaccacaagcctagcaacaccaaggtggacaagagagtggaacccaagagctgtgaagtgaaaaccgactccaccgaccacgtgaagcccaaagagacagagaacaccaagcagcccagcaagagctgccacaagcccaaggccatcgtgcacaccgagaaagtgaacatgatgagcctgaccgtgctgggcctgcggatgctgttcgccaaaaccgtggccgtgaacttcctgctgaccgccaagctgttcttcctc

SEQ ID NO: 21619 - DNA, 1494 bp, Artificial Sequence
  Synthetic Polynucleotide
atggccttaccagtgaccgccttgctcctgccgctggccttgctgctccacgccgccaggccggaagttgctgccctcgagaaggaggtagcagctttggaaaaagaagtcgcagcccttgagaaagaagttgcggctctggagaagctcgagggacagcctaaggccaatcctaccgtgacactgttccctccaagcagcgaagaactccaggccaacaaggccacacttgtgtgcctgatctccgacttctaccctggggctgtgacagtggcttggaaggccgatggatctcctgtgaaagccggcgtggaaaccaccaagccatccaagcagagcaacaacaaatacgccgccagctcctacctgagcctgacacctgagcagtggaagtcccacagatcctacagctgccaagtgacccacgaaggcagcaccgtggaaaagacagtggcccctacagagtgcagccccatcaagaccgatgtgattacaatggaccccaaggacaactgctccaaggacgccaacgataccctgctgctccagctgaccaacaccagcgcctactacatgtacttgttgctgctgctgaagtccgtggtgtacttcgccatcatcacatgctgcctgctgcggagaaccgccttctgctgcaacggcgagaagtctagggccaagcgatctggatctggagcaacaaacttctcactactcaaacaagcaggtgacgtggaggagaatcccgggcctactagtatggactggatttggcgcatccttttccttgtcggcgctgctaccggcgcgcattccttcgaaatggaccccgacctggaaatcagagccgccttcctgcggcagagaaacacagccctgagaacagaggtggccgagctggaacaagaggtgcagcggctggaaaacgaggtgtcccagtacgagacaagatacggccctctcggaggcggaaaaacgcgtgcctctacaaagggaccctccgtgtttcctctggctcccagcagcaagtctacaagcggaggaacagccgctctgggctgcctggtcaaggattactttcccgagcctgtgaccgtgtcctggaatagcggagcactgacaagcggcgtgcacacctttccagccgtgctgcaaagcagcggcctgtactctctgagcagcgtggtcacagtgcctagctctagcctgggcacccagacctacatctgcaatgtgaaccacaagcctagcaacaccaaggtggacaagagagtggaacccaagagctgtgaagtgaaaaccgactccaccgaccacgtgaagcccaaagagacagagaacaccaagcagcccagcaagagctgccacaagcccaaggccatcgtgcacaccgagaaagtgaacatgatgagcctgaccgtgctgggcctgcggatgctgttcgccaaaaccgtggccgtgaacttcctgctgaccgccaagctgttcttcctc

SEQ ID NO: 21620 - DNA, 1425 bp, Artificial Sequence
  Synthetic Polynucleotide
atggccttaccagtgaccgccttgctcctgccgctggccttgctgctccacgccgccaggccggaagttgctgccctcgagaaggaggtagcagctttggaaaaagaagtcgcagcccttgagaaagaagttgcggctctggagaagctcgagggacagcctaaggccaatcctaccgtgacactgttccctccaagcagcgaagaactccaggccaacaaggccacacttgtgtgcctgatctccgacttctaccctggggctgtgacagtggcttggaaggccgatggatctcctgtgaaagccggcgtggaaaccaccaagccatccaagcagagcaacaacaaatacgccgccagctcctacctgagcctgacacctgagcagtggaagtcccacagatcctacagctgccaagtgacccacgaaggcagcaccgtggaaaagacagtggcccctacagagtgcagccccatcaagaccgatgtgattacaatggaccccaaggacaactgctccaaggacgccaacgataccctgctgctccagctgaccaacaccagcgcctactacatgtacttgttgctgctgctgaagtccgtggtgtacttcgccatcatcacatgctgcctgctgcggagaaccgccttctgctgcaacggcgagaagtctagggccaagcgatctggatctggagcaacaaacttctcactactcaaacaagcaggtgacgtggaggagaatcccgggcctactagtatggactggatttggcgcatccttttccttgtcggcgctgctaccggcgcgcattccttcgaagaagttgctgccctcgagaaggaggtagcagctttggaaaaagaagtcgcagcccttgagaaagaagttgcggctctggagaagacgcgtgcctctacaaagggaccctccgtgtttcctctggctcccagcagcaagtctacaagcggaggaacagccgctctgggctgcctggtcaaggattactttcccgagcctgtgaccgtgtcctggaatagcggagcactgacaagcggcgtgcacacctttccagccgtgctgcaaagcagcggcctgtactctctgagcagcgtggtcacagtgcctagctctagcctgggcacccagacctacatctgcaatgtgaaccacaagcctagcaacaccaaggtggacaagagagtggaacccaagagctgtgaagtgaaaaccgactccaccgaccacgtgaagcccaaagagacagagaacaccaagcagcccagcaagagctgccacaagcccaaggccatcgtgcacaccgagaaagtgaacatgatgagcctgaccgtgctgggcctgcggatgctgttcgccaaaaccgtggccgtgaacttcctgctgaccgccaagctgttcttcctc

SEQ ID NO: 21621 - DNA, 2040 bp, Artificial Sequence
  Synthetic Polynucleotide
atggccttaccagtgaccgccttgctcctgccgctggccttgctgctccacgccgccaggccgctgttcaatcaagaggtgcagatccctctgaccgagagctactgtggcccctgtcctaagaactggatctgctacaagaacaactgctaccagttcttcgacgagagcaagaattggtacgagagccaggccagctgcatgagccagaatgccagcctgctgaaggtgtacagcaaagaggaccaggacctgctgaaactggtcaagagcgcccactggatgggccttgtgcacatccccaccaatggctcttggcagtgggaggacggcagcattctgagccctaacctgctgaccatcatcgagatgcagaagggcgactgcgccctgtacgccagcagctttaagggcttcatcgagaattgcagcaccccgaacacctacatctgtatgcagagaaccgttctcgagggacagcctaaggccaatcctaccgtgacactgttccctccaagcagcgaagaactccaggccaacaaggccacacttgtgtgcctgatctccgacttctaccctggggctgtgacagtggcttggaaggccgatggatctcctgtgaaagccggcgtggaaaccaccaagccatccaagcagagcaacaacaaatacgccgccagctcctacctgagcctgacacctgagcagtggaagtcccacagatcctacagctgccaagtgacccacgaaggcagcaccgtggaaaagacagtggcccctacagagtgcagccccatcaagaccgatgtgattacaatggaccccaaggacaactgctccaaggacgccaacgataccctgctgctccagctgaccaacaccagcgcctactacatgtacttgttgctgctgctgaagtccgtggtgtacttcgccatcatcacatgctgcctgctgcggagaaccgccttctgctgcaacggcgagaagtctagggccaagcgatctggatctggagcaacaaacttctcactactcaaacaagcaggtgacgtggaggagaatcccgggcctactagtatggactggatttggcgcatccttttccttgtcggcgctgctaccggcgcgcattccttcgaagttcagttggtagagtctggaggcggagtggtacaaccggggcggtctcttagacttagttgcgcagcaagcggtttctctttctctggctatgggatgcactgggtgagacaggcccctgggaaaggactggagtgggtggcctacatttcatacgacgggagtaataaatactatgcagactccgttaagggcaggttcacgatctctcgggacaattccaagaatacattgtatcttcagatgaatagtctccgagctgaagacacggcggtttactactgcgctaaagacccggcctggggacttcgacttggagagagttctagctacgattttgacatttggggacaagggacaatggtcactgtctcaagtacgcgtgcctctacaaagggaccctccgtgtttcctctggctcccagcagcaagtctacaagcggaggaacagccgctctgggctgcctggtcaaggattactttcccgagcctgtgaccgtgtcctggaatagcggagcactgacaagcggcgtgcacacctttccagccgtgctgcaaagcagcggcctgtactctctgagcagcgtggtcacagtgcctagctctagcctgggcacccagacctacatctgcaatgtgaaccacaagcctagcaacaccaaggtggacaagagagtggaacccaagagctgtgaagtgaaaaccgactccaccgaccacgtgaagcccaaagagacagagaacaccaagcagcccagcaagagctgccacaagcccaaggccatcgtgcacaccgagaaagtgaacatgatgagcctgaccgtgctgggcctgcggatgctgttcgccaaaaccgtggccgtgaacttcctgctgaccgccaagctgttcttcctc

SEQ ID NO: 21622 - DNA, 2067 bp, Artificial Sequence
  Synthetic Polynucleotide
atggccttaccagtgaccgccttgctcctgccgctggccttgctgctccacgccgccaggccgctgttcaatcaagaggtgcagatccctctgaccgagagctactgtggcccctgtcctaagaactggatctgctacaagaacaactgctaccagttcttcgacgagagcaagaattggtacgagagccaggccagctgcatgagccagaatgccagcctgctgaaggtgtacagcaaagaggaccaggacctgctgaaactggtcaagagcgcccactggatgggccttgtgcacatccccaccaatggctcttggcagtgggaggacggcagcattctgagccctaacctgctgaccatcatcgagatgcagaagggcgactgcgccctgtacgccagcagctttaagggcttcatcgagaattgcagcaccccgaacacctacatctgtatgcagagaaccgttctcgagggacagcctaaggccaatcctaccgtgacactgttccctccaagcagcgaagaactccaggccaacaaggccacacttgtgtgcctgatctccgacttctaccctggggctgtgacagtggcttggaaggccgatggatctcctgtgaaagccggcgtggaaaccaccaagccatccaagcagagcaacaacaaatacgccgccagctcctacctgagcctgacacctgagcagtggaagtcccacagatcctacagctgccaagtgacccacgaaggcagcaccgtggaaaagacagtggcccctacagagtgcagccccatcaagaccgatgtgattacaatggaccccaaggacaactgctccaaggacgccaacgataccctgctgctccagctgaccaacaccagcgcctactacatgtacttgttgctgctgctgaagtccgtggtgtacttcgccatcatcacatgctgcctgctgcggagaaccgccttctgctgcaacggcgagaagtctagggccaagcgatctggatctggagcaacaaacttctcactactcaaacaagcaggtgacgtggaggagaatcccgggcctactagtatggactggatttggcgcatccttttccttgtcggcgctgctaccggcgcgcattccttcgaactgttcaatcaagaggtgcagatccctctgaccgagagctactgtggcccctgtcctaagaactggatctgctacaagaacaactgctaccagttcttcgacgagagcaagaattggtacgagagccaggccagctgcatgagccagaatgccagcctgctgaaggtgtacagcaaagaggaccaggacctgctgaaactggtcaagagcgcccactggatgggccttgtgcacatccccaccaatggctcttggcagtgggaggacggcagcattctgagccctaacctgctgaccatcatcgagatgcagaagggcgactgcgccctgtacgccagcagctttaagggcttcatcgagaattgcagcaccccgaacacctacatctgtatgcagagaaccgttacgcgtgcctctacaaagggaccctccgtgtttcctctggctcccagcagcaagtctacaagcggaggaacagccgctctgggctgcctggtcaaggattactttcccgagcctgtgaccgtgtcctggaatagcggagcactgacaagcggcgtgcacacctttccagccgtgctgcaaagcagcggcctgtactctctgagcagcgtggtcacagtgcctagctctagcctgggcacccagacctacatctgcaatgtgaaccacaagcctagcaacaccaaggtggacaagagagtggaacccaagagctgtgaagtgaaaaccgactccaccgaccacgtgaagcccaaagagacagagaacaccaagcagcccagcaagagctgccacaagcccaaggccatcgtgcacaccgagaaagtgaacatgatgagcctgaccgtgctgggcctgcggatgctgttcgccaaaaccgtggccgtgaacttcctgctgaccgccaagctgttcttcctc

SEQ ID NO: 21623 - DNA, 2211 bp, Artificial Sequence
  Synthetic Polynucleotide
atggccttaccagtgaccgccttgctcctgccgctggccttgctgctccacgccgccaggccgggcatgcggactgaagacctcccaaaggctgtggtgttcctggagcctcaatggtacagggtgctggagaaggacagtgtgactctgaagtgccagggagcctactcccctgaggacaattccacacagtggtttcacaatgagagcctcatctcaagccaggcctccagctacttcattgacgctgccacagtggacgacagtggagagtacaggtgccagacaaacctctccaccctcagtgacccggtgcagctagaagtccatatcggctggctgttgctccaggcccctcggtgggtgttcaaggaggaagaccctattcacctgaggtgtcacagctggaagaacactgctctgcataaggtcacatatttacagaatggcaaaggcaggaagtattttcatcataattctgacttctacattccaaaagccacactcaaagacagcggctcctacttctgcagggggcttgttgggagtaaaaatgtgtcttcagagactgtgaacatcaccatcactcaaggtttggcagtgtcaaccatctcatcattctttccacctggctaccaactcgagggacagcctaaggccaatcctaccgtgacactgttccctccaagcagcgaagaactccaggccaacaaggccacacttgtgtgcctgatctccgacttctaccctggggctgtgacagtggcttggaaggccgatggatctcctgtgaaagccggcgtggaaaccaccaagccatccaagcagagcaacaacaaatacgccgccagctcctacctgagcctgacacctgagcagtggaagtcccacagatcctacagctgccaagtgacccacgaaggcagcaccgtggaaaagacagtggcccctacagagtgcagccccatcaagaccgatgtgattacaatggaccccaaggacaactgctccaaggacgccaacgataccctgctgctccagctgaccaacaccagcgcctactacatgtacttgttgctgctgctgaagtccgtggtgtacttcgccatcatcacatgctgcctgctgcggagaaccgccttctgctgcaacggcgagaagtctagggccaagcgatctggatctggagcaacaaacttctcactactcaaacaagcaggtgacgtggaggagaatcccgggcctactagtatggactggatttggcgcatccttttccttgtcggcgctgctaccggcgcgcattccttcgaagttcagttggtagagtctggaggcggagtggtacaaccggggcggtctcttagacttagttgcgcagcaagcggtttctctttctctggctatgggatgcactgggtgagacaggcccctgggaaaggactggagtgggtggcctacatttcatacgacgggagtaataaatactatgcagactccgttaagggcaggttcacgatctctcgggacaattccaagaatacattgtatcttcagatgaatagtctccgagctgaagacacggcggtttactactgcgctaaagacccggcctggggacttcgacttggagagagttctagctacgattttgacatttggggacaagggacaatggtcactgtctcaagtacgcgtgcctctacaaagggaccctccgtgtttcctctggctcccagcagcaagtctacaagcggaggaacagccgctctgggctgcctggtcaaggattactttcccgagcctgtgaccgtgtcctggaatagcggagcactgacaagcggcgtgcacacctttccagccgtgctgcaaagcagcggcctgtactctctgagcagcgtggtcacagtgcctagctctagcctgggcacccagacctacatctgcaatgtgaaccacaagcctagcaacaccaaggtggacaagagagtggaacccaagagctgtgaagtgaaaaccgactccaccgaccacgtgaagcccaaagagacagagaacaccaagcagcccagcaagagctgccacaagcccaaggccatcgtgcacaccgagaaagtgaacatgatgagcctgaccgtgctgggcctgcggatgctgttcgccaaaaccgtggccgtgaacttcctgctgaccgccaagctgttcttcctc

SEQ ID NO: 21624 - DNA, 2409 bp, Artificial Sequence
  Synthetic Polynucleotide
atggccttaccagtgaccgccttgctcctgccgctggccttgctgctccacgccgccaggccgggcatgcggactgaagacctcccaaaggctgtggtgttcctggagcctcaatggtacagggtgctggagaaggacagtgtgactctgaagtgccagggagcctactcccctgaggacaattccacacagtggtttcacaatgagagcctcatctcaagccaggcctccagctacttcattgacgctgccacagtggacgacagtggagagtacaggtgccagacaaacctctccaccctcagtgacccggtgcagctagaagtccatatcggctggctgttgctccaggcccctcggtgggtgttcaaggaggaagaccctattcacctgaggtgtcacagctggaagaacactgctctgcataaggtcacatatttacagaatggcaaaggcaggaagtattttcatcataattctgacttctacattccaaaagccacactcaaagacagcggctcctacttctgcagggggcttgttgggagtaaaaatgtgtcttcagagactgtgaacatcaccatcactcaaggtttggcagtgtcaaccatctcatcattctttccacctggctaccaactcgagggacagcctaaggccaatcctaccgtgacactgttccctccaagcagcgaagaactccaggccaacaaggccacacttgtgtgcctgatctccgacttctaccctggggctgtgacagtggcttggaaggccgatggatctcctgtgaaagccggcgtggaaaccaccaagccatccaagcagagcaacaacaaatacgccgccagctcctacctgagcctgacacctgagcagtggaagtcccacagatcctacagctgccaagtgacccacgaaggcagcaccgtggaaaagacagtggcccctacagagtgcagccccatcaagaccgatgtgattacaatggaccccaaggacaactgctccaaggacgccaacgataccctgctgctccagctgaccaacaccagcgcctactacatgtacttgttgctgctgctgaagtccgtggtgtacttcgccatcatcacatgctgcctgctgcggagaaccgccttctgctgcaacggcgagaagtctagggccaagcgatctggatctggagcaacaaacttctcactactcaaacaagcaggtgacgtggaggagaatcccgggcctactagtatggactggatttggcgcatccttttccttgtcggcgctgctaccggcgcgcattccttcgaaggcatgagaaccgaggacctgcctaaggccgtggtgttcctggaaccccagtggtacagagtgctggaaaaggacagcgtgaccctgaagtgccagggcgcctacagccccgaggacaatagcacccagtggttccacaacgagagcctgatctccagccaggccagcagctacttcatcgacgccgccaccgtggacgacagcggcgagtatagatgccagaccaacctgagcaccctgagcgaccccgtgcagctggaagtgcacatcggatggctgctgctgcaggcccccagatgggtgttcaaagaagaggaccccatccacctgagatgccactcttggaagaacaccgccctgcacaaagtgacctacctgcagaacggcaagggcagaaagtacttccaccacaacagcgacttctacatccccaaggccaccctgaaggactccggctcctacttctgcagaggcctcgtgggcagcaagaacgtgtccagcgagacagtgaacatcaccatcacccagggcctggccgtgtctaccatcagcagctttttcccacccggctaccagacgcgtgcctctacaaagggaccctccgtgtttcctctggctcccagcagcaagtctacaagcggaggaacagccgctctgggctgcctggtcaaggattactttcccgagcctgtgaccgtgtcctggaatagcggagcactgacaagcggcgtgcacacctttccagccgtgctgcaaagcagcggcctgtactctctgagcagcgtggtcacagtgcctagctctagcctgggcacccagacctacatctgcaatgtgaaccacaagcctagcaacaccaaggtggacaagagagtggaacccaagagctgtgaagtgaaaaccgactccaccgaccacgtgaagcccaaagagacagagaacaccaagcagcccagcaagagctgccacaagcccaaggccatcgtgcacaccgagaaagtgaacatgatgagcctgaccgtgctgggcctgcggatgctgttcgccaaaaccgtggccgtgaacttcctgctgaccgccaagctgttcttcctc

SEQ ID NO: 21625 - skipped

SEQ ID NO: 21626 - DNA, 2592 bp, Artificial Sequence
  Synthetic Polynucleotide
atggccttaccagtgaccgccttgctcctgccgctggccttgctgctccacgccgccaggccgcagctccagctgcaagagtctggacctggcctggtcaagcctagcgagacactgagcctgacctgtaccgtgtccggcgatagcatcagcagcggcgattactactggggctggatcagacagcctcctggcaaaggactggaatggatcggccacatctactacagcggcgtgacctactacaaccccagcctgaagtccagagtgaccatcagcgtggacaccagccggaaccagttctccctgaagctgtctagcgtgacagccgccgataccgccgtgtactactgcaccagagaggacagcagcaactggcggagtagaggccagggaacactggtcacagttagctctctcgagatccagaaccctgatcctgccgtgtaccagctgcgggatagcaagagcagcgacaagagcgtgtgtctgttcaccgacttcgacagccagaccaacgtgtcccagagcaaggactccgacgtgtacatcaccgataagtgcgtgctggacatgcggagcatggacttcaagagcaactccgccgtggcctggtccaacaagtccgatttcgcctgcgccaacgccttcaacaacagcattatccccgaggacacattcttcccaagcagcgacgtgccctgcgacgtgaagctggtggaaaagagcttcgagacagacaccaacctgaacttccagaacctgagcgtgatcggcttcagaatcctgctgctgaaagtggccggctttaacctgctgatgaccctgcggctgtggtccagccgcgccaagagaagcggatctggcgtgaagcagaccctgaatttcgacctgctgaagctggctggcgacgtggaatccaacccaggccctactagtatggactggatttggcgcatccttttccttgtcggcgctgctaccggcgcccattccgggccccaggttcagctgcaagagtctggcggaggacttgctcaagctggcggaagcctgagactgtcttgtgccgcctctggcagaaccttcagcatgggctggtttagacaggcccctggcaaagagagagagttcgtcgccgccatcacatacagcggcggcagcccttactacgcctcttctgtcagaggccggttcaccatcagccgggacaacgccaagaacaccgtgtacctccagatgaacagcctgaagccagaggacaccgccgtgtactactgtgccgccaatccaacctacggcagcgactggaatgccgagaattggggccagggcacccaagtgacagtgtctagtacgcgtgaggacctgaagaacgtgttcccacctgaggtggccgtgttcgagcctagcaaggccgagatcgcccacacccagaaagccaccctcgtgtgcctggctaccggcttctaccccgaccatgtggaactgtcttggtgggtcaacggcaaagaggtgcacagcggcgtgtgtaccgacccccagccactgaaagaacagcccgccctgaacgacagccggtactgcctgagcagcagactgagagtgtccgccaccttctggcagaacccccggaaccacttcagatgccaggtgcagttctacggcctgagcgagaacgacgagtggacccaggacagagccaagcccgtgacccagatcgtgtctgccgaagcctggggcagagccgattgcggcatcaccagcgccagctaccaccagggcgtgctgagcgccaccatcctgtacgagatcctgctgggcaaggccaccctgtacgccgtgctggtgtctgccctggtgctgatggctatggtcaagcggaaggacagccggggaagggccaagcgatctggatctggagcaacaaacttctcactactcaaacaagcaggtgacgtggaggagaatcccgggccttctagaggccatatgaccgagtacaagcccacggtgcgcctcgccacccgcgacgacgtccccagggccgtacgcaccctcgccgccgcgttcgccgactaccccgccacgcgccacaccgtcgatccggaccgccacatcgagcgggtcaccgagctgcaagaactcttcctcacgcgcgtcgggctcgacatcggcaaggtgtgggtcgcggacgacggcgccgcggtggcggtctggaccacgccggagagcgtcgaagcgggggcggtgttcgccgagatcggcccgcgcatggccgagttgagcggttcccggctggccgcgcagcaacagatggaaggcctcctggcgccgcaccggcccaaggagcccgcgtggttcctggccaccgtcggcgtctcgcccgaccaccagggcaagggtctgggcagcgccgtcgtgctccccggagtggaggcggccgagcgcgccggggtgcccgccttcctggagacctccgcgccccgcaacctccccttctacgagcggctcggcttcaccgtcaccgccgacgtcgaggtgcccgaaggaccgcgcacctggtgcatgacccgcaagcccggtgcctga

SEQ ID NO: 21627 - DNA, 3351 bp, Artificial Sequence
  Synthetic Polynucleotide
atggccttaccagtgaccgccttgctcctgccgctggccttgctgctccacgccgccaggccggacatccagatgacacagagccctagcagcctgtctgccagcgtgggagacagagtgaccatcacatgcaaggccagcgaccacatcaacaactggctggcctggtatcagcagaagcctggacaggcccctaagctgctgatctacggcgctaccacactggaaacaggcgtgcccagcagattttctggcagcggctctggcaccgactacaccctgacaatatccagcctccagcctgaggacttcgccacctactactgtcagcagagctggaacaccccttggacattcggccagggcaccaagctggaaatcaagagaggcggaggcggaagtggaggcggaggatctggcggcggaggctctcaagttcagcttcaacagcctggcgctgagctggtcaaacctggcgcttctgtgaagatgagctgcaaagccagcggctacgccttcagcagctactggatcaactggatgaagcagaaacccggccagggactcgaatggatcggccaaatctatcccggcgacggcgacaccaactacaacggcaagttcaagggcagagccacactgaccgccgatacctctagcagcacagcctacatgcagctgagcagcctgaccagcgaagatagcgccgtgtacttctgtgcccggtccatcacaacagtcgtgggctgcgctatggactattggggccagggaacaagcgtgaccgtgtctagtctcgagatccagaaccctgatcctgccgtgtaccagctgcgggatagcaagagcagcgacaagagcgtgtgtctgttcaccgacttcgacagccagaccaacgtgtcccagagcaaggactccgacgtgtacatcaccgataagtgcgtgctggacatgcggagcatggacttcaagagcaactccgccgtggcctggtccaacaagtccgatttcgcctgcgccaacgccttcaacaacagcattatccccgaggacacattcttcccaagcagcgacgtgccctgcgacgtgaagctggtggaaaagagcttcgagacagacaccaacctgaacttccagaacctgagcgtgatcggcttcagaatcctgctgctgaaagtggccggctttaacctgctgatgaccctgcggctgtggtccagccgcgccaagagaagcggatctggcgtgaagcagaccctgaatttcgacctgctgaagctggctggcgacgtggaatccaacccaggccctactagtatggactggatttggcgcatccttttccttgtcggcgctgctaccggcgcccattccttcgaagacgagatcgtgctgacacagagccctgccaccctgtctctgagccctggcgaaagagccaccctgagctgtagagccagccagagcgtgtccagctacctggcctggtatcagcagaagcccggccaggctccccggctgctgatctacgatgccagcaatagagccaccggcatccccgccagattttccggctctggcagcggcaccgacttcaccctgaccatcagctccctggaacccgaggacttcgccgtgtactactgccagcagcggagcaactggcccatcacattcggccagggcacccggctggaaatcaaaggcggaggcggaagtggaggcggaggatctggcggcggaggctctgaggtgcagcttgttgagtctggcggaggactggtgcagcccgatagaagcctgagactgtcttgtgccgccagcggcttcaccttccacgattatgccatgcactgggtccgacaggcccctggcaaaggacttgaatgggtgtccaccatctcttggaacagcggcacaatcggctacgccgactctgtgaagggcagattcaccatcagccgggacaacgccaagaacagcctgtacctccagatgaactccctgagagccgaggacacagccctgtactactgcgccaaggacatccagtacggcaactactactacggcatggacgtgtggggccagggcacaacagtgacagtctcttctacgcgtgaggacctgaagaacgtgttcccacctgaggtggccgtgttcgagcctagcaaggccgagatcgcccacacccagaaagccaccctcgtgtgcctggctaccggcttctaccccgaccatgtggaactgtcttggtgggtcaacggcaaagaggtgcacagcggcgtgtgtaccgacccccagccactgaaagaacagcccgccctgaacgacagccggtactgcctgagcagcagactgagagtgtccgccaccttctggcagaacccccggaaccacttcagatgccaggtgcagttctacggcctgagcgagaacgacgagtggacccaggacagagccaagcccgtgacccagatcgtgtctgccgaagcctggggcagagccgattgcggcatcaccagcgccagctaccaccagggcgtgctgagcgccaccatcctgtacgagatcctgctgggcaaggccaccctgtacgccgtgctggtgtctgccctggtgctgatggctatggtcaagcggaaggacagccggggaagggccaagcgatctggatctggagcaacaaacttctcactactcaaacaagcaggtgacgtggaggagaatcccgggccttctagaggccatatgaccgagtacaagcccacggtgcgcctcgccacccgcgacgacgtccccagggccgtacgcaccctcgccgccgcgttcgccgactaccccgccacgcgccacaccgtcgatccggaccgccacatcgagcgggtcaccgagctgcaagaactcttcctcacgcgcgtcgggctcgacatcggcaaggtgtgggtcgcggacgacggcgccgcggtggcggtctggaccacgccggagagcgtcgaagcgggggcggtgttcgccgagatcggcccgcgcatggccgagttgagcggttcccggctggccgcgcagcaacagatggaaggcctcctggcgccgcaccggcccaaggagcccgcgtggttcctggccaccgtcggcgtctcgcccgaccaccagggcaagggtctgggcagcgccgtcgtgctccccggagtggaggcggccgagcgcgccggggtgcccgccttcctggagacctccgcgccccgcaacctccccttctacgagcggctcggcttcaccgtcaccgccgacgtcgaggtgcccgaaggaccgcgcacctggtgcatgacccgcaagcccggtgcctga

SEQ ID NO: 21628 - DNA, 2769 bp, Artificial Sequence
  Synthetic Polynucleotide
atggccttaccagtgaccgccttgctcctgccgctggccttgctgctccacgccgccaggccggacatccagatgacacagagccctagcagcctgtctgccagcgtgggagacagagtgaccatcacatgcaaggccagcgaccacatcaacaactggctggcctggtatcagcagaagcctggacaggcccctaagctgctgatctacggcgctaccacactggaaacaggcgtgcccagcagattttctggcagcggctctggcaccgactacaccctgacaatatccagcctccagcctgaggacttcgccacctactactgtcagcagagctggaacaccccttggacattcggccagggcaccaagctggaaatcaagagaggcggaggcggaagtggaggcggaggatctggcggcggaggctctcaagttcagcttcaacagcctggcgctgagctggtcaaacctggcgcttctgtgaagatgagctgcaaagccagcggctacgccttcagcagctactggatcaactggatgaagcagaaacccggccagggactcgaatggatcggccaaatctatcccggcgacggcgacaccaactacaacggcaagttcaagggcagagccacactgaccgccgatacctctagcagcacagcctacatgcagctgagcagcctgaccagcgaagatagcgccgtgtacttctgtgcccggtccatcacaacagtcgtgggctgcgctatggactattggggccagggaacaagcgtgaccgtgtctagtctcgagatccagaaccctgatcctgccgtgtaccagctgcgggatagcaagagcagcgacaagagcgtgtgtctgttcaccgacttcgacagccagaccaacgtgtcccagagcaaggactccgacgtgtacatcaccgataagtgcgtgctggacatgcggagcatggacttcaagagcaactccgccgtggcctggtccaacaagtccgatttcgcctgcgccaacgccttcaacaacagcattatccccgaggacacattcttcccaagcagcgacgtgccctgcgacgtgaagctggtggaaaagagcttcgagacagacaccaacctgaacttccagaacctgagcgtgatcggcttcagaatcctgctgctgaaagtggccggctttaacctgctgatgaccctgcggctgtggtccagccgcgccaagagaagcggatctggcgtgaagcagaccctgaatttcgacctgctgaagctggctggcgacgtggaatccaacccaggccctactagtatggactggatttggcgcatccttttccttgtcggcgctgctaccggcgcccattccttcgaaatggaccccgacctggaaatcagagccgccttcctgcggcagagaaacacagccctgagaacagaggtggccgagctggaacaagaggtgcagcggctggaaaacgaggtgtcccagtacgagacaagatacggccctctcggaggcggaaaaacgcgtgaggacctgaagaacgtgttcccacctgaggtggccgtgttcgagcctagcaaggccgagatcgcccacacccagaaagccaccctcgtgtgcctggctaccggcttctaccccgaccatgtggaactgtcttggtgggtcaacggcaaagaggtgcacagcggcgtgtgtaccgacccccagccactgaaagaacagcccgccctgaacgacagccggtactgcctgagcagcagactgagagtgtccgccaccttctggcagaacccccggaaccacttcagatgccaggtgcagttctacggcctgagcgagaacgacgagtggacccaggacagagccaagcccgtgacccagatcgtgtctgccgaagcctggggcagagccgattgcggcatcaccagcgccagctaccaccagggcgtgctgagcgccaccatcctgtacgagatcctgctgggcaaggccaccctgtacgccgtgctggtgtctgccctggtgctgatggctatggtcaagcggaaggacagccggggaagggccaagcgatctggatctggagcaacaaacttctcactactcaaacaagcaggtgacgtggaggagaatcccgggccttctagaggccatatgaccgagtacaagcccacggtgcgcctcgccacccgcgacgacgtccccagggccgtacgcaccctcgccgccgcgttcgccgactaccccgccacgcgccacaccgtcgatccggaccgccacatcgagcgggtcaccgagctgcaagaactcttcctcacgcgcgtcgggctcgacatcggcaaggtgtgggtcgcggacgacggcgccgcggtggcggtctggaccacgccggagagcgtcgaagcgggggcggtgttcgccgagatcggcccgcgcatggccgagttgagcggttcccggctggccgcgcagcaacagatggaaggcctcctggcgccgcaccggcccaaggagcccgcgtggttcctggccaccgtcggcgtctcgcccgaccaccagggcaagggtctgggcagcgccgtcgtgctccccggagtggaggcggccgagcgcgccggggtgcccgccttcctggagacctccgcgccccgcaacctccccttctacgagcggctcggcttcaccgtcaccgccgacgtcgaggtgcccgaaggaccgcgcacctggtgcatgacccgcaagcccggtgcctga

SEQ ID NO: 21629 - DNA, 2193 bp, Artificial Sequence
  Synthetic Polynucleotide
atggccttaccagtgaccgccttgctcctgccgctggccttgctgctccacgccgccaggccggaagtgcagctggttgaatctggcggaggactggttcagcctggcggatctctgagactgtcttgtgccgcctctggcttcgccagcgactactatatcatcggctggttcagacaggcccctggcaaagagagagagggcgtcagctgtatcagcagcagatacgccaacaccaactacgccgacagcgtgaagggcagattcaccatcagccgggacaacgccaagaacaccgtgtacctccagatgaacagcctgaagcctgaggacaccgccgtgtactactgtgccgccgacaccagaagatacacctgtcctgacattgccaccatgcaccggaacttcgattcttggggccagggcacactggtcaccgtttcttctggcggaggaagcggcggaggatctgaagtgcaactggtggaatctggaggctctctggtgcagccagggggaagcctgagactgtcttgtgccgcttccggcttcaccttcgacgactacgccatgagctgggtgcgccaggtgccaggcaaaggcctggaatgggtgtccagcatcaactggagcggcacccacaccgattacgccgactccgtgaaaggcagattcacaatcagcagaaacaacgccaacaataccctgtacctgcagatgaactccctgaagtctgaggatacagcagtgtattattgcgccaagaactggcgggacgccggcaccacttggtttgagaaaagcggctctgccggacagggaacccaagtgacagtgtcctccggtaccggcggaggcggatctggcggcggaggtagcggtggcggaggatctgaattcgacatccagatgacacagagccctagcagcctgtctgccagcgtgggagacagagtgaccatcacatgcaaggccagcgaccacatcaacaactggctggcctggtatcagcagaagcctggacaggcccctaagctgctgatctacggcgctaccacactggaaacaggcgtgcccagcagattttctggcagcggctctggcaccgactacaccctgacaatatccagcctccagcctgaggacttcgccacctactactgtcagcagagctggaacaccccttggacattcggccagggcaccaagctggaaatcaagagaggcggaggcggaagtggaggcggaggatctggcggcggaggctctcaagttcagcttcaacagcctggcgctgagctggtcaaacctggcgcttctgtgaagatgagctgcaaagccagcggctacgccttcagcagctactggatcaactggatgaagcagaaacccggccagggactcgaatggatcggccaaatctatcccggcgacggcgacaccaactacaacggcaagttcaagggcagagccacactgaccgccgatacctctagcagcacagcctacatgcagctgagcagcctgaccagcgaagatagcgccgtgtacttctgtgcccggtccatcacaacagtcgtgggctgcgctatggactattggggccagggaacaagcgtgaccgtgtctagtacgcgtgacggtaacgaggagatgggaggaatcactcaaaccccttacaaagtctcaatttcaggaacaactgttatccttacatgtccccagtatcctggcagcgagatcctttggcagcataacgacaagaatatagggggagatgaagacgataagaatatcggatctgacgaggatcacttgagcctgaaagagttctccgagcttgaacaaagcggatattatgtgtgctatccgcgcgggtcaaagccggaagacgctaacttttacctttatctccgagccagagtgtgcgaaaattgcatggaaatggacgttatgtccgttgctacaatagttatcgtagatatatgcatcacgggtggactgcttctgctggtttattattggtccaagaatagaaaggccaaagctaaacccgtgaccagaggcgctggcgcaggcggaaggcaaaggggacaaaacaaagaacggccaccaccagtgccaaatccagattatgagcctattcggaaaggacagagggacctgtactctggcctgaatcagagaagaatc

SEQ ID NO: 21630 - DNA, 2349 bp, Artificial Sequence
  Synthetic Polynucleotide
atggccttaccagtgaccgccttgctcctgccgctggccttgctgctccacgccgccaggccggaagtgcagctggttgaatctggcggaggactggttcagcctggcggatctctgagactgtcttgtgccgcctctggcttcgccagcgactactatatcatcggctggttcagacaggcccctggcaaagagagagagggcgtcagctgtatcagcagcagatacgccaacaccaactacgccgacagcgtgaagggcagattcaccatcagccgggacaacgccaagaacaccgtgtacctccagatgaacagcctgaagcctgaggacaccgccgtgtactactgtgccgccgacaccagaagatacacctgtcctgacattgccaccatgcaccggaacttcgattcttggggccagggcacactggtcaccgtttcttctggcggaggaagcggcggaggatctgaagtgcaactggtggaatctggaggctctctggtgcagccagggggaagcctgagactgtcttgtgccgcttccggcttcaccttcgacgactacgccatgagctgggtgcgccaggtgccaggcaaaggcctggaatgggtgtccagcatcaactggagcggcacccacaccgattacgccgactccgtgaaaggcagattcacaatcagcagaaacaacgccaacaataccctgtacctgcagatgaactccctgaagtctgaggatacagcagtgtattattgcgccaagaactggcgggacgccggcaccacttggtttgagaaaagcggctctgccggacagggaacccaagtgacagtgtcctccggtaccggcggaggcggatctggcggcggaggtagcggtggcggaggatctgaattcgacatccagatgacacagagccctagcagcctgtctgccagcgtgggagacagagtgaccatcacatgcaaggccagcgaccacatcaacaactggctggcctggtatcagcagaagcctggacaggcccctaagctgctgatctacggcgctaccacactggaaacaggcgtgcccagcagattttctggcagcggctctggcaccgactacaccctgacaatatccagcctccagcctgaggacttcgccacctactactgtcagcagagctggaacaccccttggacattcggccagggcaccaagctggaaatcaagagaggcggaggcggaagtggaggcggaggatctggcggcggaggctctcaagttcagcttcaacagcctggcgctgagctggtcaaacctggcgcttctgtgaagatgagctgcaaagccagcggctacgccttcagcagctactggatcaactggatgaagcagaaacccggccagggactcgaatggatcggccaaatctatcccggcgacggcgacaccaactacaacggcaagttcaagggcagagccacactgaccgccgatacctctagcagcacagcctacatgcagctgagcagcctgaccagcgaagatagcgccgtgtacttctgtgcccggtccatcacaacagtcgtgggctgcgctatggactattggggccagggaacaagcgtgaccgtgtctagtacgcgtgagcagaaactgatctcggaagaggatctggcgaagcccaccacgacgccagcgccgcgaccaccaacaccggcgcccaccatcgcgtcgcagcccctgtccctgcgcccagaggcgtgccggccagcggcggggggcgcagtgcacacgagggggctggacttcgcctgtgacatctacatctgggcgcccttggccgggacttgtggggtccttctcctgtcactggttatcaccctttactgcaaacggggcagaaagaaactcctgtatatattcaaacaaccatttatgagaccagtacaaactactcaagaggaagatggctgtagctgccgatttccagaagaagaagaaggaggatgtgaactgagagtgaagttcagcaggagcgcagacgcccccgcgtaccagcagggccagaaccagctctataacgagctgaatctaggacgaagagaggagtacgatgttttggacaagagacgtggccgggaccctgagatggggggaaagccgagaaggaagaaccctcaggaaggcctgtacaatgaactgcagaaagataagatggcggaggcctacagtgagattgggatgaaaggcgagcgccggaggggcaaggggcacgatggcctttaccagggtctcagtacagccaccaaggacacctacgacgcccttcacatgcaggccctgccccctcgctga

SEQ ID NO: 21631 - DNA, 3144 bp, Artificial Sequence
  Synthetic Polynucleotide
atggccttaccagtgaccgccttgctcctgccgctggccttgctgctccacgccgccaggccggaagtgcagctggttgaatctggcggaggactggttcagcctggcggatctctgagactgtcttgtgccgcctctggcttcgccagcgactactatatcatcggctggttcagacaggcccctggcaaagagagagagggcgtcagctgtatcagcagcagatacgccaacaccaactacgccgacagcgtgaagggcagattcaccatcagccgggacaacgccaagaacaccgtgtacctccagatgaacagcctgaagcctgaggacaccgccgtgtactactgtgccgccgacaccagaagatacacctgtcctgacattgccaccatgcaccggaacttcgattcttggggccagggcacactggtcaccgtttcttctggcggaggaagcggcggaggatctgaagtgcaactggtggaatctggaggctctctggtgcagccagggggaagcctgagactgtcttgtgccgcttccggcttcaccttcgacgactacgccatgagctgggtgcgccaggtgccaggcaaaggcctggaatgggtgtccagcatcaactggagcggcacccacaccgattacgccgactccgtgaaaggcagattcacaatcagcagaaacaacgccaacaataccctgtacctgcagatgaactccctgaagtctgaggatacagcagtgtattattgcgccaagaactggcgggacgccggcaccacttggtttgagaaaagcggctctgccggacagggaacccaagtgacagtgtcctccggtaccggcggaggcggatctggcggcggaggtagcggtggcggaggatctgaattcgacatccagatgacacagagccctagcagcctgtctgccagcgtgggagacagagtgaccatcacatgcaaggccagcgaccacatcaacaactggctggcctggtatcagcagaagcctggacaggcccctaagctgctgatctacggcgctaccacactggaaacaggcgtgcccagcagattttctggcagcggctctggcaccgactacaccctgacaatatccagcctccagcctgaggacttcgccacctactactgtcagcagagctggaacaccccttggacattcggccagggcaccaagctggaaatcaagagactcgaggacctgaagaacgtgttcccacctgaggtggccgtgttcgagcctagcgaggccgagatcagccacacccagaaagccaccctcgtgtgcctggctaccggcttctaccccgaccatgtggaactgtcttggtgggtcaacggcaaagaggtgcacagcggcgtgtgtaccgacccccagccactgaaagaacagcccgccctgaacgacagccggtactgcctgagcagcagactgagagtgtccgccaccttctggcagaacccccggaaccacttcagatgccaggtgcagttctacggcctgagcgagaacgacgagtggacccaggacagagccaagcccgtgacccagatcgtgtctgccgaagcctggggcagagccgattgcggctttaccagcgagagctaccagcagggcgtgctgagcgccaccatcctgtacgagatcctgctgggcaaggccaccctgtacgccgtgctggtgtctgccctggtgctgatggctatggtcaagcggaaggacagccggggaagggccaagcgatctggatctggagcaacaaacttctcactactcaaacaagcaggtgacgtggaggagaatcccgggcctactagtatggactggatttggcgcatccttttccttgtcggcgctgctaccggcgcccattccgggcccgaagtgcagctggttgaatctggcggaggactggttcagcctggcggatctctgagactgtcttgtgccgcctctggcttcgccagcgactactatatcatcggctggttcagacaggcccctggcaaagagagagagggcgtcagctgtatcagcagcagatacgccaacaccaactacgccgacagcgtgaagggcagattcaccatcagccgggacaacgccaagaacaccgtgtacctccagatgaacagcctgaagcctgaggacaccgccgtgtactactgtgccgccgacaccagaagatacacctgtcctgacattgccaccatgcaccggaacttcgattcttggggccagggcacactggtcaccgtttcttctggatccggcggcggaggatctggcggaggcggatctgggggcggaggctctttcgaacaagttcagcttcaacagcctggcgctgagctggtcaaacctggcgcttctgtgaagatgagctgcaaagccagcggctacgccttcagcagctactggatcaactggatgaagcagaaacccggccagggactcgaatggatcggccaaatctatcccggcgacggcgacaccaactacaacggcaagttcaagggcagagccacactgaccgccgatacctctagcagcacagcctacatgcagctgagcagcctgaccagcgaagatagcgccgtgtacttctgtgcccggtccatcacaacagtcgtgggctgcgctatggactattggggccagggaacaagcgtgaccgtgtctagtacgcgtatccagaaccctgatcctgccgtgtaccagctgcgggatagcaagagcagcgacaagagcgtgtgtctgttcaccgacttcgacagccagaccaacgtgtcccagagcaaggactccgacgtgtacatcaccgataagtgcgtgctggacatgcggagcatggacttcaagagcaactccgccgtggcctggtccaacaagtccgatttcgcctgcgccaacgccttcaacaacagcattatccccgaggacacattcttcccaagccccgagagcagctgcgacgtgaagctggtggaaaagagcttcgagacagacaccaacctgaacttccagaacctgagcgtgatcggcttcagaatcctgctgctgaaagtggccggctttaacctgctgatgaccctgcggctgtggtccagc

SEQ ID NO: 21632 - DNA, 3222 bp, Artificial Sequence
  Synthetic Polynucleotide
atggccttaccagtgaccgccttgctcctgccgctggccttgctgctccacgccgccaggccggaagtgcagctggttgaatctggcggaggactggttcagcctggcggatctctgagactgtcttgtgccgcctctggcttcgccagcgactactatatcatcggctggttcagacaggcccctggcaaagagagagagggcgtcagctgtatcagcagcagatacgccaacaccaactacgccgacagcgtgaagggcagattcaccatcagccgggacaacgccaagaacaccgtgtacctccagatgaacagcctgaagcctgaggacaccgccgtgtactactgtgccgccgacaccagaagatacacctgtcctgacattgccaccatgcaccggaacttcgattcttggggccagggcacactggtcaccgtttcttctggcggaggaagcggcggaggatctgaagtgcaactggtggaatctggaggctctctggtgcagccagggggaagcctgagactgtcttgtgccgcttccggcttcaccttcgacgactacgccatgagctgggtgcgccaggtgccaggcaaaggcctggaatgggtgtccagcatcaactggagcggcacccacaccgattacgccgactccgtgaaaggcagattcacaatcagcagaaacaacgccaacaataccctgtacctgcagatgaactccctgaagtctgaggatacagcagtgtattattgcgccaagaactggcgggacgccggcaccacttggtttgagaaaagcggctctgccggacagggaacccaagtgacagtgtcctccggtaccggcggaggcggatctggcggcggaggtagcggtggcggaggatctgaattcgacatccagatgacacagagccctagcagcctgtctgccagcgtgggagacagagtgaccatcacatgcaaggccagcgaccacatcaacaactggctggcctggtatcagcagaagcctggacaggcccctaagctgctgatctacggcgctaccacactggaaacaggcgtgcccagcagattttctggcagcggctctggcaccgactacaccctgacaatatccagcctccagcctgaggacttcgccacctactactgtcagcagagctggaacaccccttggacattcggccagggcaccaagctggaaatcaagagactcgagggacagcctaaggccaatcctaccgtgacactgttccctccaagcagcgaagaactccaggccaacaaggccacacttgtgtgcctgatctccgacttctaccctggggctgtgacagtggcttggaaggccgatggatctcctgtgaaagccggcgtggaaaccaccaagccatccaagcagagcaacaacaaatacgccgccagctcctacctgagcctgacacctgagcagtggaagtcccacagatcctacagctgccaagtgacccacgaaggcagcaccgtggaaaagacagtggcccctacagagtgcagccccatcaagaccgatgtgattacaatggaccccaaggacaactgctccaaggacgccaacgataccctgctgctccagctgaccaacaccagcgcctactacatgtacttgttgctgctgctgaagtccgtggtgtacttcgccatcatcacatgctgcctgctgcggagaaccgccttctgctgcaacggcgagaagtctagggccaagcgatctggatctggagcaacaaacttctcactactcaaacaagcaggtgacgtggaggagaatcccgggcctactagtatggactggatttggcgcatccttttccttgtcggcgctgctaccggcgcccattccgggcccgaagtgcagctggttgaatctggcggaggactggttcagcctggcggatctctgagactgtcttgtgccgcctctggcttcgccagcgactactatatcatcggctggttcagacaggcccctggcaaagagagagagggcgtcagctgtatcagcagcagatacgccaacaccaactacgccgacagcgtgaagggcagattcaccatcagccgggacaacgccaagaacaccgtgtacctccagatgaacagcctgaagcctgaggacaccgccgtgtactactgtgccgccgacaccagaagatacacctgtcctgacattgccaccatgcaccggaacttcgattcttggggccagggcacactggtcaccgtttcttctggatccggcggcggaggatctggcggaggcggatctgggggcggaggctctttcgaacaagttcagcttcaacagcctggcgctgagctggtcaaacctggcgcttctgtgaagatgagctgcaaagccagcggctacgccttcagcagctactggatcaactggatgaagcagaaacccggccagggactcgaatggatcggccaaatctatcccggcgacggcgacaccaactacaacggcaagttcaagggcagagccacactgaccgccgatacctctagcagcacagcctacatgcagctgagcagcctgaccagcgaagatagcgccgtgtacttctgtgcccggtccatcacaacagtcgtgggctgcgctatggactattggggccagggaacaagcgtgaccgtgtctagtacgcgtgcctctacaaagggaccctccgtgtttcctctggctcccagcagcaagtctacaagcggaggaacagccgctctgggctgcctggtcaaggattactttcccgagcctgtgaccgtgtcctggaatagcggagcactgacaagcggcgtgcacacctttccagccgtgctgcaaagcagcggcctgtactctctgagcagcgtggtcacagtgcctagctctagcctgggcacccagacctacatctgcaatgtgaaccacaagcctagcaacaccaaggtggacaagagagtggaacccaagagctgtgaagtgaaaaccgactccaccgaccacgtgaagcccaaagagacagagaacaccaagcagcccagcaagagctgccacaagcccaaggccatcgtgcacaccgagaaagtgaacatgatgagcctgaccgtgctgggcctgcggatgctgttcgccaaaaccgtggccgtgaacttcctgctgaccgccaagctgttcttcctc

SEQ ID NO: 21633 - DNA, 3156 bp, Artificial Sequence
  Synthetic Polynucleotide
atggccttaccagtgaccgccttgctcctgccgctggccttgctgctccacgccgccaggccggaagtgcagctggttgaatctggcggaggactggttcagcctggcggatctctgagactgtcttgtgccgcctctggcttcgccagcgactactatatcatcggctggttcagacaggcccctggcaaagagagagagggcgtcagctgtatcagcagcagatacgccaacaccaactacgccgacagcgtgaagggcagattcaccatcagccgggacaacgccaagaacaccgtgtacctccagatgaacagcctgaagcctgaggacaccgccgtgtactactgtgccgccgacaccagaagatacacctgtcctgacattgccaccatgcaccggaacttcgattcttggggccagggcacactggtcaccgtttcttctggcggaggaagcggcggaggatctgaagtgcaactggtggaatctggaggctctctggtgcagccagggggaagcctgagactgtcttgtgccgcttccggcttcaccttcgacgactacgccatgagctgggtgcgccaggtgccaggcaaaggcctggaatgggtgtccagcatcaactggagcggcacccacaccgattacgccgactccgtgaaaggcagattcacaatcagcagaaacaacgccaacaataccctgtacctgcagatgaactccctgaagtctgaggatacagcagtgtattattgcgccaagaactggcgggacgccggcaccacttggtttgagaaaagcggctctgccggacagggaacccaagtgacagtgtcctccggtaccggcggaggcggatctggcggcggaggtagcggtggcggaggatctgaattcgacatccagatgacacagagccctagcagcctgtctgccagcgtgggagacagagtgaccatcacatgcaaggccagcgaccacatcaacaactggctggcctggtatcagcagaagcctggacaggcccctaagctgctgatctacggcgctaccacactggaaacaggcgtgcccagcagattttctggcagcggctctggcaccgactacaccctgacaatatccagcctccagcctgaggacttcgccacctactactgtcagcagagctggaacaccccttggacattcggccagggcaccaagctggaaatcaagagactcgagggacagcctaaggccaatcctaccgtgacactgttccctccaagcagcgaagaactccaggccaacaaggccacacttgtgtgcctgatctccgacttctaccctggggctgtgacagtggcttggaaggccgatggatctcctgtgaaagccggcgtggaaaccaccaagccatccaagcagagcaacaacaaatacgccgccagctcctacctgagcctgacacctgagcagtggaagtcccacagatcctacagctgccaagtgacccacgaaggcagcaccgtggaaaagacagtggcccctacagagtgcagcggcagagccgattgcggctttaccagcgagagctaccagcagggcgtgctgagcgccaccatcctgtacgagatcctgctgggcaaggccaccctgtacgccgtgctggtgtctgccctggtgctgatggctatggtcaagcggaaggacagccggggaagggccaagcgatctggatctggagcaacaaacttctcactactcaaacaagcaggtgacgtggaggagaatcccgggcctactagtatggactggatttggcgcatccttttccttgtcggcgctgctaccggcgcccattccgggcccgaagtgcagctggttgaatctggcggaggactggttcagcctggcggatctctgagactgtcttgtgccgcctctggcttcgccagcgactactatatcatcggctggttcagacaggcccctggcaaagagagagagggcgtcagctgtatcagcagcagatacgccaacaccaactacgccgacagcgtgaagggcagattcaccatcagccgggacaacgccaagaacaccgtgtacctccagatgaacagcctgaagcctgaggacaccgccgtgtactactgtgccgccgacaccagaagatacacctgtcctgacattgccaccatgcaccggaacttcgattcttggggccagggcacactggtcaccgtttcttctggatccggcggcggaggatctggcggaggcggatctgggggcggaggctctttcgaacaagttcagcttcaacagcctggcgctgagctggtcaaacctggcgcttctgtgaagatgagctgcaaagccagcggctacgccttcagcagctactggatcaactggatgaagcagaaacccggccagggactcgaatggatcggccaaatctatcccggcgacggcgacaccaactacaacggcaagttcaagggcagagccacactgaccgccgatacctctagcagcacagcctacatgcagctgagcagcctgaccagcgaagatagcgccgtgtacttctgtgcccggtccatcacaacagtcgtgggctgcgctatggactattggggccagggaacaagcgtgaccgtgtctagtacgcgtgcctctacaaagggaccctccgtgtttcctctggctcccagcagcaagtctacaagcggaggaacagccgctctgggctgcctggtcaaggattactttcccgagcctgtgaccgtgtcctggaatagcggagcactgacaagcggcgtgcacacctttccagccgtgctgcaaagcagcggcctgtactctctgagcagcgtggtcacagtgcctagctctagcctgggcacccagacctacatctgcaatgtgaaccacaagcctagcaacaccaaggtggacaagagagtggaacccaagagctgtatccccgaggacacattcttcccaagccccgagagcagctgcgacgtgaagctggtggaaaagagcttcgagacagacaccaacctgaacttccagaacctgagcgtgatcggcttcagaatcctgctgctgaaagtggccggctttaacctgctgatgaccctgcggctgtggtccagc

SEQ ID NO: 21634 - DNA, 2355 bp, Artificial Sequence
  Synthetic Polynucleotide
atggccttaccagtgaccgccttgctcctgccgctggccttgctgctccacgccgccaggccggaagtgcagctggttgaatctggcggaggactggttcagcctggcggatctctgagactgtcttgtgccgcctctggcttcgccagcgactactatatcatcggctggttcagacaggcccctggcaaagagagagagggcgtcagctgtatcagcagcagatacgccaacaccaactacgccgacagcgtgaagggcagattcaccatcagccgggacaacgccaagaacaccgtgtacctccagatgaacagcctgaagcctgaggacaccgccgtgtactactgtgccgccgacaccagaagatacacctgtcctgacattgccaccatgcaccggaacttcgattcttggggccagggcacactggtcaccgtttcttctggcggaggaagcggcggaggatctgaagtgcaactggtggaatctggaggctctctggtgcagccagggggaagcctgagactgtcttgtgccgcttccggcttcaccttcgacgactacgccatgagctgggtgcgccaggtgccaggcaaaggcctggaatgggtgtccagcatcaactggagcggcacccacaccgattacgccgactccgtgaaaggcagattcacaatcagcagaaacaacgccaacaataccctgtacctgcagatgaactccctgaagtctgaggatacagcagtgtattattgcgccaagaactggcgggacgccggcaccacttggtttgagaaaagcggctctgccggacagggaacccaagtgacagtgtcctccctcgagggacagcctaaggccaatcctaccgtgacactgttccctccaagcagcgaagaactccaggccaacaaggccacacttgtgtgcctgatctccgacttctaccctggggctgtgacagtggcttggaaggccgatggatctcctgtgaaagccggcgtggaaaccaccaagccatccaagcagagcaacaacaaatacgccgccagctcctacctgagcctgacacctgagcagtggaagtcccacagatcctacagctgccaagtgacccacgaaggcagcaccgtggaaaagacagtggcccctacagagtgcagcggcagagccgattgcggctttaccagcgagagctaccagcagggcgtgctgagcgccaccatcctgtacgagatcctgctgggcaaggccaccctgtacgccgtgctggtgtctgccctggtgctgatggctatggtcaagcggaaggacagccggggaagggccaagcgatctggatctggagcaacaaacttctcactactcaaacaagcaggtgacgtggaggagaatcccgggcctactagtatggactggatttggcgcatccttttccttgtcggcgctgctaccggcgcgcattccgggcccgaagtgcagctggttgaatctggcggaggactggttcagcctggcggatctctgagactgtcttgtgccgcctctggcttcgccagcgactactatatcatcggctggttcagacaggcccctggcaaagagagagagggcgtcagctgtatcagcagcagatacgccaacaccaactacgccgacagcgtgaagggcagattcaccatcagccgggacaacgccaagaacaccgtgtacctccagatgaacagcctgaagcctgaggacaccgccgtgtactactgtgccgccgacaccagaagatacacctgtcctgacattgccaccatgcaccggaacttcgattcttggggccagggcacactggtcaccgtttcttctacgcgtgcctctacaaagggaccctccgtgtttcctctggctcccagcagcaagtctacaagcggaggaacagccgctctgggctgcctggtcaaggattactttcccgagcctgtgaccgtgtcctggaatagcggagcactgacaagcggcgtgcacacctttccagccgtgctgcaaagcagcggcctgtactctctgagcagcgtggtcacagtgcctagctctagcctgggcacccagacctacatctgcaatgtgaaccacaagcctagcaacaccaaggtggacaagagagtggaacccaagagctgtatccccgaggacacattcttcccaagccccgagagcagctgcgacgtgaagctggtggaaaagagcttcgagacagacaccaacctgaacttccagaacctgagcgtgatcggcttcagaatcctgctgctgaaagtggccggctttaacctgctgatgaccctgcggctgtggtccagc

SEQ ID NO: 21635 - DNA, 2193 bp, Artificial Sequence; identical to SEQ ID NO: 21629
  Synthetic Polynucleotide

SEQ ID NO: 21636 - DNA, 2088 bp, Artificial Sequence
  Synthetic Polynucleotide
atggccttaccagtgaccgccttgctcctgccgctggccttgctgctccacgccgccaggccggaagtgcagctggttgaatctggcggaggactggttcagcctggcggatctctgagactgtcttgtgccgcctctggcttcgccagcgactactatatcatcggctggttcagacaggcccctggcaaagagagagagggcgtcagctgtatcagcagcagatacgccaacaccaactacgccgacagcgtgaagggcagattcaccatcagccgggacaacgccaagaacaccgtgtacctccagatgaacagcctgaagcctgaggacaccgccgtgtactactgtgccgccgacaccagaagatacacctgtcctgacattgccaccatgcaccggaacttcgattcttggggccagggcacactggtcaccgtttcttctggcggaggaagcggcggaggatctgaagtgcaactggtggaatctggaggctctctggtgcagccagggggaagcctgagactgtcttgtgccgcttccggcttcaccttcgacgactacgccatgagctgggtgcgccaggtgccaggcaaaggcctggaatgggtgtccagcatcaactggagcggcacccacaccgattacgccgactccgtgaaaggcagattcacaatcagcagaaacaacgccaacaataccctgtacctgcagatgaactccctgaagtctgaggatacagcagtgtattattgcgccaagaactggcgggacgccggcaccacttggtttgagaaaagcggctctgccggacagggaacccaagtgacagtgtcctccggtaccggcggaggcggatctggcggcggaggtagcggtggcggaggatctgaattcgacatccagatgacacagagccctagcagcctgtctgccagcgtgggagacagagtgaccatcacatgcaaggccagcgaccacatcaacaactggctggcctggtatcagcagaagcctggacaggcccctaagctgctgatctacggcgctaccacactggaaacaggcgtgcccagcagattttctggcagcggctctggcaccgactacaccctgacaatatccagcctccagcctgaggacttcgccacctactactgtcagcagagctggaacaccccttggacattcggccagggcaccaagctggaaatcaagagaggcggaggcggaagtggaggcggaggatctggcggcggaggctctcaagttcagcttcaacagcctggcgctgagctggtcaaacctggcgcttctgtgaagatgagctgcaaagccagcggctacgccttcagcagctactggatcaactggatgaagcagaaacccggccagggactcgaatggatcggccaaatctatcccggcgacggcgacaccaactacaacggcaagttcaagggcagagccacactgaccgccgatacctctagcagcacagcctacatgcagctgagcagcctgaccagcgaagatagcgccgtgtacttctgtgcccggtccatcacaacagtcgtgggctgcgctatggactattggggccagggaacaagcgtgaccgtgtctagtacgcgtttcaagatccccatcgaggaactggaagatcgggtgttcgtgaactgcaacacctctatcacctgggtggaaggcaccgtgggaacactgctgagcgacatcaccagactggacctcggcaagcggattctggaccctcggggcatctacagatgcaacggcaccgacatctacaaggacaaagaaagcaccgtgcaggtccactacagaatgtgccagtcctgcgtggaactggaccctgctacagtggccggcatcatcgtgaccgatgtgatcgctactctgctgctggctctgggagtgttctgcttcgccggacacgaaacaggcagactgtctggcgctgccgatacacaggccctgctgagaaacgaccaagtgtatcagcccctgcgcgacagagatgatgcccagtattctcacctcggcggcaactgggctagaaacaag

SEQ ID NO: 21637 - DNA, 2118 bp, Artificial Sequence
  Synthetic Polynucleotide
atggccttaccagtgaccgccttgctcctgccgctggccttgctgctccacgccgccaggccggaagtgcagctggttgaatctggcggaggactggttcagcctggcggatctctgagactgtcttgtgccgcctctggcttcgccagcgactactatatcatcggctggttcagacaggcccctggcaaagagagagagggcgtcagctgtatcagcagcagatacgccaacaccaactacgccgacagcgtgaagggcagattcaccatcagccgggacaacgccaagaacaccgtgtacctccagatgaacagcctgaagcctgaggacaccgccgtgtactactgtgccgccgacaccagaagatacacctgtcctgacattgccaccatgcaccggaacttcgattcttggggccagggcacactggtcaccgtttcttctggcggaggaagcggcggaggatctgaagtgcaactggtggaatctggaggctctctggtgcagccagggggaagcctgagactgtcttgtgccgcttccggcttcaccttcgacgactacgccatgagctgggtgcgccaggtgccaggcaaaggcctggaatgggtgtccagcatcaactggagcggcacccacaccgattacgccgactccgtgaaaggcagattcacaatcagcagaaacaacgccaacaataccctgtacctgcagatgaactccctgaagtctgaggatacagcagtgtattattgcgccaagaactggcgggacgccggcaccacttggtttgagaaaagcggctctgccggacagggaacccaagtgacagtgtcctccggtaccggcggaggcggatctggcggcggaggtagcggtggcggaggatctgaattcgacatccagatgacacagagccctagcagcctgtctgccagcgtgggagacagagtgaccatcacatgcaaggccagcgaccacatcaacaactggctggcctggtatcagcagaagcctggacaggcccctaagctgctgatctacggcgctaccacactggaaacaggcgtgcccagcagattttctggcagcggctctggcaccgactacaccctgacaatatccagcctccagcctgaggacttcgccacctactactgtcagcagagctggaacaccccttggacattcggccagggcaccaagctggaaatcaagagaggcggaggcggaagtggaggcggaggatctggcggcggaggctctcaagttcagcttcaacagcctggcgctgagctggtcaaacctggcgcttctgtgaagatgagctgcaaagccagcggctacgccttcagcagctactggatcaactggatgaagcagaaacccggccagggactcgaatggatcggccaaatctatcccggcgacggcgacaccaactacaacggcaagttcaagggcagagccacactgaccgccgatacctctagcagcacagcctacatgcagctgagcagcctgaccagcgaagatagcgccgtgtacttctgtgcccggtccatcacaacagtcgtgggctgcgctatggactattggggccagggaacaagcgtgaccgtgtctagtacgcgtcagagcatcaagggcaaccacctggtcaaggtgtacgactaccaagaggacggcagcgtgctgctgacatgtgatgccgaggccaagaacatcacctggtttaaggacggcaagatgatcggcttcctgaccgaggacaagaagaagtggaacctgggcagcaacgctaaggaccccagaggcatgtatcagtgcaagggcagccagaacaagagcaagcccctccaggtgtactaccggatgtgccagaactgcatcgagctgaacgccgctaccatcagcggctttctgttcgccgagatcgtgtccatcttcgtgctggccgtgggcgtgtactttatcgctggacaggatggcgtgcggcagagcagagcttccgataagcaaaccctgctgcctaacgaccagctgtaccagcctctgaaggacagagaggacgaccagtacagccacctccagggcaatcagctgagaagaaac

SEQ ID NO: 21638 - DNA, 2868 bp, Artificial Sequence
  Synthetic Polynucleotide
atggccttaccagtgaccgccttgctcctgccgctggccttgctgctccacgccgccaggccgatgtgtatgccctgcttcaccaccgaccatcagatggcccggaagtgcgacgattgctgtggcggaaaaggcagaggcaagtgctacggccctcagtgcttgtgtagaggcggaggaagcggcggaggatctgaagtgcaactggtggaatctggaggctctctggtgcagccagggggaagcctgagactgtcttgtgccgcttccggcttcaccttcgacgactacgccatgagctgggtgcgccaggtgccaggcaaaggcctggaatgggtgtccagcatcaactggagcggcacccacaccgattacgccgactccgtgaaaggcagattcacaatcagcagaaacaacgccaacaataccctgtacctgcagatgaactccctgaagtctgaggatacagcagtgtattattgcgccaagaactggcgggacgccggcaccacttggtttgagaaaagcggctctgccggacagggaacccaagtgacagtgtcctccggtaccggcggaggcggatctggcggcggaggtagcggtggcggaggatctgaattcgacatccagatgacacagagccctagcagcctgtctgccagcgtgggagacagagtgaccatcacatgcaaggccagcgaccacatcaacaactggctggcctggtatcagcagaagcctggacaggcccctaagctgctgatctacggcgctaccacactggaaacaggcgtgcccagcagattttctggcagcggctctggcaccgactacaccctgacaatatccagcctccagcctgaggacttcgccacctactactgtcagcagagctggaacaccccttggacattcggccagggcaccaagctggaaatcaagagactcgaggacctgaagaacgtgttcccacctgaggtggccgtgttcgagcctagcgaggccgagatcagccacacccagaaagccaccctcgtgtgcctggctaccggcttctaccccgaccatgtggaactgtcttggtgggtcaacggcaaagaggtgcacagcggcgtgtgtaccgacccccagccactgaaagaacagcccgccctgaacgacagccggtactgcctgagcagcagactgagagtgtccgccaccttctggcagaacccccggaaccacttcagatgccaggtgcagttctacggcctgagcgagaacgacgagtggacccaggacagagccaagcccgtgacccagatcgtgtctgccgaagcctggggcagagccgattgcggctttaccagcgagagctaccagcagggcgtgctgagcgccaccatcctgtacgagatcctgctgggcaaggccaccctgtacgccgtgctggtgtctgccctggtgctgatggctatggtcaagcggaaggacagccggggaagggccaagcgatctggatctggagcaacaaacttctcactactcaaacaagcaggtgacgtggaggagaatcccgggcctactagtatggactggatttggcgcatccttttccttgtcggcgctgctaccggcgcccattccgggcccgaagtgcagctggttgaatctggcggaggactggttcagcctggcggatctctgagactgtcttgtgccgcctctggcttcgccagcgactactatatcatcggctggttcagacaggcccctggcaaagagagagagggcgtcagctgtatcagcagcagatacgccaacaccaactacgccgacagcgtgaagggcagattcaccatcagccgggacaacgccaagaacaccgtgtacctccagatgaacagcctgaagcctgaggacaccgccgtgtactactgtgccgccgacaccagaagatacacctgtcctgacattgccaccatgcaccggaacttcgattcttggggccagggcacactggtcaccgtttcttctggatccggcggcggaggatctggcggaggcggatctgggggcggaggctctttcgaacaagttcagcttcaacagcctggcgctgagctggtcaaacctggcgcttctgtgaagatgagctgcaaagccagcggctacgccttcagcagctactggatcaactggatgaagcagaaacccggccagggactcgaatggatcggccaaatctatcccggcgacggcgacaccaactacaacggcaagttcaagggcagagccacactgaccgccgatacctctagcagcacagcctacatgcagctgagcagcctgaccagcgaagatagcgccgtgtacttctgtgcccggtccatcacaacagtcgtgggctgcgctatggactattggggccagggaacaagcgtgaccgtgtctagtacgcgtatccagaaccctgatcctgccgtgtaccagctgcgggatagcaagagcagcgacaagagcgtgtgtctgttcaccgacttcgacagccagaccaacgtgtcccagagcaaggactccgacgtgtacatcaccgataagtgcgtgctggacatgcggagcatggacttcaagagcaactccgccgtggcctggtccaacaagtccgatttcgcctgcgccaacgccttcaacaacagcattatccccgaggacacattcttcccaagccccgagagcagctgcgacgtgaagctggtggaaaagagcttcgagacagacaccaacctgaacttccagaacctgagcgtgatcggcttcagaatcctgctgctgaaagtggccggctttaacctgctgatgaccctgcggctgtggtccagc

SEQ ID NO: 21639 - DNA, 2946 bp, Artificial Sequence
  Synthetic Polynucleotide
atggccttaccagtgaccgccttgctcctgccgctggccttgctgctccacgccgccaggccgatgtgtatgccctgcttcaccaccgaccatcagatggcccggaagtgcgacgattgctgtggcggaaaaggcagaggcaagtgctacggccctcagtgcttgtgtagaggcggaggaagcggcggaggatctgaagtgcaactggtggaatctggaggctctctggtgcagccagggggaagcctgagactgtcttgtgccgcttccggcttcaccttcgacgactacgccatgagctgggtgcgccaggtgccaggcaaaggcctggaatgggtgtccagcatcaactggagcggcacccacaccgattacgccgactccgtgaaaggcagattcacaatcagcagaaacaacgccaacaataccctgtacctgcagatgaactccctgaagtctgaggatacagcagtgtattattgcgccaagaactggcgggacgccggcaccacttggtttgagaaaagcggctctgccggacagggaacccaagtgacagtgtcctccggtaccggcggaggcggatctggcggcggaggtagcggtggcggaggatctgaattcgacatccagatgacacagagccctagcagcctgtctgccagcgtgggagacagagtgaccatcacatgcaaggccagcgaccacatcaacaactggctggcctggtatcagcagaagcctggacaggcccctaagctgctgatctacggcgctaccacactggaaacaggcgtgcccagcagattttctggcagcggctctggcaccgactacaccctgacaatatccagcctccagcctgaggacttcgccacctactactgtcagcagagctggaacaccccttggacattcggccagggcaccaagctggaaatcaagagactcgagggacagcctaaggccaatcctaccgtgacactgttccctccaagcagcgaagaactccaggccaacaaggccacacttgtgtgcctgatctccgacttctaccctggggctgtgacagtggcttggaaggccgatggatctcctgtgaaagccggcgtggaaaccaccaagccatccaagcagagcaacaacaaatacgccgccagctcctacctgagcctgacacctgagcagtggaagtcccacagatcctacagctgccaagtgacccacgaaggcagcaccgtggaaaagacagtggcccctacagagtgcagccccatcaagaccgatgtgattacaatggaccccaaggacaactgctccaaggacgccaacgataccctgctgctccagctgaccaacaccagcgcctactacatgtacttgttgctgctgctgaagtccgtggtgtacttcgccatcatcacatgctgcctgctgcggagaaccgccttctgctgcaacggcgagaagtctagggccaagcgatctggatctggagcaacaaacttctcactactcaaacaagcaggtgacgtggaggagaatcccgggcctactagtatggactggatttggcgcatccttttccttgtcggcgctgctaccggcgcccattccgggcccgaagtgcagctggttgaatctggcggaggactggttcagcctggcggatctctgagactgtcttgtgccgcctctggcttcgccagcgactactatatcatcggctggttcagacaggcccctggcaaagagagagagggcgtcagctgtatcagcagcagatacgccaacaccaactacgccgacagcgtgaagggcagattcaccatcagccgggacaacgccaagaacaccgtgtacctccagatgaacagcctgaagcctgaggacaccgccgtgtactactgtgccgccgacaccagaagatacacctgtcctgacattgccaccatgcaccggaacttcgattcttggggccagggcacactggtcaccgtttcttctggatccggcggcggaggatctggcggaggcggatctgggggcggaggctctttcgaacaagttcagcttcaacagcctggcgctgagctggtcaaacctggcgcttctgtgaagatgagctgcaaagccagcggctacgccttcagcagctactggatcaactggatgaagcagaaacccggccagggactcgaatggatcggccaaatctatcccggcgacggcgacaccaactacaacggcaagttcaagggcagagccacactgaccgccgatacctctagcagcacagcctacatgcagctgagcagcctgaccagcgaagatagcgccgtgtacttctgtgcccggtccatcacaacagtcgtgggctgcgctatggactattggggccagggaacaagcgtgaccgtgtctagtacgcgtgcctctacaaagggaccctccgtgtttcctctggctcccagcagcaagtctacaagcggaggaacagccgctctgggctgcctggtcaaggattactttcccgagcctgtgaccgtgtcctggaatagcggagcactgacaagcggcgtgcacacctttccagccgtgctgcaaagcagcggcctgtactctctgagcagcgtggtcacagtgcctagctctagcctgggcacccagacctacatctgcaatgtgaaccacaagcctagcaacaccaaggtggacaagagagtggaacccaagagctgtgaagtgaaaaccgactccaccgaccacgtgaagcccaaagagacagagaacaccaagcagcccagcaagagctgccacaagcccaaggccatcgtgcacaccgagaaagtgaacatgatgagcctgaccgtgctgggcctgcggatgctgttcgccaaaaccgtggccgtgaacttcctgctgaccgccaagctgttcttcctc

SEQ ID NO: 21640 - DNA, 2880 bp, Artificial Sequence
  Synthetic Polynucleotide
atggccttaccagtgaccgccttgctcctgccgctggccttgctgctccacgccgccaggccgatgtgtatgccctgcttcaccaccgaccatcagatggcccggaagtgcgacgattgctgtggcggaaaaggcagaggcaagtgctacggccctcagtgcttgtgtagaggcggaggaagcggcggaggatctgaagtgcaactggtggaatctggaggctctctggtgcagccagggggaagcctgagactgtcttgtgccgcttccggcttcaccttcgacgactacgccatgagctgggtgcgccaggtgccaggcaaaggcctggaatgggtgtccagcatcaactggagcggcacccacaccgattacgccgactccgtgaaaggcagattcacaatcagcagaaacaacgccaacaataccctgtacctgcagatgaactccctgaagtctgaggatacagcagtgtattattgcgccaagaactggcgggacgccggcaccacttggtttgagaaaagcggctctgccggacagggaacccaagtgacagtgtcctccggtaccggcggaggcggatctggcggcggaggtagcggtggcggaggatctgaattcgacatccagatgacacagagccctagcagcctgtctgccagcgtgggagacagagtgaccatcacatgcaaggccagcgaccacatcaacaactggctggcctggtatcagcagaagcctggacaggcccctaagctgctgatctacggcgctaccacactggaaacaggcgtgcccagcagattttctggcagcggctctggcaccgactacaccctgacaatatccagcctccagcctgaggacttcgccacctactactgtcagcagagctggaacaccccttggacattcggccagggcaccaagctggaaatcaagagactcgagggacagcctaaggccaatcctaccgtgacactgttccctccaagcagcgaagaactccaggccaacaaggccacacttgtgtgcctgatctccgacttctaccctggggctgtgacagtggcttggaaggccgatggatctcctgtgaaagccggcgtggaaaccaccaagccatccaagcagagcaacaacaaatacgccgccagctcctacctgagcctgacacctgagcagtggaagtcccacagatcctacagctgccaagtgacccacgaaggcagcaccgtggaaaagacagtggcccctacagagtgcagcggcagagccgattgcggctttaccagcgagagctaccagcagggcgtgctgagcgccaccatcctgtacgagatcctgctgggcaaggccaccctgtacgccgtgctggtgtctgccctggtgctgatggctatggtcaagcggaaggacagccggggaagggccaagcgatctggatctggagcaacaaacttctcactactcaaacaagcaggtgacgtggaggagaatcccgggcctactagtatggactggatttggcgcatccttttccttgtcggcgctgctaccggcgcccattccgggcccgaagtgcagctggttgaatctggcggaggactggttcagcctggcggatctctgagactgtcttgtgccgcctctggcttcgccagcgactactatatcatcggctggttcagacaggcccctggcaaagagagagagggcgtcagctgtatcagcagcagatacgccaacaccaactacgccgacagcgtgaagggcagattcaccatcagccgggacaacgccaagaacaccgtgtacctccagatgaacagcctgaagcctgaggacaccgccgtgtactactgtgccgccgacaccagaagatacacctgtcctgacattgccaccatgcaccggaacttcgattcttggggccagggcacactggtcaccgtttcttctggatccggcggcggaggatctggcggaggcggatctgggggcggaggctctttcgaacaagttcagcttcaacagcctggcgctgagctggtcaaacctggcgcttctgtgaagatgagctgcaaagccagcggctacgccttcagcagctactggatcaactggatgaagcagaaacccggccagggactcgaatggatcggccaaatctatcccggcgacggcgacaccaactacaacggcaagttcaagggcagagccacactgaccgccgatacctctagcagcacagcctacatgcagctgagcagcctgaccagcgaagatagcgccgtgtacttctgtgcccggtccatcacaacagtcgtgggctgcgctatggactattggggccagggaacaagcgtgaccgtgtctagtacgcgtgcctctacaaagggaccctccgtgtttcctctggctcccagcagcaagtctacaagcggaggaacagccgctctgggctgcctggtcaaggattactttcccgagcctgtgaccgtgtcctggaatagcggagcactgacaagcggcgtgcacacctttccagccgtgctgcaaagcagcggcctgtactctctgagcagcgtggtcacagtgcctagctctagcctgggcacccagacctacatctgcaatgtgaaccacaagcctagcaacaccaaggtggacaagagagtggaacccaagagctgtatccccgaggacacattcttcccaagccccgagagcagctgcgacgtgaagctggtggaaaagagcttcgagacagacaccaacctgaacttccagaacctgagcgtgatcggcttcagaatcctgctgctgaaagtggccggctttaacctgctgatgaccctgcggctgtggtccagc

SEQ ID NO: 21641 - DNA, 2079 bp, Artificial Sequence
  Synthetic Polynucleotide
atggccttaccagtgaccgccttgctcctgccgctggccttgctgctccacgccgccaggccgatgtgtatgccctgcttcaccaccgaccatcagatggcccggaagtgcgacgattgctgtggcggaaaaggcagaggcaagtgctacggccctcagtgcttgtgtagaggcggaggaagcggcggaggatctgaagtgcaactggtggaatctggaggctctctggtgcagccagggggaagcctgagactgtcttgtgccgcttccggcttcaccttcgacgactacgccatgagctgggtgcgccaggtgccaggcaaaggcctggaatgggtgtccagcatcaactggagcggcacccacaccgattacgccgactccgtgaaaggcagattcacaatcagcagaaacaacgccaacaataccctgtacctgcagatgaactccctgaagtctgaggatacagcagtgtattattgcgccaagaactggcgggacgccggcaccacttggtttgagaaaagcggctctgccggacagggaacccaagtgacagtgtcctccctcgagggacagcctaaggccaatcctaccgtgacactgttccctccaagcagcgaagaactccaggccaacaaggccacacttgtgtgcctgatctccgacttctaccctggggctgtgacagtggcttggaaggccgatggatctcctgtgaaagccggcgtggaaaccaccaagccatccaagcagagcaacaacaaatacgccgccagctcctacctgagcctgacacctgagcagtggaagtcccacagatcctacagctgccaagtgacccacgaaggcagcaccgtggaaaagacagtggcccctacagagtgcagcggcagagccgattgcggctttaccagcgagagctaccagcagggcgtgctgagcgccaccatcctgtacgagatcctgctgggcaaggccaccctgtacgccgtgctggtgtctgccctggtgctgatggctatggtcaagcggaaggacagccggggaagggccaagcgatctggatctggagcaacaaacttctcactactcaaacaagcaggtgacgtggaggagaatcccgggcctactagtatggactggatttggcgcatccttttccttgtcggcgctgctaccggcgcgcattccgggcccgaagtgcagctggttgaatctggcggaggactggttcagcctggcggatctctgagactgtcttgtgccgcctctggcttcgccagcgactactatatcatcggctggttcagacaggcccctggcaaagagagagagggcgtcagctgtatcagcagcagatacgccaacaccaactacgccgacagcgtgaagggcagattcaccatcagccgggacaacgccaagaacaccgtgtacctccagatgaacagcctgaagcctgaggacaccgccgtgtactactgtgccgccgacaccagaagatacacctgtcctgacattgccaccatgcaccggaacttcgattcttggggccagggcacactggtcaccgtttcttctacgcgtgcctctacaaagggaccctccgtgtttcctctggctcccagcagcaagtctacaagcggaggaacagccgctctgggctgcctggtcaaggattactttcccgagcctgtgaccgtgtcctggaatagcggagcactgacaagcggcgtgcacacctttccagccgtgctgcaaagcagcggcctgtactctctgagcagcgtggtcacagtgcctagctctagcctgggcacccagacctacatctgcaatgtgaaccacaagcctagcaacaccaaggtggacaagagagtggaacccaagagctgtatccccgaggacacattcttcccaagccccgagagcagctgcgacgtgaagctggtggaaaagagcttcgagacagacaccaacctgaacttccagaacctgagcgtgatcggcttcagaatcctgctgctgaaagtggccggctttaacctgctgatgaccctgcggctgtggtccagc

SEQ ID NO: 21642 - DNA, 2346 bp, Artificial Sequence
  Synthetic Polynucleotide
atggccttaccagtgaccgccttgctcctgccgctggccttgctgctccacgccgccaggccgatgtgtatgccctgcttcaccaccgaccatcagatggcccggaagtgcgacgattgctgtggcggaaaaggcagaggcaagtgctacggccctcagtgcttgtgtagaggcggcggaggatctggcggaggcggatctgggggcggaggctctgaagtgcagctggttgaatctggcggaggactggttcagcctggcggatctctgagactgtcttgtgccgcctctggcttcgccagcgactactatatcatcggctggttcagacaggcccctggcaaagagagagagggcgtcagctgtatcagcagcagatacgccaacaccaactacgccgacagcgtgaagggcagattcaccatcagccgggacaacgccaagaacaccgtgtacctccagatgaacagcctgaagcctgaggacaccgccgtgtactactgtgccgccgacaccagaagatacacctgtcctgacattgccaccatgcaccggaacttcgattcttggggccagggcacactggtcaccgtttcttctggcggaggaagcggcggaggatctgaagtgcaactggtggaatctggaggctctctggtgcagccagggggaagcctgagactgtcttgtgccgcttccggcttcaccttcgacgactacgccatgagctgggtgcgccaggtgccaggcaaaggcctggaatgggtgtccagcatcaactggagcggcacccacaccgattacgccgactccgtgaaaggcagattcacaatcagcagaaacaacgccaacaataccctgtacctgcagatgaactccctgaagtctgaggatacagcagtgtattattgcgccaagaactggcgggacgccggcaccacttggtttgagaaaagcggctctgccggacagggaacccaagtgacagtgtcctccggtaccggcggaggcggatctggcggcggaggtagcggtggcggaggatctgaattcgacatccagatgacacagagccctagcagcctgtctgccagcgtgggagacagagtgaccatcacatgcaaggccagcgaccacatcaacaactggctggcctggtatcagcagaagcctggacaggcccctaagctgctgatctacggcgctaccacactggaaacaggcgtgcccagcagattttctggcagcggctctggcaccgactacaccctgacaatatccagcctccagcctgaggacttcgccacctactactgtcagcagagctggaacaccccttggacattcggccagggcaccaagctggaaatcaagagaggcggaggcggaagtggaggcggaggatctggcggcggaggctctcaagttcagcttcaacagcctggcgctgagctggtcaaacctggcgcttctgtgaagatgagctgcaaagccagcggctacgccttcagcagctactggatcaactggatgaagcagaaacccggccagggactcgaatggatcggccaaatctatcccggcgacggcgacaccaactacaacggcaagttcaagggcagagccacactgaccgccgatacctctagcagcacagcctacatgcagctgagcagcctgaccagcgaagatagcgccgtgtacttctgtgcccggtccatcacaacagtcgtgggctgcgctatggactattggggccagggaacaagcgtgaccgtgtctagtacgcgtgacggtaacgaggagatgggaggaatcactcaaaccccttacaaagtctcaatttcaggaacaactgttatccttacatgtccccagtatcctggcagcgagatcctttggcagcataacgacaagaatatagggggagatgaagacgataagaatatcggatctgacgaggatcacttgagcctgaaagagttctccgagcttgaacaaagcggatattatgtgtgctatccgcgcgggtcaaagccggaagacgctaacttttacctttatctccgagccagagtgtgcgaaaattgcatggaaatggacgttatgtccgttgctacaatagttatcgtagatatatgcatcacgggtggactgcttctgctggtttattattggtccaagaatagaaaggccaaagctaaacccgtgaccagaggcgctggcgcaggcggaaggcaaaggggacaaaacaaagaacggccaccaccagtgccaaatccagattatgagcctattcggaaaggacagagggacctgtactctggcctgaatcagagaagaatc

SEQ ID NO: 21643 - DNA, 2292 bp, Artificial Sequence
  Synthetic Polynucleotide
atggccttaccagtgaccgccttgctcctgccgctggccttgctgctccacgccgccaggccggaagttcaactggtggaatccggtggaggactggtgcaagcgggcggctcactgcgccttagctgtgctgccagcggcagtgtgttcagcggcaatgtaatgggttggtacaggcgacaagccccaggcaaggagcgagagtgggtagccgcgattgcaagtgggggcagcatctactacagagattctgtgaaaggccgcttcactattagtcgggacaacgcaaaaaacacggtgtatctccaaatgaacagcttgaagccagaggacactgctgtctactattgtaacagtcatcccccaactctcccctattgggggctgggcactcaggtcaccgtgagttccggtaccggcggaggcggatctggcggcggaggtagcggtggcggaggatctgaattcgacgacatcgtgatgacacagtcaccagatagcctcaccgtctccctgggggagcggaccaccattaattgtaaatccagccaaagcgtgctggactcaagcaagaacaagaatagcctcgcctggtatcagcagaagcccggtcagcctccaaagctgctgctttcttgggcctccaccagagagtccgggattcctgataggtttagtggttcaggctccggcacagattttactctgaccattgattctctccagccagaggattctgcaacttattactgccagcaaagcgcccactttcctataacttttggccagggaacccgacttgaaatcaagctcgaggacctgaagaacgtgttcccacctgaggtggccgtgttcgagcctagcgaggccgagatcagccacacccagaaagccaccctcgtgtgcctggctaccggcttctaccccgaccatgtggaactgtcttggtgggtcaacggcaaagaggtgcacagcggcgtgtgtaccgacccccagccactgaaagaacagcccgccctgaacgacagccggtactgcctgagcagcagactgagagtgtccgccaccttctggcagaacccccggaaccacttcagatgccaggtgcagttctacggcctgagcgagaacgacgagtggacccaggacagagccaagcccgtgacccagatcgtgtctgccgaagcctggggcagagccgattgcggctttaccagcgagagctaccagcagggcgtgctgagcgccaccatcctgtacgagatcctgctgggcaaggccaccctgtacgccgtgctggtgtctgccctggtgctgatggctatggtcaagcggaaggacagccggggaagggccaagcgatctggatctggagcaacaaacttctcactactcaaacaagcaggtgacgtggaggagaatcccgggcctactagtatggactggatttggcgcatccttttccttgtcggcgctgctaccggcgcgcattccttcgaacaggtgcagctggtgcagagcggtgccgaagtgaagaaaccaggtgcatccgttaaagtttcatgtaaggctagtggatataccttcaccaattacggaatgaactgggtgaaacaggcccctggccagggactgaagtggatggggtggattaacacctacaccggggagccgacttatgcagacgactttaaggggcgggtcacgatgacctccgacacctccaccagtaccgcctacctggagctgcacaaccttaggtcagacgataccgccgtgtattactgtgcccgatggtcttggtccgacggatactatgtctacttcgactattggggccaggggaccacagttaccgtgtcctctacgcgtatccagaaccctgatcctgccgtgtaccagctgcgggatagcaagagcagcgacaagagcgtgtgtctgttcaccgacttcgacagccagaccaacgtgtcccagagcaaggactccgacgtgtacatcaccgataagtgcgtgctggacatgcggagcatggacttcaagagcaactccgccgtggcctggtccaacaagtccgatttcgcctgcgccaacgccttcaacaacagcattatccccgaggacacattcttcccaagccccgagagcagctgcgacgtgaagctggtggaaaagagcttcgagacagacaccaacctgaacttccagaacctgagcgtgatcggcttcagaatcctgctgctgaaagtggccggctttaacctgctgatgaccctgcggctgtggtccagc

SEQ ID NO: 21644 - DNA, 2280 bp, Artificial Sequence
  Synthetic Polynucleotide
atggccttaccagtgaccgccttgctcctgccgctggccttgctgctccacgccgccaggccggaagttcaactggtggaatccggtggaggactggtgcaagcgggcggctcactgcgccttagctgtgctgccagcggcagtgtgttcagcggcaatgtaatgggttggtacaggcgacaagccccaggcaaggagcgagagtgggtagccgcgattgcaagtgggggcagcatctactacagagattctgtgaaaggccgcttcactattagtcgggacaacgcaaaaaacacggtgtatctccaaatgaacagcttgaagccagaggacactgctgtctactattgtaacagtcatcccccaactctcccctattgggggctgggcactcaggtcaccgtgagttccggtaccggcggaggcggatctggcggcggaggtagcggtggcggaggatctgaattcgacgagatcgtgctgacacagagccctggaagcctggccgtgtctcctggcgagcgcgtgacaatgagctgcaagagcagccagagcgtgttcttcagcagctcccagaagaactacctggcctggtatcagcagatccccggccagagccccagactgctgatctactgggccagcaccagagaaagcggcgtgcccgatagattcaccggcagcggctctggcaccgacttcaccctgacaatcagcagcgtgcagcccgaggacctggctatctactactgccaccagtacctgagcagccggaccttcggccagggcaccaagctggaaatcaagagactcgaggacctgaagaacgtgttcccacctgaggtggccgtgttcgagcctagcgaggccgagatcagccacacccagaaagccaccctcgtgtgcctggctaccggcttctaccccgaccatgtggaactgtcttggtgggtcaacggcaaagaggtgcacagcggcgtgtgtaccgacccccagccactgaaagaacagcccgccctgaacgacagccggtactgcctgagcagcagactgagagtgtccgccaccttctggcagaacccccggaaccacttcagatgccaggtgcagttctacggcctgagcgagaacgacgagtggacccaggacagagccaagcccgtgacccagatcgtgtctgccgaagcctggggcagagccgattgcggctttaccagcgagagctaccagcagggcgtgctgagcgccaccatcctgtacgagatcctgctgggcaaggccaccctgtacgccgtgctggtgtctgccctggtgctgatggctatggtcaagcggaaggacagccggggaagggccaagcgatctggatctggagcaacaaacttctcactactcaaacaagcaggtgacgtggaggagaatcccgggcctactagtatggactggatttggcgcatccttttccttgtcggcgctgctaccggcgcgcattccttcgaacaggtgcaactgcagcagcctggcgctgaggtcgtgaagccaggcgcttccgtgaagatgtcctgcaaggccagcggctacaccttcaccagctactacatccactggatcaagcagacccctggacagggcctggaatgggtgggagtgatctaccccggcaacgacgacatcagctacaaccagaagttccagggcaaggccaccctgaccgccgacaagtctagcaccaccgcctacatgcaactgtccagcctgaccagcgaggacagcgccgtgtactactgcgccagagaagtgcggctgcggtacttcgatgtgtggggccagggaaccaccgtgaccgtgtcatctacgcgtatccagaaccctgatcctgccgtgtaccagctgcgggatagcaagagcagcgacaagagcgtgtgtctgttcaccgacttcgacagccagaccaacgtgtcccagagcaaggactccgacgtgtacatcaccgataagtgcgtgctggacatgcggagcatggacttcaagagcaactccgccgtggcctggtccaacaagtccgatttcgcctgcgccaacgccttcaacaacagcattatccccgaggacacattcttcccaagccccgagagcagctgcgacgtgaagctggtggaaaagagcttcgagacagacaccaacctgaacttccagaacctgagcgtgatcggcttcagaatcctgctgctgaaagtggccggctttaacctgctgatgaccctgcggctgtggtccagc

SEQ ID NO: 21645 - DNA, 2370 bp, Artificial Sequence
  Synthetic Polynucleotide
atggccttaccagtgaccgccttgctcctgccgctggccttgctgctccacgccgccaggccggaagttcaactggtggaatccggtggaggactggtgcaagcgggcggctcactgcgccttagctgtgctgccagcggcagtgtgttcagcggcaatgtaatgggttggtacaggcgacaagccccaggcaaggagcgagagtgggtagccgcgattgcaagtgggggcagcatctactacagagattctgtgaaaggccgcttcactattagtcgggacaacgcaaaaaacacggtgtatctccaaatgaacagcttgaagccagaggacactgctgtctactattgtaacagtcatcccccaactctcccctattgggggctgggcactcaggtcaccgtgagttccggtaccggcggaggcggatctggcggcggaggtagcggtggcggaggatctgaattcgacgacatcgtgatgacacagtcaccagatagcctcaccgtctccctgggggagcggaccaccattaattgtaaatccagccaaagcgtgctggactcaagcaagaacaagaatagcctcgcctggtatcagcagaagcccggtcagcctccaaagctgctgctttcttgggcctccaccagagagtccgggattcctgataggtttagtggttcaggctccggcacagattttactctgaccattgattctctccagccagaggattctgcaacttattactgccagcaaagcgcccactttcctataacttttggccagggaacccgacttgaaatcaagctcgagggacagcctaaggccaatcctaccgtgacactgttccctccaagcagcgaagaactccaggccaacaaggccacacttgtgtgcctgatctccgacttctaccctggggctgtgacagtggcttggaaggccgatggatctcctgtgaaagccggcgtggaaaccaccaagccatccaagcagagcaacaacaaatacgccgccagctcctacctgagcctgacacctgagcagtggaagtcccacagatcctacagctgccaagtgacccacgaaggcagcaccgtggaaaagacagtggcccctacagagtgcagccccatcaagaccgatgtgattacaatggaccccaaggacaactgctccaaggacgccaacgataccctgctgctccagctgaccaacaccagcgcctactacatgtacttgttgctgctgctgaagtccgtggtgtacttcgccatcatcacatgctgcctgctgcggagaaccgccttctgctgcaacggcgagaagtctagggccaagcgatctggatctggagcaacaaacttctcactactcaaacaagcaggtgacgtggaggagaatcccgggcctactagtatggactggatttggcgcatccttttccttgtcggcgctgctaccggcgcgcattccttcgaacaggtgcagctggtgcagagcggtgccgaagtgaagaaaccaggtgcatccgttaaagtttcatgtaaggctagtggatataccttcaccaattacggaatgaactgggtgaaacaggcccctggccagggactgaagtggatggggtggattaacacctacaccggggagccgacttatgcagacgactttaaggggcgggtcacgatgacctccgacacctccaccagtaccgcctacctggagctgcacaaccttaggtcagacgataccgccgtgtattactgtgcccgatggtcttggtccgacggatactatgtctacttcgactattggggccaggggaccacagttaccgtgtcctctacgcgtgcctctacaaagggaccctccgtgtttcctctggctcccagcagcaagtctacaagcggaggaacagccgctctgggctgcctggtcaaggattactttcccgagcctgtgaccgtgtcctggaatagcggagcactgacaagcggcgtgcacacctttccagccgtgctgcaaagcagcggcctgtactctctgagcagcgtggtcacagtgcctagctctagcctgggcacccagacctacatctgcaatgtgaaccacaagcctagcaacaccaaggtggacaagagagtggaacccaagagctgtgaagtgaaaaccgactccaccgaccacgtgaagcccaaagagacagagaacaccaagcagcccagcaagagctgccacaagcccaaggccatcgtgcacaccgagaaagtgaacatgatgagcctgaccgtgctgggcctgcggatgctgttcgccaaaaccgtggccgtgaacttcctgctgaccgccaagctgttcttcctc

SEQ ID NO: 21646 - DNA, 2358 bp, Artificial Sequence
  Synthetic Polynucleotide
atggccttaccagtgaccgccttgctcctgccgctggccttgctgctccacgccgccaggccggaagttcaactggtggaatccggtggaggactggtgcaagcgggcggctcactgcgccttagctgtgctgccagcggcagtgtgttcagcggcaatgtaatgggttggtacaggcgacaagccccaggcaaggagcgagagtgggtagccgcgattgcaagtgggggcagcatctactacagagattctgtgaaaggccgcttcactattagtcgggacaacgcaaaaaacacggtgtatctccaaatgaacagcttgaagccagaggacactgctgtctactattgtaacagtcatcccccaactctcccctattgggggctgggcactcaggtcaccgtgagttccggtaccggcggaggcggatctggcggcggaggtagcggtggcggaggatctgaattcgacgagatcgtgctgacacagagccctggaagcctggccgtgtctcctggcgagcgcgtgacaatgagctgcaagagcagccagagcgtgttcttcagcagctcccagaagaactacctggcctggtatcagcagatccccggccagagccccagactgctgatctactgggccagcaccagagaaagcggcgtgcccgatagattcaccggcagcggctctggcaccgacttcaccctgacaatcagcagcgtgcagcccgaggacctggctatctactactgccaccagtacctgagcagccggaccttcggccagggcaccaagctggaaatcaagagactcgagggacagcctaaggccaatcctaccgtgacactgttccctccaagcagcgaagaactccaggccaacaaggccacacttgtgtgcctgatctccgacttctaccctggggctgtgacagtggcttggaaggccgatggatctcctgtgaaagccggcgtggaaaccaccaagccatccaagcagagcaacaacaaatacgccgccagctcctacctgagcctgacacctgagcagtggaagtcccacagatcctacagctgccaagtgacccacgaaggcagcaccgtggaaaagacagtggcccctacagagtgcagccccatcaagaccgatgtgattacaatggaccccaaggacaactgctccaaggacgccaacgataccctgctgctccagctgaccaacaccagcgcctactacatgtacttgttgctgctgctgaagtccgtggtgtacttcgccatcatcacatgctgcctgctgcggagaaccgccttctgctgcaacggcgagaagtctagggccaagcgatctggatctggagcaacaaacttctcactactcaaacaagcaggtgacgtggaggagaatcccgggcctactagtatggactggatttggcgcatccttttccttgtcggcgctgctaccggcgcgcattccttcgaacaggtgcaactgcagcagcctggcgctgaggtcgtgaagccaggcgcttccgtgaagatgtcctgcaaggccagcggctacaccttcaccagctactacatccactggatcaagcagacccctggacagggcctggaatgggtgggagtgatctaccccggcaacgacgacatcagctacaaccagaagttccagggcaaggccaccctgaccgccgacaagtctagcaccaccgcctacatgcaactgtccagcctgaccagcgaggacagcgccgtgtactactgcgccagagaagtgcggctgcggtacttcgatgtgtggggccagggaaccaccgtgaccgtgtcatctacgcgtgcctctacaaagggaccctccgtgtttcctctggctcccagcagcaagtctacaagcggaggaacagccgctctgggctgcctggtcaaggattactttcccgagcctgtgaccgtgtcctggaatagcggagcactgacaagcggcgtgcacacctttccagccgtgctgcaaagcagcggcctgtactctctgagcagcgtggtcacagtgcctagctctagcctgggcacccagacctacatctgcaatgtgaaccacaagcctagcaacaccaaggtggacaagagagtggaacccaagagctgtgaagtgaaaaccgactccaccgaccacgtgaagcccaaagagacagagaacaccaagcagcccagcaagagctgccacaagcccaaggccatcgtgcacaccgagaaagtgaacatgatgagcctgaccgtgctgggcctgcggatgctgttcgccaaaaccgtggccgtgaacttcctgctgaccgccaagctgttcttcctc

SEQ ID NO: 21647 - DNA, 2313 bp, Artificial Sequence
  Synthetic Polynucleotide
atggccttaccagtgaccgccttgctcctgccgctggccttgctgctccacgccgccaggccggaagttcaactggtggaatccggtggaggactggtgcaagcgggcggctcactgcgccttagctgtgctgccagcggcagtgtgttcagcggcaatgtaatgggttggtacaggcgacaagccccaggcaaggagcgagagtgggtagccgcgattgcaagtgggggcagcatctactacagagattctgtgaaaggccgcttcactattagtcgggacaacgcaaaaaacacggtgtatctccaaatgaacagcttgaagccagaggacactgctgtctactattgtaacagtcatcccccaactctcccctattgggggctgggcactcaggtcaccgtgagttccggtaccggcggaggcggatctggcggcggaggtagcggtggcggaggatctgaattcgacgacatcgtgatgacacagtcaccagatagcctcaccgtctccctgggggagcggaccaccattaattgtaaatccagccaaagcgtgctggactcaagcaagaacaagaatagcctcgcctggtatcagcagaagcccggtcagcctccaaagctgctgctttcttgggcctccaccagagagtccgggattcctgataggtttagtggttcaggctccggcacagattttactctgaccattgattctctccagccagaggattctgcaacttattactgccagcaaagcgcccactttcctataacttttggccagggaacccgacttgaaatcaagctcgagggacagcctaaggccaatcctaccgtgacactgttccctccaagcagcgaagaactccaggccaacaaggccacacttgtgtgcctgatctccgacttctaccctggggctgtgacagtggcttggaaggccgatggatctcctgtgaaagccggcgtggaaaccaccaagccatccaagcagagcaacaacaaatacgccgccagctcctacctgagcctgacacctgagcagtggaagtcccacagatcctacagctgccaagtgacccacgaaggcagcaccgtggaaaagacagtggcccctacagagtgcagcggcagagccgattgcggctttaccagcgagagctaccagcagggcgtgctgagcgccaccatcctgtacgagatcctgctgggcaaggccaccctgtacgccgtgctggtgtctgccctggtgctgatggctatggtcaagcggaaggacagccggggacgcgccaagagaagcggatctggcgtgaagcagaccctgaatttcgacctgctgaagctggctggcgacgtggaatccaacccaggccctactagtatggactggatttggcgcatccttttccttgtcggcgctgctaccggcgcgcattccttcgaacaggtgcagctggtgcagagcggtgccgaagtgaagaaaccaggtgcatccgttaaagtttcatgtaaggctagtggatataccttcaccaattacggaatgaactgggtgaaacaggcccctggccagggactgaagtggatggggtggattaacacctacaccggggagccgacttatgcagacgactttaaggggcgggtcacgatgacctccgacacctccaccagtaccgcctacctggagctgcacaaccttaggtcagacgataccgccgtgtattactgtgcccgatggtcttggtccgacggatactatgtctacttcgactattggggccaggggaccacagttaccgtgtcctctacgcgtgcctctacaaagggaccctccgtgtttcctctggctcccagcagcaagtctacaagcggaggaacagccgctctgggctgcctggtcaaggattactttcccgagcctgtgaccgtgtcctggaatagcggagcactgacaagcggcgtgcacacctttccagccgtgctgcaaagcagcggcctgtactctctgagcagcgtggtcacagtgcctagctctagcctgggcacccagacctacatctgcaatgtgaaccacaagcctagcaacaccaaggtggacaagagagtggaacccaagagctgtatccccgaggacacattcttcccaagccccgagagcagctgcgacgtgaagctggtggaaaagagcttcgagacagacaccaacctgaacttccagaacctgagcgtgatcggcttcagaatcctgctgctgaaagtggccggctttaacctgctgatgaccctgcggctgtggtccagc

SEQ ID NO: 21648 - DNA, 2301 bp, Artificial Sequence
  Synthetic Polynucleotide
atggccttaccagtgaccgccttgctcctgccgctggccttgctgctccacgccgccaggccggaagttcaactggtggaatccggtggaggactggtgcaagcgggcggctcactgcgccttagctgtgctgccagcggcagtgtgttcagcggcaatgtaatgggttggtacaggcgacaagccccaggcaaggagcgagagtgggtagccgcgattgcaagtgggggcagcatctactacagagattctgtgaaaggccgcttcactattagtcgggacaacgcaaaaaacacggtgtatctccaaatgaacagcttgaagccagaggacactgctgtctactattgtaacagtcatcccccaactctcccctattgggggctgggcactcaggtcaccgtgagttccggtaccggcggaggcggatctggcggcggaggtagcggtggcggaggatctgaattcgacgagatcgtgctgacacagagccctggaagcctggccgtgtctcctggcgagcgcgtgacaatgagctgcaagagcagccagagcgtgttcttcagcagctcccagaagaactacctggcctggtatcagcagatccccggccagagccccagactgctgatctactgggccagcaccagagaaagcggcgtgcccgatagattcaccggcagcggctctggcaccgacttcaccctgacaatcagcagcgtgcagcccgaggacctggctatctactactgccaccagtacctgagcagccggaccttcggccagggcaccaagctggaaatcaagagactcgagggacagcctaaggccaatcctaccgtgacactgttccctccaagcagcgaagaactccaggccaacaaggccacacttgtgtgcctgatctccgacttctaccctggggctgtgacagtggcttggaaggccgatggatctcctgtgaaagccggcgtggaaaccaccaagccatccaagcagagcaacaacaaatacgccgccagctcctacctgagcctgacacctgagcagtggaagtcccacagatcctacagctgccaagtgacccacgaaggcagcaccgtggaaaagacagtggcccctacagagtgcagcggcagagccgattgcggctttaccagcgagagctaccagcagggcgtgctgagcgccaccatcctgtacgagatcctgctgggcaaggccaccctgtacgccgtgctggtgtctgccctggtgctgatggctatggtcaagcggaaggacagccggggacgcgccaagagaagcggatctggcgtgaagcagaccctgaatttcgacctgctgaagctggctggcgacgtggaatccaacccaggccctactagtatggactggatttggcgcatccttttccttgtcggcgctgctaccggcgcgcattccttcgaacaggtgcaactgcagcagcctggcgctgaggtcgtgaagccaggcgcttccgtgaagatgtcctgcaaggccagcggctacaccttcaccagctactacatccactggatcaagcagacccctggacagggcctggaatgggtgggagtgatctaccccggcaacgacgacatcagctacaaccagaagttccagggcaaggccaccctgaccgccgacaagtctagcaccaccgcctacatgcaactgtccagcctgaccagcgaggacagcgccgtgtactactgcgccagagaagtgcggctgcggtacttcgatgtgtggggccagggaaccaccgtgaccgtgtcatctacgcgtgcctctacaaagggaccctccgtgtttcctctggctcccagcagcaagtctacaagcggaggaacagccgctctgggctgcctggtcaaggattactttcccgagcctgtgaccgtgtcctggaatagcggagcactgacaagcggcgtgcacacctttccagccgtgctgcaaagcagcggcctgtactctctgagcagcgtggtcacagtgcctagctctagcctgggcacccagacctacatctgcaatgtgaaccacaagcctagcaacaccaaggtggacaagagagtggaacccaagagctgtatccccgaggacacattcttcccaagccccgagagcagctgcgacgtgaagctggtggaaaagagcttcgagacagacaccaacctgaacttccagaacctgagcgtgatcggcttcagaatcctgctgctgaaagtggccggctttaacctgctgatgaccctgcggctgtggtccagc

SEQ ID NO: 21649 - DNA, 2280 bp, Artificial Sequence
  Synthetic Polynucleotide
atggccttaccagtgaccgccttgctcctgccgctggccttgctgctccacgccgccaggccggaagttcaactggtggaatccggtggaggactggtgcaagcgggcggctcactgcgccttagctgtgctgccagcggcagtgtgttcagcggcaatgtaatgggttggtacaggcgacaagccccaggcaaggagcgagagtgggtagccgcgattgcaagtgggggcagcatctactacagagattctgtgaaaggccgcttcactattagtcgggacaacgcaaaaaacacggtgtatctccaaatgaacagcttgaagccagaggacactgctgtctactattgtaacagtcatcccccaactctcccctattgggggctgggcactcaggtcaccgtgagttccggtaccggcggaggcggatctggcggcggaggtagcggtggcggaggatctgaattcgacgacatccaaatgacacagagtccttctagtttgagtgcgagcgtgggggacagggtgaccattacctgcagggccagccagagcataagctcataccttaattggtaccagcaaaaaccaggtaaggcccctaagctcctgatctacgcggcctcttcacttcaatctggggtcccttcccgcttcagtggctccggcagcggcaccgacttcacgctcactatatcaagtctgcagcctgaggatctcgccacctattactgtcaacaaagttattccacccctttcacctttggaccgggcacgaaagtggatattaagctcgaggacctgaagaacgtgttcccacctgaggtggccgtgttcgagcctagcgaggccgagatcagccacacccagaaagccaccctcgtgtgcctggctaccggcttctaccccgaccatgtggaactgtcttggtgggtcaacggcaaagaggtgcacagcggcgtgtgtaccgacccccagccactgaaagaacagcccgccctgaacgacagccggtactgcctgagcagcagactgagagtgtccgccaccttctggcagaacccccggaaccacttcagatgccaggtgcagttctacggcctgagcgagaacgacgagtggacccaggacagagccaagcccgtgacccagatcgtgtctgccgaagcctggggcagagccgattgcggctttaccagcgagagctaccagcagggcgtgctgagcgccaccatcctgtacgagatcctgctgggcaaggccaccctgtacgccgtgctggtgtctgccctggtgctgatggctatggtcaagcggaaggacagccggggaagggccaagcgatctggatctggagcaacaaacttctcactactcaaacaagcaggtgacgtggaggagaatcccgggcctactagtatggactggatttggcgcatccttttccttgtcggcgctgctaccggcgcgcattccttcgaagtgcacgaggtccagcttgtgcagtccggggcagaggtcaagaagcctggttctagcgtaaaagtgagttgcaaagcctcaggtgggacattttcatcctacgcgatcagttgggttagacaggctcctggtcaagggctggaatggatgggcggaattattccaatcttcggaacagcgaattacgcgcagaagttccagggtagagtaaccatcactgctgacaagtccacctccaccgcatacatggaattgtctagtctccggagcgaggatacggcggtgtattattgtgctacgttcgccctgtttggcttccgcgaacaggctttcgacatctgggggcagggcacgacagtcacggttagtagtacgcgtatccagaaccctgatcctgccgtgtaccagctgcgggatagcaagagcagcgacaagagcgtgtgtctgttcaccgacttcgacagccagaccaacgtgtcccagagcaaggactccgacgtgtacatcaccgataagtgcgtgctggacatgcggagcatggacttcaagagcaactccgccgtggcctggtccaacaagtccgatttcgcctgcgccaacgccttcaacaacagcattatccccgaggacacattcttcccaagccccgagagcagctgcgacgtgaagctggtggaaaagagcttcgagacagacaccaacctgaacttccagaacctgagcgtgatcggcttcagaatcctgctgctgaaagtggccggctttaacctgctgatgaccctgcggctgtggtccagc

SEQ ID NO: 21650 - DNA, 2358 bp, Artificial Sequence
  Synthetic Polynucleotide
atggccttaccagtgaccgccttgctcctgccgctggccttgctgctccacgccgccaggccggaagttcaactggtggaatccggtggaggactggtgcaagcgggcggctcactgcgccttagctgtgctgccagcggcagtgtgttcagcggcaatgtaatgggttggtacaggcgacaagccccaggcaaggagcgagagtgggtagccgcgattgcaagtgggggcagcatctactacagagattctgtgaaaggccgcttcactattagtcgggacaacgcaaaaaacacggtgtatctccaaatgaacagcttgaagccagaggacactgctgtctactattgtaacagtcatcccccaactctcccctattgggggctgggcactcaggtcaccgtgagttccggtaccggcggaggcggatctggcggcggaggtagcggtggcggaggatctgaattcgacgacatccaaatgacacagagtccttctagtttgagtgcgagcgtgggggacagggtgaccattacctgcagggccagccagagcataagctcataccttaattggtaccagcaaaaaccaggtaaggcccctaagctcctgatctacgcggcctcttcacttcaatctggggtcccttcccgcttcagtggctccggcagcggcaccgacttcacgctcactatatcaagtctgcagcctgaggatctcgccacctattactgtcaacaaagttattccacccctttcacctttggaccgggcacgaaagtggatattaagctcgagggacagcctaaggccaatcctaccgtgacactgttccctccaagcagcgaagaactccaggccaacaaggccacacttgtgtgcctgatctccgacttctaccctggggctgtgacagtggcttggaaggccgatggatctcctgtgaaagccggcgtggaaaccaccaagccatccaagcagagcaacaacaaatacgccgccagctcctacctgagcctgacacctgagcagtggaagtcccacagatcctacagctgccaagtgacccacgaaggcagcaccgtggaaaagacagtggcccctacagagtgcagccccatcaagaccgatgtgattacaatggaccccaaggacaactgctccaaggacgccaacgataccctgctgctccagctgaccaacaccagcgcctactacatgtacttgttgctgctgctgaagtccgtggtgtacttcgccatcatcacatgctgcctgctgcggagaaccgccttctgctgcaacggcgagaagtctagggccaagcgatctggatctggagcaacaaacttctcactactcaaacaagcaggtgacgtggaggagaatcccgggcctactagtatggactggatttggcgcatccttttccttgtcggcgctgctaccggcgcgcattccttcgaagtgcacgaggtccagcttgtgcagtccggggcagaggtcaagaagcctggttctagcgtaaaagtgagttgcaaagcctcaggtgggacattttcatcctacgcgatcagttgggttagacaggctcctggtcaagggctggaatggatgggcggaattattccaatcttcggaacagcgaattacgcgcagaagttccagggtagagtaaccatcactgctgacaagtccacctccaccgcatacatggaattgtctagtctccggagcgaggatacggcggtgtattattgtgctacgttcgccctgtttggcttccgcgaacaggctttcgacatctgggggcagggcacgacagtcacggttagtagtacgcgtgcctctacaaagggaccctccgtgtttcctctggctcccagcagcaagtctacaagcggaggaacagccgctctgggctgcctggtcaaggattactttcccgagcctgtgaccgtgtcctggaatagcggagcactgacaagcggcgtgcacacctttccagccgtgctgcaaagcagcggcctgtactctctgagcagcgtggtcacagtgcctagctctagcctgggcacccagacctacatctgcaatgtgaaccacaagcctagcaacaccaaggtggacaagagagtggaacccaagagctgtgaagtgaaaaccgactccaccgaccacgtgaagcccaaagagacagagaacaccaagcagcccagcaagagctgccacaagcccaaggccatcgtgcacaccgagaaagtgaacatgatgagcctgaccgtgctgggcctgcggatgctgttcgccaaaaccgtggccgtgaacttcctgctgaccgccaagctgttcttcctc

SEQ ID NO: 21651 - DNA, 2301 bp, Artificial Sequence
  Synthetic Polynucleotide
atggccttaccagtgaccgccttgctcctgccgctggccttgctgctccacgccgccaggccggaagttcaactggtggaatccggtggaggactggtgcaagcgggcggctcactgcgccttagctgtgctgccagcggcagtgtgttcagcggcaatgtaatgggttggtacaggcgacaagccccaggcaaggagcgagagtgggtagccgcgattgcaagtgggggcagcatctactacagagattctgtgaaaggccgcttcactattagtcgggacaacgcaaaaaacacggtgtatctccaaatgaacagcttgaagccagaggacactgctgtctactattgtaacagtcatcccccaactctcccctattgggggctgggcactcaggtcaccgtgagttccggtaccggcggaggcggatctggcggcggaggtagcggtggcggaggatctgaattcgacgacatccaaatgacacagagtccttctagtttgagtgcgagcgtgggggacagggtgaccattacctgcagggccagccagagcataagctcataccttaattggtaccagcaaaaaccaggtaaggcccctaagctcctgatctacgcggcctcttcacttcaatctggggtcccttcccgcttcagtggctccggcagcggcaccgacttcacgctcactatatcaagtctgcagcctgaggatctcgccacctattactgtcaacaaagttattccacccctttcacctttggaccgggcacgaaagtggatattaagctcgagggacagcctaaggccaatcctaccgtgacactgttccctccaagcagcgaagaactccaggccaacaaggccacacttgtgtgcctgatctccgacttctaccctggggctgtgacagtggcttggaaggccgatggatctcctgtgaaagccggcgtggaaaccaccaagccatccaagcagagcaacaacaaatacgccgccagctcctacctgagcctgacacctgagcagtggaagtcccacagatcctacagctgccaagtgacccacgaaggcagcaccgtggaaaagacagtggcccctacagagtgcagcggcagagccgattgcggctttaccagcgagagctaccagcagggcgtgctgagcgccaccatcctgtacgagatcctgctgggcaaggccaccctgtacgccgtgctggtgtctgccctggtgctgatggctatggtcaagcggaaggacagccggggacgcgccaagagaagcggatctggcgtgaagcagaccctgaatttcgacctgctgaagctggctggcgacgtggaatccaacccaggccctactagtatggactggatttggcgcatccttttccttgtcggcgctgctaccggcgcgcattccttcgaagtgcacgaggtccagcttgtgcagtccggggcagaggtcaagaagcctggttctagcgtaaaagtgagttgcaaagcctcaggtgggacattttcatcctacgcgatcagttgggttagacaggctcctggtcaagggctggaatggatgggcggaattattccaatcttcggaacagcgaattacgcgcagaagttccagggtagagtaaccatcactgctgacaagtccacctccaccgcatacatggaattgtctagtctccggagcgaggatacggcggtgtattattgtgctacgttcgccctgtttggcttccgcgaacaggctttcgacatctgggggcagggcacgacagtcacggttagtagtacgcgtgcctctacaaagggaccctccgtgtttcctctggctcccagcagcaagtctacaagcggaggaacagccgctctgggctgcctggtcaaggattactttcccgagcctgtgaccgtgtcctggaatagcggagcactgacaagcggcgtgcacacctttccagccgtgctgcaaagcagcggcctgtactctctgagcagcgtggtcacagtgcctagctctagcctgggcacccagacctacatctgcaatgtgaaccacaagcctagcaacaccaaggtggacaagagagtggaacccaagagctgtatccccgaggacacattcttcccaagccccgagagcagctgcgacgtgaagctggtggaaaagagcttcgagacagacaccaacctgaacttccagaacctgagcgtgatcggcttcagaatcctgctgctgaaagtggccggctttaacctgctgatgaccctgcggctgtggtccagc

SEQ ID NO: 21652 - DNA, 2259 bp, Artificial Sequence
  Synthetic Polynucleotide
atggccttaccagtgaccgccttgctcctgccgctggccttgctgctccacgccgccaggccggaagttcaactggtggaatccggtggaggactggtgcaagcgggcggctcactgcgccttagctgtgctgccagcggcagtgtgttcagcggcaatgtaatgggttggtacaggcgacaagccccaggcaaggagcgagagtgggtagccgcgattgcaagtgggggcagcatctactacagagattctgtgaaaggccgcttcactattagtcgggacaacgcaaaaaacacggtgtatctccaaatgaacagcttgaagccagaggacactgctgtctactattgtaacagtcatcccccaactctcccctattgggggctgggcactcaggtcaccgtgagttccggtaccggcggaggcggatctggcggcggaggtagcggtggcggaggatctgaattcgacgtggtcatgacacagagcccttctagcctgtctgccagcgtgggcgacagagtgaccatcacctgtatggcctccgaggacatctacatccggctggcctggtatcagcagaagcctggaaacgcccctaagctgctgatctacgccgccacctctctggaaacaggcgtgccaagcagattttccggcagcggctctggcaccgatttcaccctgacaatatccagcctccagcctgaggacttcgccacctactactgccagcagtattggagcagcccctggacatttggcggaggcaccaaggtggaaatcaaactcgaggacctgaagaacgtgttcccacctgaggtggccgtgttcgagcctagcgaggccgagatcagccacacccagaaagccaccctcgtgtgcctggctaccggcttctaccccgaccatgtggaactgtcttggtgggtcaacggcaaagaggtgcacagcggcgtgtgtaccgacccccagccactgaaagaacagcccgccctgaacgacagccggtactgcctgagcagcagactgagagtgtccgccaccttctggcagaacccccggaaccacttcagatgccaggtgcagttctacggcctgagcgagaacgacgagtggacccaggacagagccaagcccgtgacccagatcgtgtctgccgaagcctggggcagagccgattgcggctttaccagcgagagctaccagcagggcgtgctgagcgccaccatcctgtacgagatcctgctgggcaaggccaccctgtacgccgtgctggtgtctgccctggtgctgatggctatggtcaagcggaaggacagccggggaagggccaagcgatctggatctggagcaacaaacttctcactactcaaacaagcaggtgacgtggaggagaatcccgggcctactagtatggactggatttggcgcatccttttccttgtcggcgctgctaccggcgcgcattccttcgaacaggttcagctgcaagagtctggccccggactggtcaagcctagccaaacactgagcctgacctgtaccgtgtccggctacagcatcaccagcgactacacctggaactggatcagacagcctcctggcaacggactggaatggatcggctacatcacctacagcggcagcaccagctacaaccccagcctgaaaagccgggtgctgatctccgtggacaccagcaagaatcaggtgtccctgaagctgagcagcgtgacagccgctgataccgccgtgtactactgtgccagactggggagaagatacacaatggactactggggccagggcaccaccgtgacagtttcttctacgcgtatccagaaccctgatcctgccgtgtaccagctgcgggatagcaagagcagcgacaagagcgtgtgtctgttcaccgacttcgacagccagaccaacgtgtcccagagcaaggactccgacgtgtacatcaccgataagtgcgtgctggacatgcggagcatggacttcaagagcaactccgccgtggcctggtccaacaagtccgatttcgcctgcgccaacgccttcaacaacagcattatccccgaggacacattcttcccaagccccgagagcagctgcgacgtgaagctggtggaaaagagcttcgagacagacaccaacctgaacttccagaacctgagcgtgatcggcttcagaatcctgctgctgaaagtggccggctttaacctgctgatgaccctgcggctgtggtccagc

SEQ ID NO: 21653 - DNA, 2337 bp, Artificial Sequence
  Synthetic Polynucleotide
atggccttaccagtgaccgccttgctcctgccgctggccttgctgctccacgccgccaggccggaagttcaactggtggaatccggtggaggactggtgcaagcgggcggctcactgcgccttagctgtgctgccagcggcagtgtgttcagcggcaatgtaatgggttggtacaggcgacaagccccaggcaaggagcgagagtgggtagccgcgattgcaagtgggggcagcatctactacagagattctgtgaaaggccgcttcactattagtcgggacaacgcaaaaaacacggtgtatctccaaatgaacagcttgaagccagaggacactgctgtctactattgtaacagtcatcccccaactctcccctattgggggctgggcactcaggtcaccgtgagttccggtaccggcggaggcggatctggcggcggaggtagcggtggcggaggatctgaattcgacgtggtcatgacacagagcccttctagcctgtctgccagcgtgggcgacagagtgaccatcacctgtatggcctccgaggacatctacatccggctggcctggtatcagcagaagcctggaaacgcccctaagctgctgatctacgccgccacctctctggaaacaggcgtgccaagcagattttccggcagcggctctggcaccgatttcaccctgacaatatccagcctccagcctgaggacttcgccacctactactgccagcagtattggagcagcccctggacatttggcggaggcaccaaggtggaaatcaaactcgagggacagcctaaggccaatcctaccgtgacactgttccctccaagcagcgaagaactccaggccaacaaggccacacttgtgtgcctgatctccgacttctaccctggggctgtgacagtggcttggaaggccgatggatctcctgtgaaagccggcgtggaaaccaccaagccatccaagcagagcaacaacaaatacgccgccagctcctacctgagcctgacacctgagcagtggaagtcccacagatcctacagctgccaagtgacccacgaaggcagcaccgtggaaaagacagtggcccctacagagtgcagccccatcaagaccgatgtgattacaatggaccccaaggacaactgctccaaggacgccaacgataccctgctgctccagctgaccaacaccagcgcctactacatgtacttgttgctgctgctgaagtccgtggtgtacttcgccatcatcacatgctgcctgctgcggagaaccgccttctgctgcaacggcgagaagtctagggccaagcgatctggatctggagcaacaaacttctcactactcaaacaagcaggtgacgtggaggagaatcccgggcctactagtatggactggatttggcgcatccttttccttgtcggcgctgctaccggcgcgcattccttcgaacaggttcagctgcaagagtctggccccggactggtcaagcctagccaaacactgagcctgacctgtaccgtgtccggctacagcatcaccagcgactacacctggaactggatcagacagcctcctggcaacggactggaatggatcggctacatcacctacagcggcagcaccagctacaaccccagcctgaaaagccgggtgctgatctccgtggacaccagcaagaatcaggtgtccctgaagctgagcagcgtgacagccgctgataccgccgtgtactactgtgccagactggggagaagatacacaatggactactggggccagggcaccaccgtgacagtttcttctacgcgtgcctctacaaagggaccctccgtgtttcctctggctcccagcagcaagtctacaagcggaggaacagccgctctgggctgcctggtcaaggattactttcccgagcctgtgaccgtgtcctggaatagcggagcactgacaagcggcgtgcacacctttccagccgtgctgcaaagcagcggcctgtactctctgagcagcgtggtcacagtgcctagctctagcctgggcacccagacctacatctgcaatgtgaaccacaagcctagcaacaccaaggtggacaagagagtggaacccaagagctgtgaagtgaaaaccgactccaccgaccacgtgaagcccaaagagacagagaacaccaagcagcccagcaagagctgccacaagcccaaggccatcgtgcacaccgagaaagtgaacatgatgagcctgaccgtgctgggcctgcggatgctgttcgccaaaaccgtggccgtgaacttcctgctgaccgccaagctgttcttcctc

SEQ ID NO: 21654 - DNA, 2691 bp, Artificial Sequence
  Synthetic Polynucleotide
atggccttaccagtgaccgccttgctcctgccgctggccttgctgctccacgccgccaggccggaagttcaactggtggaatccggtggaggactggtgcaagcgggcggctcactgcgccttagctgtgctgccagcggcagtgtgttcagcggcaatgtaatgggttggtacaggcgacaagccccaggcaaggagcgagagtgggtagccgcgattgcaagtgggggcagcatctactacagagattctgtgaaaggccgcttcactattagtcgggacaacgcaaaaaacacggtgtatctccaaatgaacagcttgaagccagaggacactgctgtctactattgtaacagtcatcccccaactctcccctattgggggctgggcactcaggtcaccgtgagttccggtaccggcggaggcggatctggcggcggaggtagcggtggcggaggatctgaattcgacgtggtcatgacacagagcccttctagcctgtctgccagcgtgggcgacagagtgaccatcacctgtatggcctccgaggacatctacatccggctggcctggtatcagcagaagcctggaaacgcccctaagctgctgatctacgccgccacctctctggaaacaggcgtgccaagcagattttccggcagcggctctggcaccgatttcaccctgacaatatccagcctccagcctgaggacttcgccacctactactgccagcagtattggagcagcccctggacatttggcggaggcaccaaggtggaaatcaaactcgagggacagcctaaggccaatcctaccgtgacactgttccctccaagcagcgaagaactccaggccaacaaggccacacttgtgtgcctgatctccgacttctaccctggggctgtgacagtggcttggaaggccgatggatctcctgtgaaagccggcgtggaaaccaccaagccatccaagcagagcaacaacaaatacgccgccagctcctacctgagcctgacacctgagcagtggaagtcccacagatcctacagctgccaagtgacccacgaaggcagcaccgtggaaaagacagtggcccctacagagtgcagcggcagagccgattgcggctttaccagcgagagctaccagcagggcgtgctgagcgccaccatcctgtacgagatcctgctgggcaaggccaccctgtacgccgtgctggtgtctgccctggtgctgatggctatggtcaagcggaaggacagccggggacgcgccaagagaagcggatctggcgtgaagcagaccctgaatttcgacctgctgaagctggctggcgacgtggaatccaacccaggccctactagtatggactggatttggcgcatccttttccttgtcggcgctgctaccggcgcgcattccgggccccagctccagctgcaagagtctggacctggcctggtcaagcctagcgagacactgagcctgacctgtaccgtgtccggcgatagcatcagcagcggcgattactactggggctggatcagacagcctcctggcaaaggactggaatggatcggccacatctactacagcggcgtgacctactacaaccccagcctgaagtccagagtgaccatcagcgtggacaccagccggaaccagttctccctgaagctgtctagcgtgacagccgccgataccgccgtgtactactgcaccagagaggacagcagcaactggcggagtagaggccagggaacactggtcacagttagctctggatccggcggaggcggaagtggaggcggaggatctggcggcggaggctctttcgaacaggttcagctgcaagagtctggccccggactggtcaagcctagccaaacactgagcctgacctgtaccgtgtccggctacagcatcaccagcgactacacctggaactggatcagacagcctcctggcaacggactggaatggatcggctacatcacctacagcggcagcaccagctacaaccccagcctgaaaagccgggtgctgatctccgtggacaccagcaagaatcaggtgtccctgaagctgagcagcgtgacagccgctgataccgccgtgtactactgtgccagactggggagaagatacacaatggactactggggccagggcaccaccgtgacagtttcttctacgcgtgcctctacaaagggaccctccgtgtttcctctggctcccagcagcaagtctacaagcggaggaacagccgctctgggctgcctggtcaaggattactttcccgagcctgtgaccgtgtcctggaatagcggagcactgacaagcggcgtgcacacctttccagccgtgctgcaaagcagcggcctgtactctctgagcagcgtggtcacagtgcctagctctagcctgggcacccagacctacatctgcaatgtgaaccacaagcctagcaacaccaaggtggacaagagagtggaacccaagagctgtatccccgaggacacattcttcccaagccccgagagcagctgcgacgtgaagctggtggaaaagagcttcgagacagacaccaacctgaacttccagaacctgagcgtgatcggcttcagaatcctgctgctgaaagtggccggctttaacctgctgatgaccctgcggctgtggtccagc

SEQ ID NO: 21655 - DNA, 2868 bp, Artificial Sequence; identical to SEQ ID NO: 21638
  Synthetic Polynucleotide

SEQ ID NO: 21656 - DNA, 2946 bp, Artificial Sequence; identical to SEQ ID NO: 21639
  Synthetic Polynucleotide

SEQ ID NO: 21657 - DNA, 2880 bp, Artificial Sequence; identical to SEQ ID NO: 21640
  Synthetic Polynucleotide

SEQ ID NO: 21658 - DNA, 2079 bp, Artificial Sequence; identical to SEQ ID NO: 21641
  Synthetic Polynucleotide

SEQ ID NO: 21659 - DNA, 2346 bp, Artificial Sequence; identical to SEQ ID NO: 21642
  Synthetic Polynucleotide

SEQ ID NO: 21660-21661 - skipped (2 entries)

SEQ ID NO: 21662 - DNA, 1494 bp, Artificial Sequence
  Synthetic Polynucleotide
atggccttaccagtgaccgccttgctcctgccgctggccttgctgctccacgccgccaggccggaagtgcagctggttgaatcaggtggcggcctggttcaacctggcggatctctgagactgagctgtgccgccagcggcttcacctttaccgactacacaatccactgggtccgacaggcccctggcaaaggacttgagtgggtcgccaacatcaaccccaacaatggcggcaccacctacaaccagaagttcgaggacagattcaccatcagccgggacaacagcaagaacaccctgtacctccagatgaactccctgagagccgaggacaccgccgtgtactattgtgccagaggctggaacttcgactactggggccagggaacactggtcaccgttagctctggcggaggcggaagtggaggcggaggatctggcggcggaggctctgacatccagatgacacagagccctagcagcctgtctgccagcgtgggagacagagtgaccatcacatgcaaggccagccaggatgtgggcacagccgtggattggtatcagcagaagcctggcaaggcccctaagctgctgatctactgggccagcacaagacacacaggcgtgcccagcagattttctggcagcggctctggcaccgacttcaccctgacaatatccagcctccagcctgaggacttcgccacctactactgtcagcagagctggaacaccccttggacattcggccagggcaccaagctggaaatcaagagaacgcgtgagcagaaactgatctcggaagaggatctggcgaagcccaccacgacgccagcgccgcgaccaccaacaccggcgcccaccatcgcgtcgcagcccctgtccctgcgcccagaggcgtgccggccagcggcggggggcgcagtgcacacgagggggctggacttcgcctgtgacatctacatctgggcgcccttggccgggacttgtggggtccttctcctgtcactggttatcaccctttactgcaaacggggcagaaagaaactcctgtatatattcaaacaaccatttatgagaccagtacaaactactcaagaggaagatggctgtagctgccgatttccagaagaagaagaaggaggatgtgaactgagagtgaagttcagcaggagcgcagacgcccccgcgtaccagcagggccagaaccagctctataacgagctgaatctaggacgaagagaggagtacgatgttttggacaagagacgtggccgggaccctgagatggggggaaagccgagaaggaagaaccctcaggaaggcctgtacaatgaactgcagaaagataagatggcggaggcctacagtgagattgggatgaaaggcgagcgccggaggggcaaggggcacgatggcctttaccagggtctcagtacagccaccaaggacacctacgacgcccttcacatgcaggccctgccccctcgctga

SEQ ID NO: 21663 - DNA, 2553 bp, Artificial Sequence
  Synthetic Polynucleotide
atggccttaccagtgaccgccttgctcctgccgctggccttgctgctccacgccgccaggccggacatccagatgacacagagccctagcagcctgtctgccagcgtgggagacagagtgaccatcacatgcaaggccagccaggatgtgggcacagccgtggattggtatcagcagaagcctggcaaggcccctaagctgctgatctactgggccagcacaagacacacaggcgtgcccagcagattttctggcagcggctctggcaccgacttcaccctgacaatatccagcctccagcctgaggacttcgccacctactactgtcagcagagctggaacaccccttggacattcggccagggcaccaagctggaaatcaagagactcgagatccagaaccctgatcctgccgtgtaccagctgcgggatagcaagagcagcgacaagagcgtgtgtctgttcaccgacttcgacagccagaccaacgtgtcccagagcaaggactccgacgtgtacatcaccgataagtgcgtgctggacatgcggagcatggacttcaagagcaactccgccgtggcctggtccaacaagtccgatttcgcctgcgccaacgccttcaacaacagcattatccccgaggacacattcttcccaagcagcgacgtgccctgcgacgtgaagctggtggaaaagagcttcgagacagacaccaacctgaacttccagaacctgagcgtgatcggcttcagaatcctgctgctgaaagtggccggctttaacctgctgatgaccctgcggctgtggtccagccgcgccaagagaagcggatctggcgtgaagcagaccctgaatttcgacctgctgaagctggctggcgacgtggaatccaacccaggccctactagtatggactggatttggcgcatccttttccttgtcggcgctgctaccggcgcgcattccttcgaagaagtgcagctggttgaatcaggtggcggcctggttcaacctggcggatctctgagactgagctgtgccgccagcggcttcacctttaccgactacacaatccactgggtccgacaggcccctggcaaaggacttgagtgggtcgccaacatcaaccccaacaatggcggcaccacctacaaccagaagttcgaggacagattcaccatcagccgggacaacagcaagaacaccctgtacctccagatgaactccctgagagccgaggacaccgccgtgtactattgtgccagaggctggaacttcgactactggggccagggaacactggtcaccgttagctctacgcgtgaggacctgaagaacgtgttcccacctgaggtggccgtgttcgagcctagcaaggccgagatcgcccacacccagaaagccaccctcgtgtgcctggctaccggcttctaccccgaccatgtggaactgtcttggtgggtcaacggcaaagaggtgcacagcggcgtgtgtaccgacccccagccactgaaagaacagcccgccctgaacgacagccggtactgcctgagcagcagactgagagtgtccgccaccttctggcagaacccccggaaccacttcagatgccaggtgcagttctacggcctgagcgagaacgacgagtggacccaggacagagccaagcccgtgacccagatcgtgtctgccgaagcctggggcagagccgattgcggcatcaccagcgccagctaccaccagggcgtgctgagcgccaccatcctgtacgagatcctgctgggcaaggccaccctgtacgccgtgctggtgtctgccctggtgctgatggctatggtcaagcggaaggacagccggggaagggccaagcgatctggatctggagcaacaaacttctcactactcaaacaagcaggtgacgtggaggagaatcccgggccttctagaggccatatgaccgagtacaagcccacggtgcgcctcgccacccgcgacgacgtccccagggccgtacgcaccctcgccgccgcgttcgccgactaccccgccacgcgccacaccgtcgatccggaccgccacatcgagcgggtcaccgagctgcaagaactcttcctcacgcgcgtcgggctcgacatcggcaaggtgtgggtcgcggacgacggcgccgcggtggcggtctggaccacgccggagagcgtcgaagcgggggcggtgttcgccgagatcggcccgcgcatggccgagttgagcggttcccggctggccgcgcagcaacagatggaaggcctcctggcgccgcaccggcccaaggagcccgcgtggttcctggccaccgtcggcgtctcgcccgaccaccagggcaagggtctgggcagcgccgtcgtgctccccggagtggaggcggccgagcgcgccggggtgcccgccttcctggagacctccgcgccccgcaacctccccttctacgagcggctcggcttcaccgtcaccgccgacgtcgaggtgcccgaaggaccgcgcacctggtgcatgacccgcaagcccggtgcctga

SEQ ID NO: 21664 - DNA, 2550 bp, Artificial Sequence
  Synthetic Polynucleotide
atggccttaccagtgaccgccttgctcctgccgctggccttgctgctccacgccgccaggccggacatccagatgacacagagccctagcagcctgtctgccagcgtgggagacagagtgaccatcacatgcaaggccagccaggatgtgggcacagccgtggattggtatcagcagaagcctggcaaggcccctaagctgctgatctactgggccagcacaagacacacaggcgtgcccagcagattttctggcagcggctctggcaccgacttcaccctgacaatatccagcctccagcctgaggacttcgccacctactactgtcagcagagctggaacaccccttggacattcggccagggcaccaagctggaaatcaagagactcgaggacctgaagaacgtgttcccacctgaggtggccgtgttcgagcctagcaaggccgagatcgcccacacccagaaagccaccctcgtgtgcctggctaccggcttctaccccgaccatgtggaactgtcttggtgggtcaacggcaaagaggtgcacagcggcgtgtgtaccgacccccagccactgaaagaacagcccgccctgaacgacagccggtactgcctgagcagcagactgagagtgtccgccaccttctggcagaacccccggaaccacttcagatgccaggtgcagttctacggcctgagcgagaacgacgagtggacccaggacagagccaagcccgtgacccagatcgtgtctgccgaagcctggggcagagccgattgcggcatcaccagcgccagctaccaccagggcgtgctgagcgccaccatcctgtacgagatcctgctgggcaaggccaccctgtacgccgtgctggtgtctgccctggtgctgatggctatggtcaagcggaaggacagccggggaagggccaagcgatctggatctggagcaacaaacttctcactactcaaacaagcaggtgacgtggaggagaatcccgggcctactagtatggactggatttggcgcatccttttccttgtcggcgctgctaccggcgcgcattccttcgaagaagtgcagctggttgaatcaggtggcggcctggttcaacctggcggatctctgagactgagctgtgccgccagcggcttcacctttaccgactacacaatccactgggtccgacaggcccctggcaaaggacttgagtgggtcgccaacatcaaccccaacaatggcggcaccacctacaaccagaagttcgaggacagattcaccatcagccgggacaacagcaagaacaccctgtacctccagatgaactccctgagagccgaggacaccgccgtgtactattgtgccagaggctggaacttcgactactggggccagggaacactggtcaccgttagctctacgcgtatccagaaccctgatcctgccgtgtaccagctgcgggatagcaagagcagcgacaagagcgtgtgtctgttcaccgacttcgacagccagaccaacgtgtcccagagcaaggactccgacgtgtacatcaccgataagtgcgtgctggacatgcggagcatggacttcaagagcaactccgccgtggcctggtccaacaagtccgatttcgcctgcgccaacgccttcaacaacagcattatccccgaggacacattcttcccaagcagcgacgtgccctgcgacgtgaagctggtggaaaagagcttcgagacagacaccaacctgaacttccagaacctgagcgtgatcggcttcagaatcctgctgctgaaagtggccggctttaacctgctgatgaccctgcggctgtggtccagccgcgccaagagaagcggatctggcgtgaagcagaccctgaatttcgacctgctgaagctggctggcgacgtggaatccaacccaggcccttctagaggccatatgaccgagtacaagcccacggtgcgcctcgccacccgcgacgacgtccccagggccgtacgcaccctcgccgccgcgttcgccgactaccccgccacgcgccacaccgtcgatccggaccgccacatcgagcgggtcaccgagctgcaagaactcttcctcacgcgcgtcgggctcgacatcggcaaggtgtgggtcgcggacgacggcgccgcggtggcggtctggaccacgccggagagcgtcgaagcgggggcggtgttcgccgagatcggcccgcgcatggccgagttgagcggttcccggctggccgcgcagcaacagatggaaggcctcctggcgccgcaccggcccaaggagcccgcgtggttcctggccaccgtcggcgtctcgcccgaccaccagggcaagggtctgggcagcgccgtcgtgctccccggagtggaggcggccgagcgcgccggggtgcccgccttcctggagacctccgcgccccgcaacctccccttctacgagcggctcggcttcaccgtcaccgccgacgtcgaggtgcccgaaggaccgcgcacctggtgcatgacccgcaagcccggtgcctga

SEQ ID NO: 21665 - DNA, 1848 bp, Artificial Sequence
  Synthetic Polynucleotide
atggccttaccagtgaccgccttgctcctgccgctggccttgctgctccacgccgccaggccggacatccagatgacacagagccctagcagcctgtctgccagcgtgggagacagagtgaccatcacatgcaaggccagccaggatgtgggcacagccgtggattggtatcagcagaagcctggcaaggcccctaagctgctgatctactgggccagcacaagacacacaggcgtgcccagcagattttctggcagcggctctggcaccgacttcaccctgacaatatccagcctccagcctgaggacttcgccacctactactgtcagcagagctggaacaccccttggacattcggccagggcaccaagctggaaatcaagagactcgaggacctgaagaacgtgttcccacctgaggtggccgtgttcgagcctagcgaggccgagatcagccacacccagaaagccaccctcgtgtgcctggctaccggcttctaccccgaccatgtggaactgtcttggtgggtcaacggcaaagaggtgcacagcggcgtgtgtaccgacccccagccactgaaagaacagcccgccctgaacgacagccggtactgcctgagcagcagactgagagtgtccgccaccttctggcagaacccccggaaccacttcagatgccaggtgcagttctacggcctgagcgagaacgacgagtggacccaggacagagccaagcccgtgacccagatcgtgtctgccgaagcctggggcagagccgattgcggctttaccagcgagagctaccagcagggcgtgctgagcgccaccatcctgtacgagatcctgctgggcaaggccaccctgtacgccgtgctggtgtctgccctggtgctgatggctatggtcaagcggaaggacagccggggaagggccaagcgatctggatctggagcaacaaacttctcactactcaaacaagcaggtgacgtggaggagaatcccgggcctactagtatggactggatttggcgcatccttttccttgtcggcgctgctaccggcgcgcattccttcgaagaagtgcagctggttgaatcaggtggcggcctggttcaacctggcggatctctgagactgagctgtgccgccagcggcttcacctttaccgactacacaatccactgggtccgacaggcccctggcaaaggacttgagtgggtcgccaacatcaaccccaacaatggcggcaccacctacaaccagaagttcgaggacagattcaccatcagccgggacaacagcaagaacaccctgtacctccagatgaactccctgagagccgaggacaccgccgtgtactattgtgccagaggctggaacttcgactactggggccagggaacactggtcaccgttagctctacgcgtatccagaaccctgatcctgccgtgtaccagctgcgggatagcaagagcagcgacaagagcgtgtgtctgttcaccgacttcgacagccagaccaacgtgtcccagagcaaggactccgacgtgtacatcaccgataagtgcgtgctggacatgcggagcatggacttcaagagcaactccgccgtggcctggtccaacaagtccgatttcgcctgcgccaacgccttcaacaacagcattatccccgaggacacattcttcccaagccccgagagcagctgcgacgtgaagctggtggaaaagagcttcgagacagacaccaacctgaacttccagaacctgagcgtgatcggcttcagaatcctgctgctgaaagtggccggctttaacctgctgatgaccctgcggctgtggtccagc

SEQ ID NO: 21666 - DNA, 1860 bp, Artificial Sequence
  Synthetic Polynucleotide
atggccttaccagtgaccgccttgctcctgccgctggccttgctgctccacgccgccaggccggacatccagatgacacagagccctagcagcctgtctgccagcgtgggagacagagtgaccatcacatgcaaggccagccaggatgtgggcacagccgtggattggtatcagcagaagcctggcaaggcccctaagctgctgatctactgggccagcacaagacacacaggcgtgcccagcagattttctggcagcggctctggcaccgacttcaccctgacaatatccagcctccagcctgaggacttcgccacctactactgtcagcagagctggaacaccccttggacattcggccagggcaccaagctggaaatcaagagactcgagatccagaaccctgatcctgccgtgtaccagctgcgggatagcaagagcagcgacaagagcgtgtgtctgttcaccgacttcgacagccagaccaacgtgtcccagagcaaggactccgacgtgtacatcaccgataagtgcgtgctggacatgcggagcatggacttcaagagcaactccgccgtggcctggtccaacaagtccgatttcgcctgcgccaacgccttcaacaacagcattatccccgaggacacattcttcccaagccccgagagcagctgcgacgtgaagctggtggaaaagagcttcgagacagacaccaacctgaacttccagaacctgagcgtgatcggcttcagaatcctgctgctgaaagtggccggctttaacctgctgatgaccctgcggctgtggtccagccgcgccaagagaagcggatctggcgtgaagcagaccctgaatttcgacctgctgaagctggctggcgacgtggaatccaacccaggccctactagtatggactggatttggcgcatccttttccttgtcggcgctgctaccggcgcgcattccttcgaagaagtgcagctggttgaatcaggtggcggcctggttcaacctggcggatctctgagactgagctgtgccgccagcggcttcacctttaccgactacacaatccactgggtccgacaggcccctggcaaaggacttgagtgggtcgccaacatcaaccccaacaatggcggcaccacctacaaccagaagttcgaggacagattcaccatcagccgggacaacagcaagaacaccctgtacctccagatgaactccctgagagccgaggacaccgccgtgtactattgtgccagaggctggaacttcgactactggggccagggaacactggtcaccgttagctctacgcgtgaggacctgaagaacgtgttcccacctgaggtggccgtgttcgagcctagcgaggccgagatcagccacacccagaaagccaccctcgtgtgcctggctaccggcttctaccccgaccatgtggaactgtcttggtgggtcaacggcaaagaggtgcacagcggcgtgtgtaccgacccccagccactgaaagaacagcccgccctgaacgacagccggtactgcctgagcagcagactgagagtgtccgccaccttctggcagaacccccggaaccacttcagatgccaggtgcagttctacggcctgagcgagaacgacgagtggacccaggacagagccaagcccgtgacccagatcgtgtctgccgaagcctggggcagagccgattgcggctttaccagcgagagctaccagcagggcgtgctgagcgccaccatcctgtacgagatcctgctgggcaaggccaccctgtacgccgtgctggtgtctgccctggtgctgatggctatggtcaagcggaaggacagccgggga

SEQ ID NO: 21667 - DNA, 2685 bp, Artificial Sequence
  Synthetic Polynucleotide
atggccttaccagtgaccgccttgctcctgccgctggccttgctgctccacgccgccaggccgctcgaggggaaaccaattcccaaccctcttctgggactggattcaaccggcagcggcgaggacctgaagaacgtgttcccacctgaggtggccgtgttcgagcctagcaaggccgagatcgcccacacccagaaagccaccctcgtgtgcctggctaccggcttctaccccgaccatgtggaactgtcttggtgggtcaacggcaaagaggtgcacagcggcgtgtgtaccgacccccagccactgaaagaacagcccgccctgaacgacagccggtactgcctgagcagcagactgagagtgtccgccaccttctggcagaacccccggaaccacttcagatgccaggtgcagttctacggcctgagcgagaacgacgagtggacccaggacagagccaagcccgtgacccagatcgtgtctgccgaagcctggggcagagccgattgcggcatcaccagcgccagctaccaccagggcgtgctgagcgccaccatcctgtacgagatcctgctgggcaaggccaccctgtacgccgtgctggtgtctgccctggtgctgatggctatggtcaagcggaaggacagccggggaagggccaagcgatctggatctggagcaacaaacttctcactactcaaacaagcaggtgacgtggaggagaatcccgggcctactagcatggccttaccagtgaccgccttgctcctgccgctggccttgctgctccacgccgccaggccggacatccagatgacacagagccctagcagcctgtctgccagcgtgggagacagagtgaccatcacatgcaaggccagccaggatgtgggcacagccgtggattggtatcagcagaagcctggcaaggcccctaagctgctgatctactgggccagcacaagacacacaggcgtgcccagcagattttctggcagcggctctggcaccgacttcaccctgacaatatccagcctccagcctgaggacttcgccacctactactgtcagcagagctggaacaccccttggacattcggccagggcaccaagctggaaatcaagagaggcggaggcggaagtggaggcggaggatctggcggcggaggctctgaagtgcagctggttgaatcaggtggcggcctggttcaacctggcggatctctgagactgagctgtgccgccagcggcttcacctttaccgactacacaatccactgggtccgacaggcccctggcaaaggacttgagtgggtcgccaacatcaaccccaacaatggcggcaccacctacaaccagaagttcgaggacagattcaccatcagccgggacaacagcaagaacaccctgtacctccagatgaactccctgagagccgaggacaccgccgtgtactattgtgccagaggctggaacttcgactactggggccagggaacactggtcaccgttagctctacgcgtgagcagaaactgatctcggaagaggatgggagcggcatccagaaccctgatcctgccgtgtaccagctgcgggatagcaagagcagcgacaagagcgtgtgtctgttcaccgacttcgacagccagaccaacgtgtcccagagcaaggactccgacgtgtacatcaccgataagtgcgtgctggacatgcggagcatggacttcaagagcaactccgccgtggcctggtccaacaagtccgatttcgcctgcgccaacgccttcaacaacagcattatccccgaggacacattcttcccaagcagcgacgtgccctgcgacgtgaagctggtggaaaagagcttcgagacagacaccaacctgaacttccagaacctgagcgtgatcggcttcagaatcctgctgctgaaagtggccggctttaacctgctgatgaccctgcggctgtggtccagccgcgccaagagaagcggatctggcgtgaagcagaccctgaatttcgacctgctgaagctggctggcgacgtggaatccaacccaggcccttctagaggccatatgaccgagtacaagcccacggtgcgcctcgccacccgcgacgacgtccccagggccgtacgcaccctcgccgccgcgttcgccgactaccccgccacgcgccacaccgtcgatccggaccgccacatcgagcgggtcaccgagctgcaagaactcttcctcacgcgcgtcgggctcgacatcggcaaggtgtgggtcgcggacgacggcgccgcggtggcggtctggaccacgccggagagcgtcgaagcgggggcggtgttcgccgagatcggcccgcgcatggccgagttgagcggttcccggctggccgcgcagcaacagatggaaggcctcctggcgccgcaccggcccaaggagcccgcgtggttcctggccaccgtcggcgtctcgcccgaccaccagggcaagggtctgggcagcgccgtcgtgctccccggagtggaggcggccgagcgcgccggggtgcccgccttcctggagacctccgcgccccgcaacctccccttctacgagcggctcggcttcaccgtcaccgccgacgtcgaggtgcccgaaggaccgcgcacctggtgcatgacccgcaagcccggtgcctga

SEQ ID NO: 21668 - DNA, 2661 bp, Artificial Sequence
  Synthetic Polynucleotide
atggccttaccagtgaccgccttgctcctgccgctggccttgctgctccacgccgccaggccggacatccagatgacacagagccctagcagcctgtctgccagcgtgggagacagagtgaccatcacatgcaaggccagccaggatgtgggcacagccgtggattggtatcagcagaagcctggcaaggcccctaagctgctgatctactgggccagcacaagacacacaggcgtgcccagcagattttctggcagcggctctggcaccgacttcaccctgacaatatccagcctccagcctgaggacttcgccacctactactgtcagcagagctggaacaccccttggacattcggccagggcaccaagctggaaatcaagagactcgaggggaaaccaattcccaaccctcttctgggactggattcaaccggcagcggcgacaagcagctggacgccgacgtgtcccccaagcctaccatcttcctgccctctatcgccgagacaaagctccagaaggccggcacctacctgtgcctgctggaaaagttcttcccagatgtgattaagatccactggcaggaaaagaagtccaacaccatcctgggcagccaggaaggcaacaccatgaagaccaacgacacctacatgaagttcagctggctgaccgtgcccgagaagtccctggacaaagaacacagatgcatcgtgcggcacgaaaacaacaagaacggcgtggaccaggaaatcatcttcccacccatcaagaccgatgtgattacaatggaccccaaggacaactgctccaaggacgccaacgataccctgctgctccagctgaccaacaccagcgcctactacatgtacttgttgctgctgctgaagtccgtggtgtacttcgccatcatcacatgctgcctgctgcggagaaccgccttctgctgcaacggcgagaagtctagggccaagcgatctggatctggagcaacaaacttctcactactcaaacaagcaggtgacgtggaggagaatcccgggcctactagtatggactggatttggcgcatccttttccttgtcggcgctgctaccggcgcgcattccttcgaagaagtgcagctggttgaatcaggtggcggcctggttcaacctggcggatctctgagactgagctgtgccgccagcggcttcacctttaccgactacacaatccactgggtccgacaggcccctggcaaaggacttgagtgggtcgccaacatcaaccccaacaatggcggcaccacctacaaccagaagttcgaggacagattcaccatcagccgggacaacagcaagaacaccctgtacctccagatgaactccctgagagccgaggacaccgccgtgtactattgtgccagaggctggaacttcgactactggggccagggaacactggtcaccgttagctctacgcgtgagcagaaactgatctcggaagaggatgggagcggcagccagcctcacaccaagcccagcgtgttcgtgatgaagaacggcaccaacgtggcctgcctcgtgaaagagttctaccccaaggacatcaggatcaacctggtgtccagcaagaagatcaccgagttcgaccccgccatcgtgatctcccccagcggcaagtacaacgccgtgaagctggggaagtacgaggacagcaacagcgtgacctgctccgtgcagcacgacaacaagaccgtgcacagcaccgactttgaagtgaaaaccgactccaccgaccacgtgaagcccaaagagacagagaacaccaagcagcccagcaagagctgccacaagcccaaggccatcgtgcacaccgagaaagtgaacatgatgagcctgaccgtgctgggcctgcggatgctgttcgccaaaaccgtggccgtgaacttcctgctgaccgccaagctgttcttcctccgcgccaagagaagcggatctggcgtgaagcagaccctgaatttcgacctgctgaagctggctggcgacgtggaatccaacccaggcccttctagaggccatatgaccgagtacaagcccacggtgcgcctcgccacccgcgacgacgtccccagggccgtacgcaccctcgccgccgcgttcgccgactaccccgccacgcgccacaccgtcgatccggaccgccacatcgagcgggtcaccgagctgcaagaactcttcctcacgcgcgtcgggctcgacatcggcaaggtgtgggtcgcggacgacggcgccgcggtggcggtctggaccacgccggagagcgtcgaagcgggggcggtgttcgccgagatcggcccgcgcatggccgagttgagcggttcccggctggccgcgcagcaacagatggaaggcctcctggcgccgcaccggcccaaggagcccgcgtggttcctggccaccgtcggcgtctcgcccgaccaccagggcaagggtctgggcagcgccgtcgtgctccccggagtggaggcggccgagcgcgccggggtgcccgccttcctggagacctccgcgccccgcaacctccccttctacgagcggctcggcttcaccgtcaccgccgacgtcgaggtgcccgaaggaccgcgcacctggtgcatgacccgcaagcccggtgcctga

SEQ ID NO: 21669 - DNA, 1872 bp, Artificial Sequence
  Synthetic Polynucleotide
atggccttaccagtgaccgccttgctcctgccgctggccttgctgctccacgccgccaggccggacatccagatgacacagagccctagcagcctgtctgccagcgtgggagacagagtgaccatcacatgcaaggccagccaggatgtgggcacagccgtggattggtatcagcagaagcctggcaaggcccctaagctgctgatctactgggccagcacaagacacacaggcgtgcccagcagattttctggcagcggctctggcaccgacttcaccctgacaatatccagcctccagcctgaggacttcgccacctactactgtcagcagagctggaacaccccttggacattcggccagggcaccaagctggaaatcaagagactcgagagccagcctcacaccaagcccagcgtgttcgtgatgaagaacggcaccaacgtggcctgcctcgtgaaagagttctaccccaaggacatcaggatcaacctggtgtccagcaagaagatcaccgagttcgaccccgccatcgtgatctcccccagcggcaagtacaacgccgtgaagctggggaagtacgaggacagcaacagcgtgacctgctccgtgcagcacgacaacaagaccgtgcacagcaccgactttgaagtgaaaaccgactccaccgaccacgtgaagcccaaagagacagagaacaccaagcagcccagcaagagctgccacaagcccaaggccatcgtgcacaccgagaaagtgaacatgatgagcctgaccgtgctgggcctgcggatgctgttcgccaaaaccgtggccgtgaacttcctgctgaccgccaagctgttcttcctcagggccaagcgatctggatctggagcaacaaacttctcactactcaaacaagcaggtgacgtggaggagaatcccgggcctactagtatggactggatttggcgcatccttttccttgtcggcgctgctaccggcgcgcattccttcgaagaagtgcagctggttgaatcaggtggcggcctggttcaacctggcggatctctgagactgagctgtgccgccagcggcttcacctttaccgactacacaatccactgggtccgacaggcccctggcaaaggacttgagtgggtcgccaacatcaaccccaacaatggcggcaccacctacaaccagaagttcgaggacagattcaccatcagccgggacaacagcaagaacaccctgtacctccagatgaactccctgagagccgaggacaccgccgtgtactattgtgccagaggctggaacttcgactactggggccagggaacactggtcaccgttagctctacgcgtgacaagcagctggacgccgacgtgtcccccaagcctaccatcttcctgccctctatcgccgagacaaagctccagaaggccggcacctacctgtgcctgctggaaaagttcttcccagatgtgattaagatccactggcaggaaaagaagtccaacaccatcctgggcagccaggaaggcaacaccatgaagaccaacgacacctacatgaagttcagctggctgaccgtgcccgagaagtccctggacaaagaacacagatgcatcgtgcggcacgaaaacaacaagaacggcgtggaccaggaaatcatcttcccacccatcaagaccgatgtgattacaatggaccccaaggacaactgctccaaggacgccaacgataccctgctgctccagctgaccaacaccagcgcctactacatgtacttgttgctgctgctgaagtccgtggtgtacttcgccatcatcacatgctgcctgctgcggagaaccgccttctgctgcaacggcgagaagtct

SEQ ID NO: 21670 - DNA, 2706 bp, Artificial Sequence
  Synthetic Polynucleotide
atggccttaccagtgaccgccttgctcctgccgctggccttgctgctccacgccgccaggccgctcgaggggaaaccaattcccaaccctcttctgggactggattcaaccggcagcggcgacaagcagctggacgccgacgtgtcccccaagcctaccatcttcctgccctctatcgccgagacaaagctccagaaggccggcacctacctgtgcctgctggaaaagttcttcccagatgtgattaagatccactggcaggaaaagaagtccaacaccatcctgggcagccaggaaggcaacaccatgaagaccaacgacacctacatgaagttcagctggctgaccgtgcccgagaagtccctggacaaagaacacagatgcatcgtgcggcacgaaaacaacaagaacggcgtggaccaggaaatcatcttcccacccatcaagaccgatgtgattacaatggaccccaaggacaactgctccaaggacgccaacgataccctgctgctccagctgaccaacaccagcgcctactacatgtacttgttgctgctgctgaagtccgtggtgtacttcgccatcatcacatgctgcctgctgcggagaaccgccttctgctgcaacggcgagaagtctagggccaagcgatctggatctggagcaacaaacttctcactactcaaacaagcaggtgacgtggaggagaatcccgggcctactagcatggccttaccagtgaccgccttgctcctgccgctggccttgctgctccacgccgccaggccggacatccagatgacacagagccctagcagcctgtctgccagcgtgggagacagagtgaccatcacatgcaaggccagccaggatgtgggcacagccgtggattggtatcagcagaagcctggcaaggcccctaagctgctgatctactgggccagcacaagacacacaggcgtgcccagcagattttctggcagcggctctggcaccgacttcaccctgacaatatccagcctccagcctgaggacttcgccacctactactgtcagcagagctggaacaccccttggacattcggccagggcaccaagctggaaatcaagagaggcggaggcggaagtggaggcggaggatctggcggcggaggctctgaagtgcagctggttgaatcaggtggcggcctggttcaacctggcggatctctgagactgagctgtgccgccagcggcttcacctttaccgactacacaatccactgggtccgacaggcccctggcaaaggacttgagtgggtcgccaacatcaaccccaacaatggcggcaccacctacaaccagaagttcgaggacagattcaccatcagccgggacaacagcaagaacaccctgtacctccagatgaactccctgagagccgaggacaccgccgtgtactattgtgccagaggctggaacttcgactactggggccagggaacactggtcaccgttagctctacgcgtgagcagaaactgatctcggaagaggatgggagcggcagccagcctcacaccaagcccagcgtgttcgtgatgaagaacggcaccaacgtggcctgcctcgtgaaagagttctaccccaaggacatcaggatcaacctggtgtccagcaagaagatcaccgagttcgaccccgccatcgtgatctcccccagcggcaagtacaacgccgtgaagctggggaagtacgaggacagcaacagcgtgacctgctccgtgcagcacgacaacaagaccgtgcacagcaccgactttgaagtgaaaaccgactccaccgaccacgtgaagcccaaagagacagagaacaccaagcagcccagcaagagctgccacaagcccaaggccatcgtgcacaccgagaaagtgaacatgatgagcctgaccgtgctgggcctgcggatgctgttcgccaaaaccgtggccgtgaacttcctgctgaccgccaagctgttcttcctccgcgccaagagaagcggatctggcgtgaagcagaccctgaatttcgacctgctgaagctggctggcgacgtggaatccaacccaggcccttctagaggccatatgaccgagtacaagcccacggtgcgcctcgccacccgcgacgacgtccccagggccgtacgcaccctcgccgccgcgttcgccgactaccccgccacgcgccacaccgtcgatccggaccgccacatcgagcgggtcaccgagctgcaagaactcttcctcacgcgcgtcgggctcgacatcggcaaggtgtgggtcgcggacgacggcgccgcggtggcggtctggaccacgccggagagcgtcgaagcgggggcggtgttcgccgagatcggcccgcgcatggccgagttgagcggttcccggctggccgcgcagcaacagatggaaggcctcctggcgccgcaccggcccaaggagcccgcgtggttcctggccaccgtcggcgtctcgcccgaccaccagggcaagggtctgggcagcgccgtcgtgctccccggagtggaggcggccgagcgcgccggggtgcccgccttcctggagacctccgcgccccgcaacctccccttctacgagcggctcggcttcaccgtcaccgccgacgtcgaggtgcccgaaggaccgcgcacctggtgcatgacccgcaagcccggtgcctga

SEQ ID NO: 21671 - DNA, 3081 bp, Artificial Sequence
  Synthetic Polynucleotide
atggccttaccagtgaccgccttgctcctgccgctggccttgctgctccacgccgccaggccggacatccagatgacacagagccctagcagcctgtctgccagcgtgggagacagagtgaccatcacatgcaaggccagccaggatgtgggcacagccgtggattggtatcagcagaagcctggcaaggcccctaagctgctgatctactgggccagcacaagacacacaggcgtgcccagcagattttctggcagcggctctggcaccgacttcaccctgacaatatccagcctccagcctgaggacttcgccacctactactgtcagcagagctggaacaccccttggacattcggccagggcaccaagctggaaatcaagagaggacagcctaaggccaatcctaccgtgacactgttccctccaagcagcgaagaactccaggccaacaaggccacacttgtgtgcctgatctccgacttctaccctggggctgtgacagtggcttggaaggccgatggatctcctgtgaaagccggcgtggaaaccaccaagccatccaagcagagcaacaacaaatacgccgccagctcctacctgagcctgacacctgagcagtggaagtcccacagatcctacagctgccaagtgacccacgaaggcagcaccgtggaaaagacagtggcccctacagagtgcagcggatcccagagcttcggcctgctggaccccaagctgtgctacctgctggatggcatcctgttcatctacggcgtgatcctgaccgccctgttcctgagagtgaagttcagcagaagcgccgacgcccctgcctaccagcagggacagaaccaactgtacaacgagctgaacctgggcagacgggaagagtacgacgtgctggacaagcggagaggcagggaccctgagatgggcggaaagccccagcggagaaagaacccccaggaaggactgtataacgaactccagaaagacaagatggccgaagcctacagcgagatcggcatgaagggcgagcggagaagaggcaagggccacgatggcctgtaccagggcctgagcaccgccaccaaggacacctatgacgccctgcacatgcaggccctgcctccaagaagggccaagcgatctggatctggagcaacaaacttctcactactcaaacaagcaggtgacgtggaggagaatcccgggcctactagtatggactggatttggcgcatccttttccttgtcggcgctgctaccggcgcgcattccttcgaagaagtgcagctggttgaatcaggtggcggcctggttcaacctggcggatctctgagactgagctgtgccgccagcggcttcacctttaccgactacacaatccactgggtccgacaggcccctggcaaaggacttgagtgggtcgccaacatcaaccccaacaatggcggcaccacctacaaccagaagttcgaggacagattcaccatcagccgggacaacagcaagaacaccctgtacctccagatgaactccctgagagccgaggacaccgccgtgtactattgtgccagaggctggaacttcgactactggggccagggaacactggtcaccgttagctctgcctctacaaagggaccctccgtgtttcctctggctcccagcagcaagtctacaagcggaggaacagccgctctgggctgcctggtcaaggattactttcccgagcctgtgaccgtgtcctggaatagcggagcactgacaagcggcgtgcacacctttccagccgtgctgcaaagcagcggcctgtactctctgagcagcgtggtcacagtgcctagctctagcctgggcacccagacctacatctgcaatgtgaaccacaagcctagcaacaccaaggtggacaagagagtggaacccaagagctgtggtacccagagttttgggttgttggaccctaaattgtgctatctgttggacggaatcctgttcatttacggagtgatcctgaccgcattgttcctgcgggttaagttttccagatccgcagacgcacccgcttaccaacaagggcagaaccaactctacaatgaacttaatttggggcggagggaagagtacgacgttctggacaaaaggaggggacgagatcccgagatgggcggaaagcctcagcgaaggaagaatccgcaagaggggctttataacgaactccagaaagataaaatggcagaagcctatagtgagattgggatgaagggagaaaggaggaggggtaaaggtcacgatgggttgtaccaaggattgagcacagccactaaagatacctatgatgcgctccacatgcaggccctgccgccaagacgcgccaagagaagcggatctggcgtgaagcagaccctgaatttcgacctgctgaagctggctggcgacgtggaatccaacccaggcccttctagaggccatatgaccgagtacaagcccacggtgcgcctcgccacccgcgacgacgtccccagggccgtacgcaccctcgccgccgcgttcgccgactaccccgccacgcgccacaccgtcgatccggaccgccacatcgagcgggtcaccgagctgcaagaactcttcctcacgcgcgtcgggctcgacatcggcaaggtgtgggtcgcggacgacggcgccgcggtggcggtctggaccacgccggagagcgtcgaagcgggggcggtgttcgccgagatcggcccgcgcatggccgagttgagcggttcccggctggccgcgcagcaacagatggaaggcctcctggcgccgcaccggcccaaggagcccgcgtggttcctggccaccgtcggcgtctcgcccgaccaccagggcaagggtctgggcagcgccgtcgtgctccccggagtggaggcggccgagcgcgccggggtgcccgccttcctggagacctccgcgccccgcaacctccccttctacgagcggctcggcttcaccgtcaccgccgacgtcgaggtgcccgaaggaccgcgcacctggtgcatgacccgcaagcccggtgcctga

SEQ ID NO: 21672 - DNA, 1926 bp, Artificial Sequence
  Synthetic Polynucleotide
atggccttaccagtgaccgccttgctcctgccgctggccttgctgctccacgccgccaggccggacatccagatgacacagagccctagcagcctgtctgccagcgtgggagacagagtgaccatcacatgcaaggccagccaggatgtgggcacagccgtggattggtatcagcagaagcctggcaaggcccctaagctgctgatctactgggccagcacaagacacacaggcgtgcccagcagattttctggcagcggctctggcaccgacttcaccctgacaatatccagcctccagcctgaggacttcgccacctactactgtcagcagagctggaacaccccttggacattcggccagggcaccaagctggaaatcaagagactcgagggacagcctaaggccaatcctaccgtgacactgttccctccaagcagcgaagaactccaggccaacaaggccacacttgtgtgcctgatctccgacttctaccctggggctgtgacagtggcttggaaggccgatggatctcctgtgaaagccggcgtggaaaccaccaagccatccaagcagagcaacaacaaatacgccgccagctcctacctgagcctgacacctgagcagtggaagtcccacagatcctacagctgccaagtgacccacgaaggcagcaccgtggaaaagacagtggcccctacagagtgcagccccatcaagaccgatgtgattacaatggaccccaaggacaactgctccaaggacgccaacgataccctgctgctccagctgaccaacaccagcgcctactacatgtacttgttgctgctgctgaagtccgtggtgtacttcgccatcatcacatgctgcctgctgcggagaaccgccttctgctgcaacggcgagaagtctagggccaagcgatctggatctggagcaacaaacttctcactactcaaacaagcaggtgacgtggaggagaatcccgggcctactagtatggactggatttggcgcatccttttccttgtcggcgctgctaccggcgcgcattccttcgaagaagtgcagctggttgaatcaggtggcggcctggttcaacctggcggatctctgagactgagctgtgccgccagcggcttcacctttaccgactacacaatccactgggtccgacaggcccctggcaaaggacttgagtgggtcgccaacatcaaccccaacaatggcggcaccacctacaaccagaagttcgaggacagattcaccatcagccgggacaacagcaagaacaccctgtacctccagatgaactccctgagagccgaggacaccgccgtgtactattgtgccagaggctggaacttcgactactggggccagggaacactggtcaccgttagctctacgcgtgcctctacaaagggaccctccgtgtttcctctggctcccagcagcaagtctacaagcggaggaacagccgctctgggctgcctggtcaaggattactttcccgagcctgtgaccgtgtcctggaatagcggagcactgacaagcggcgtgcacacctttccagccgtgctgcaaagcagcggcctgtactctctgagcagcgtggtcacagtgcctagctctagcctgggcacccagacctacatctgcaatgtgaaccacaagcctagcaacaccaaggtggacaagagagtggaacccaagagctgtgaagtgaaaaccgactccaccgaccacgtgaagcccaaagagacagagaacaccaagcagcccagcaagagctgccacaagcccaaggccatcgtgcacaccgagaaagtgaacatgatgagcctgaccgtgctgggcctgcggatgctgttcgccaaaaccgtggccgtgaacttcctgctgaccgccaagctgttcttcctc

SEQ ID NO: 21673 - DNA, 1860 bp, Artificial Sequence
  Synthetic Polynucleotide
atggccttaccagtgaccgccttgctcctgccgctggccttgctgctccacgccgccaggccggacatccagatgacacagagccctagcagcctgtctgccagcgtgggagacagagtgaccatcacatgcaaggccagccaggatgtgggcacagccgtggattggtatcagcagaagcctggcaaggcccctaagctgctgatctactgggccagcacaagacacacaggcgtgcccagcagattttctggcagcggctctggcaccgacttcaccctgacaatatccagcctccagcctgaggacttcgccacctactactgtcagcagagctggaacaccccttggacattcggccagggcaccaagctggaaatcaagagactcgagggacagcctaaggccaatcctaccgtgacactgttccctccaagcagcgaagaactccaggccaacaaggccacacttgtgtgcctgatctccgacttctaccctggggctgtgacagtggcttggaaggccgatggatctcctgtgaaagccggcgtggaaaccaccaagccatccaagcagagcaacaacaaatacgccgccagctcctacctgagcctgacacctgagcagtggaagtcccacagatcctacagctgccaagtgacccacgaaggcagcaccgtggaaaagacagtggcccctacagagtgcagcggcagagccgattgcggctttaccagcgagagctaccagcagggcgtgctgagcgccaccatcctgtacgagatcctgctgggcaaggccaccctgtacgccgtgctggtgtctgccctggtgctgatggctatggtcaagcggaaggacagccggggaagggccaagcgatctggatctggagcaacaaacttctcactactcaaacaagcaggtgacgtggaggagaatcccgggcctactagtatggactggatttggcgcatccttttccttgtcggcgctgctaccggcgcgcattccttcgaagaagtgcagctggttgaatcaggtggcggcctggttcaacctggcggatctctgagactgagctgtgccgccagcggcttcacctttaccgactacacaatccactgggtccgacaggcccctggcaaaggacttgagtgggtcgccaacatcaaccccaacaatggcggcaccacctacaaccagaagttcgaggacagattcaccatcagccgggacaacagcaagaacaccctgtacctccagatgaactccctgagagccgaggacaccgccgtgtactattgtgccagaggctggaacttcgactactggggccagggaacactggtcaccgttagctctacgcgtgcctctacaaagggaccctccgtgtttcctctggctcccagcagcaagtctacaagcggaggaacagccgctctgggctgcctggtcaaggattactttcccgagcctgtgaccgtgtcctggaatagcggagcactgacaagcggcgtgcacacctttccagccgtgctgcaaagcagcggcctgtactctctgagcagcgtggtcacagtgcctagctctagcctgggcacccagacctacatctgcaatgtgaaccacaagcctagcaacaccaaggtggacaagagagtggaacccaagagctgtatccccgaggacacattcttcccaagccccgagagcagctgcgacgtgaagctggtggaaaagagcttcgagacagacaccaacctgaacttccagaacctgagcgtgatcggcttcagaatcctgctgctgaaagtggccggctttaacctgctgatgaccctgcggctgtggtccagc

SEQ ID NO: 21674 - DNA, 1338 bp, Artificial Sequence
  Synthetic Polynucleotide
atggccttaccagtgaccgccttgctcctgccgctggccttgctgctccacgccgccaggccggacatccagatgacacagagccctagcagcctgtctgccagcgtgggagacagagtgaccatcacatgcaaggccagccaggatgtgggcacagccgtggattggtatcagcagaagcctggcaaggcccctaagctgctgatctactgggccagcacaagacacacaggcgtgcccagcagattttctggcagcggctctggcaccgacttcaccctgacaatatccagcctccagcctgaggacttcgccacctactactgtcagcagagctggaacaccccttggacattcggccagggcaccaagctggaaatcaagagaggcggaggcggaagtggaggcggaggatctggcggcggaggctctgaagtgcagctggttgaatcaggtggcggcctggttcaacctggcggatctctgagactgagctgtgccgccagcggcttcacctttaccgactacacaatccactgggtccgacaggcccctggcaaaggacttgagtgggtcgccaacatcaaccccaacaatggcggcaccacctacaaccagaagttcgaggacagattcaccatcagccgggacaacagcaagaacaccctgtacctccagatgaactccctgagagccgaggacaccgccgtgtactattgtgccagaggctggaacttcgactactggggccagggaacactggtcaccgttagctctacgcgtgacggtaacgaggagatgggaggaatcactcaaaccccttacaaagtctcaatttcaggaacaactgttatccttacatgtccccagtatcctggcagcgagatcctttggcagcataacgacaagaatatagggggagatgaagacgataagaatatcggatctgacgaggatcacttgagcctgaaagagttctccgagcttgaacaaagcggatattatgtgtgctatccgcgcgggtcaaagccggaagacgctaacttttacctttatctccgagccagagtgtgcgaaaattgcatggaaatggacgttatgtccgttgctacaatagttatcgtagatatatgcatcacgggtggactgcttctgctggtttattattggtccaagaatagaaaggccaaagctaaacccgtgaccagaggcgctggcgcaggcggaaggcaaaggggacaaaacaaagaacggccaccaccagtgccaaatccagattatgagcctattcggaaaggacagagggacctgtactctggcctgaatcagagaagaatc

SEQ ID NO: 21675 - DNA, 1233 bp, Artificial Sequence
  Synthetic Polynucleotide
atggccttaccagtgaccgccttgctcctgccgctggccttgctgctccacgccgccaggccggacatccagatgacacagagccctagcagcctgtctgccagcgtgggagacagagtgaccatcacatgcaaggccagccaggatgtgggcacagccgtggattggtatcagcagaagcctggcaaggcccctaagctgctgatctactgggccagcacaagacacacaggcgtgcccagcagattttctggcagcggctctggcaccgacttcaccctgacaatatccagcctccagcctgaggacttcgccacctactactgtcagcagagctggaacaccccttggacattcggccagggcaccaagctggaaatcaagagaggcggaggcggaagtggaggcggaggatctggcggcggaggctctgaagtgcagctggttgaatcaggtggcggcctggttcaacctggcggatctctgagactgagctgtgccgccagcggcttcacctttaccgactacacaatccactgggtccgacaggcccctggcaaaggacttgagtgggtcgccaacatcaaccccaacaatggcggcaccacctacaaccagaagttcgaggacagattcaccatcagccgggacaacagcaagaacaccctgtacctccagatgaactccctgagagccgaggacaccgccgtgtactattgtgccagaggctggaacttcgactactggggccagggaacactggtcaccgttagctctacgcgtttcaagatccccatcgaggaactggaagatcgggtgttcgtgaactgcaacacctctatcacctgggtggaaggcaccgtgggaacactgctgagcgacatcaccagactggacctcggcaagcggattctggaccctcggggcatctacagatgcaacggcaccgacatctacaaggacaaagaaagcaccgtgcaggtccactacagaatgtgccagtcctgcgtggaactggaccctgctacagtggccggcatcatcgtgaccgatgtgatcgctactctgctgctggctctgggagtgttctgcttcgccggacacgaaacaggcagactgtctggcgctgccgatacacaggccctgctgagaaacgaccaagtgtatcagcccctgcgcgacagagatgatgcccagtattctcacctcggcggcaactgggctagaaacaag

SEQ ID NO: 21676 - DNA, 1263 bp, Artificial Sequence
  Synthetic Polynucleotide
atggccttaccagtgaccgccttgctcctgccgctggccttgctgctccacgccgccaggccggacatccagatgacacagagccctagcagcctgtctgccagcgtgggagacagagtgaccatcacatgcaaggccagccaggatgtgggcacagccgtggattggtatcagcagaagcctggcaaggcccctaagctgctgatctactgggccagcacaagacacacaggcgtgcccagcagattttctggcagcggctctggcaccgacttcaccctgacaatatccagcctccagcctgaggacttcgccacctactactgtcagcagagctggaacaccccttggacattcggccagggcaccaagctggaaatcaagagaggcggaggcggaagtggaggcggaggatctggcggcggaggctctgaagtgcagctggttgaatcaggtggcggcctggttcaacctggcggatctctgagactgagctgtgccgccagcggcttcacctttaccgactacacaatccactgggtccgacaggcccctggcaaaggacttgagtgggtcgccaacatcaaccccaacaatggcggcaccacctacaaccagaagttcgaggacagattcaccatcagccgggacaacagcaagaacaccctgtacctccagatgaactccctgagagccgaggacaccgccgtgtactattgtgccagaggctggaacttcgactactggggccagggaacactggtcaccgttagctctacgcgtcagagcatcaagggcaaccacctggtcaaggtgtacgactaccaagaggacggcagcgtgctgctgacatgtgatgccgaggccaagaacatcacctggtttaaggacggcaagatgatcggcttcctgaccgaggacaagaagaagtggaacctgggcagcaacgctaaggaccccagaggcatgtatcagtgcaagggcagccagaacaagagcaagcccctccaggtgtactaccggatgtgccagaactgcatcgagctgaacgccgctaccatcagcggctttctgttcgccgagatcgtgtccatcttcgtgctggccgtgggcgtgtactttatcgctggacaggatggcgtgcggcagagcagagcttccgataagcaaaccctgctgcctaacgaccagctgtaccagcctctgaaggacagagaggacgaccagtacagccacctccagggcaatcagctgagaagaaac

SEQ ID NO: 21677 - DNA, 2253 bp, Artificial Sequence
  Synthetic Polynucleotide
atggccttaccagtgaccgccttgctcctgccgctggccttgctgctccacgccgccaggccggaagtgcagctggttgaatctggcggaggactggttcagcctggcggatctctgagactgtcttgtgccgccagcggcttcagcttcagcgacttttggatgagctgggtccgacaggcccctggcaaaggacttgaatgggtcgccacaatcagccaggccggcagcgagaaggactacgtggactctgtgaagggcagattcaccatcagccgggacaacgccaagaagtccctgtacctccagatgaacagcctgagagccgaggacaccgccgtgtactattgtgcctctggcgtgtacagcttcgactacagaggccagggcaccctggtcacagtctcttctggtaccggcggaggcggatctggcggcggaggtagcggtggcggaggatctgaattcgacatccagatgacacagagccctagcagcctgtctgccagcgtgggagacagagtgaccatcacatgcaaggccagccaggatgtgggcacagccgtggattggtatcagcagaagcctggcaaggcccctaagctgctgatctactgggccagcacaagacacacaggcgtgcccagcagattttctggcagcggctctggcaccgacttcaccctgacaatatccagcctccagcctgaggacttcgccacctactactgtcagcagagctggaacaccccttggacattcggccagggcaccaagctggaaatcaagagactcgaggacctgaagaacgtgttcccacctgaggtggccgtgttcgagcctagcgaggccgagatcagccacacccagaaagccaccctcgtgtgcctggctaccggcttctaccccgaccatgtggaactgtcttggtgggtcaacggcaaagaggtgcacagcggcgtgtgtaccgacccccagccactgaaagaacagcccgccctgaacgacagccggtactgcctgagcagcagactgagagtgtccgccaccttctggcagaacccccggaaccacttcagatgccaggtgcagttctacggcctgagcgagaacgacgagtggacccaggacagagccaagcccgtgacccagatcgtgtctgccgaagcctggggcagagccgattgcggctttaccagcgagagctaccagcagggcgtgctgagcgccaccatcctgtacgagatcctgctgggcaaggccaccctgtacgccgtgctggtgtctgccctggtgctgatggctatggtcaagcggaaggacagccggggaagggccaagcgatctggatctggagcaacaaacttctcactactcaaacaagcaggtgacgtggaggagaatcccgggcctactagtatggactggatttggcgcatccttttccttgtcggcgctgctaccggcgcgcattccttcgaagaagtgcagctggttgaatcaggtggcggcctggttcaacctggcggatctctgagactgagctgtgccgccagcggcttcacctttaccgactacacaatccactgggtccgacaggcccctggcaaaggacttgagtgggtcgccaacatcaaccccaacaatggcggcaccacctacaaccagaagttcgaggacagattcaccatcagccgggacaacagcaagaacaccctgtacctccagatgaactccctgagagccgaggacaccgccgtgtactattgtgccagaggctggaacttcgactactggggccagggaacactggtcaccgttagctctacgcgtatccagaaccctgatcctgccgtgtaccagctgcgggatagcaagagcagcgacaagagcgtgtgtctgttcaccgacttcgacagccagaccaacgtgtcccagagcaaggactccgacgtgtacatcaccgataagtgcgtgctggacatgcggagcatggacttcaagagcaactccgccgtggcctggtccaacaagtccgatttcgcctgcgccaacgccttcaacaacagcattatccccgaggacacattcttcccaagccccgagagcagctgcgacgtgaagctggtggaaaagagcttcgagacagacaccaacctgaacttccagaacctgagcgtgatcggcttcagaatcctgctgctgaaagtggccggctttaacctgctgatgaccctgcggctgtggtccagc

SEQ ID NO: 21678 - DNA, 2331 bp, Artificial Sequence
  Synthetic Polynucleotide
atggccttaccagtgaccgccttgctcctgccgctggccttgctgctccacgccgccaggccggaagtgcagctggttgaatctggcggaggactggttcagcctggcggatctctgagactgtcttgtgccgccagcggcttcagcttcagcgacttttggatgagctgggtccgacaggcccctggcaaaggacttgaatgggtcgccacaatcagccaggccggcagcgagaaggactacgtggactctgtgaagggcagattcaccatcagccgggacaacgccaagaagtccctgtacctccagatgaacagcctgagagccgaggacaccgccgtgtactattgtgcctctggcgtgtacagcttcgactacagaggccagggcaccctggtcacagtctcttctggtaccggcggaggcggatctggcggcggaggtagcggtggcggaggatctgaattcgacatccagatgacacagagccctagcagcctgtctgccagcgtgggagacagagtgaccatcacatgcaaggccagccaggatgtgggcacagccgtggattggtatcagcagaagcctggcaaggcccctaagctgctgatctactgggccagcacaagacacacaggcgtgcccagcagattttctggcagcggctctggcaccgacttcaccctgacaatatccagcctccagcctgaggacttcgccacctactactgtcagcagagctggaacaccccttggacattcggccagggcaccaagctggaaatcaagagactcgagggacagcctaaggccaatcctaccgtgacactgttccctccaagcagcgaagaactccaggccaacaaggccacacttgtgtgcctgatctccgacttctaccctggggctgtgacagtggcttggaaggccgatggatctcctgtgaaagccggcgtggaaaccaccaagccatccaagcagagcaacaacaaatacgccgccagctcctacctgagcctgacacctgagcagtggaagtcccacagatcctacagctgccaagtgacccacgaaggcagcaccgtggaaaagacagtggcccctacagagtgcagccccatcaagaccgatgtgattacaatggaccccaaggacaactgctccaaggacgccaacgataccctgctgctccagctgaccaacaccagcgcctactacatgtacttgttgctgctgctgaagtccgtggtgtacttcgccatcatcacatgctgcctgctgcggagaaccgccttctgctgcaacggcgagaagtctagggccaagcgatctggatctggagcaacaaacttctcactactcaaacaagcaggtgacgtggaggagaatcccgggcctactagtatggactggatttggcgcatccttttccttgtcggcgctgctaccggcgcgcattccttcgaagaagtgcagctggttgaatcaggtggcggcctggttcaacctggcggatctctgagactgagctgtgccgccagcggcttcacctttaccgactacacaatccactgggtccgacaggcccctggcaaaggacttgagtgggtcgccaacatcaaccccaacaatggcggcaccacctacaaccagaagttcgaggacagattcaccatcagccgggacaacagcaagaacaccctgtacctccagatgaactccctgagagccgaggacaccgccgtgtactattgtgccagaggctggaacttcgactactggggccagggaacactggtcaccgttagctctacgcgtgcctctacaaagggaccctccgtgtttcctctggctcccagcagcaagtctacaagcggaggaacagccgctctgggctgcctggtcaaggattactttcccgagcctgtgaccgtgtcctggaatagcggagcactgacaagcggcgtgcacacctttccagccgtgctgcaaagcagcggcctgtactctctgagcagcgtggtcacagtgcctagctctagcctgggcacccagacctacatctgcaatgtgaaccacaagcctagcaacaccaaggtggacaagagagtggaacccaagagctgtgaagtgaaaaccgactccaccgaccacgtgaagcccaaagagacagagaacaccaagcagcccagcaagagctgccacaagcccaaggccatcgtgcacaccgagaaagtgaacatgatgagcctgaccgtgctgggcctgcggatgctgttcgccaaaaccgtggccgtgaacttcctgctgaccgccaagctgttcttcctc

SEQ ID NO: 21679 - DNA, 2274 bp, Artificial Sequence
  Synthetic Polynucleotide
atggccttaccagtgaccgccttgctcctgccgctggccttgctgctccacgccgccaggccggaagtgcagctggttgaatctggcggaggactggttcagcctggcggatctctgagactgtcttgtgccgccagcggcttcagcttcagcgacttttggatgagctgggtccgacaggcccctggcaaaggacttgaatgggtcgccacaatcagccaggccggcagcgagaaggactacgtggactctgtgaagggcagattcaccatcagccgggacaacgccaagaagtccctgtacctccagatgaacagcctgagagccgaggacaccgccgtgtactattgtgcctctggcgtgtacagcttcgactacagaggccagggcaccctggtcacagtctcttctggtaccggcggaggcggatctggcggcggaggtagcggtggcggaggatctgaattcgacatccagatgacacagagccctagcagcctgtctgccagcgtgggagacagagtgaccatcacatgcaaggccagccaggatgtgggcacagccgtggattggtatcagcagaagcctggcaaggcccctaagctgctgatctactgggccagcacaagacacacaggcgtgcccagcagattttctggcagcggctctggcaccgacttcaccctgacaatatccagcctccagcctgaggacttcgccacctactactgtcagcagagctggaacaccccttggacattcggccagggcaccaagctggaaatcaagagactcgagggacagcctaaggccaatcctaccgtgacactgttccctccaagcagcgaagaactccaggccaacaaggccacacttgtgtgcctgatctccgacttctaccctggggctgtgacagtggcttggaaggccgatggatctcctgtgaaagccggcgtggaaaccaccaagccatccaagcagagcaacaacaaatacgccgccagctcctacctgagcctgacacctgagcagtggaagtcccacagatcctacagctgccaagtgacccacgaaggcagcaccgtggaaaagacagtggcccctacagagtgcagcggcagagccgattgcggctttaccagcgagagctaccagcagggcgtgctgagcgccaccatcctgtacgagatcctgctgggcaaggccaccctgtacgccgtgctggtgtctgccctggtgctgatggctatggtcaagcggaaggacagccggggacgcgccaagagaagcggatctggcgtgaagcagaccctgaatttcgacctgctgaagctggctggcgacgtggaatccaacccaggccctactagtatggactggatttggcgcatccttttccttgtcggcgctgctaccggcgcgcattccttcgaagaagtgcagctggttgaatcaggtggcggcctggttcaacctggcggatctctgagactgagctgtgccgccagcggcttcacctttaccgactacacaatccactgggtccgacaggcccctggcaaaggacttgagtgggtcgccaacatcaaccccaacaatggcggcaccacctacaaccagaagttcgaggacagattcaccatcagccgggacaacagcaagaacaccctgtacctccagatgaactccctgagagccgaggacaccgccgtgtactattgtgccagaggctggaacttcgactactggggccagggaacactggtcaccgttagctctacgcgtgcctctacaaagggaccctccgtgtttcctctggctcccagcagcaagtctacaagcggaggaacagccgctctgggctgcctggtcaaggattactttcccgagcctgtgaccgtgtcctggaatagcggagcactgacaagcggcgtgcacacctttccagccgtgctgcaaagcagcggcctgtactctctgagcagcgtggtcacagtgcctagctctagcctgggcacccagacctacatctgcaatgtgaaccacaagcctagcaacaccaaggtggacaagagagtggaacccaagagctgtatccccgaggacacattcttcccaagccccgagagcagctgcgacgtgaagctggtggaaaagagcttcgagacagacaccaacctgaacttccagaacctgagcgtgatcggcttcagaatcctgctgctgaaagtggccggctttaacctgctgatgaccctgcggctgtggtccagc

SEQ ID NO: 21680 - DNA, 2676 bp, Artificial Sequence
  Synthetic Polynucleotide
atggccttaccagtgaccgccttgctcctgccgctggccttgctgctccacgccgccaggccggaagtgcagctggttgaatctggcggaggactggttcagcctggcggatctctgagactgtcttgtgccgccagcggcttcagcttcagcgacttttggatgagctgggtccgacaggcccctggcaaaggacttgaatgggtcgccacaatcagccaggccggcagcgagaaggactacgtggactctgtgaagggcagattcaccatcagccgggacaacgccaagaagtccctgtacctccagatgaacagcctgagagccgaggacaccgccgtgtactattgtgcctctggcgtgtacagcttcgactacagaggccagggcaccctggtcacagtctcttctggtaccggcggaggcggatctggcggcggaggtagcggtggcggaggatctgaattcgacatccagatgacacagagccctagcagcctgtctgccagcgtgggagacagagtgaccatcacatgcaaggccagccaggatgtgggcacagccgtggattggtatcagcagaagcctggcaaggcccctaagctgctgatctactgggccagcacaagacacacaggcgtgcccagcagattttctggcagcggctctggcaccgacttcaccctgacaatatccagcctccagcctgaggacttcgccacctactactgtcagcagagctggaacaccccttggacattcggccagggcaccaagctggaaatcaagagactcgagatccagaaccctgatcctgccgtgtaccagctgcgggatagcaagagcagcgacaagagcgtgtgtctgttcaccgacttcgacagccagaccaacgtgtcccagagcaaggactccgacgtgtacatcaccgataagtgcgtgctggacatgcggagcatggacttcaagagcaactccgccgtggcctggtccaacaagtccgatttcgcctgcgccaacgccttcaacaacagcattatccccgaggacacattcttcccaagccccgagagcagctgcgacgtgaagctggtggaaaagagcttcgagacagacaccaacctgaacttccagaacctgagcgtgatcggcttcagaatcctgctgctgaaagtggccggctttaacctgctgatgaccctgcggctgtggtccagccgcgccaagagaagcggatctggcgtgaagcagaccctgaatttcgacctgctgaagctggctggcgacgtggaatccaacccaggccctactagtatggactggatttggcgcatccttttccttgtcggcgctgctaccggcgcgcattccgggccccagctccagctgcaagagtctggacctggcctggtcaagcctagcgagacactgagcctgacctgtaccgtgtccggcgatagcatcagcagcggcgattactactggggctggatcagacagcctcctggcaaaggactggaatggatcggccacatctactacagcggcgtgacctactacaaccccagcctgaagtccagagtgaccatcagcgtggacaccagccggaaccagttctccctgaagctgtctagcgtgacagccgccgataccgccgtgtactactgcaccagagaggacagcagcaactggcggagtagaggccagggaacactggtcacagttagctctggatccggcggaggcggaagtggaggcggaggatctggcggcggaggctctttcgaagaagtgcagctggttgaatcaggtggcggcctggttcaacctggcggatctctgagactgagctgtgccgccagcggcttcacctttaccgactacacaatccactgggtccgacaggcccctggcaaaggacttgagtgggtcgccaacatcaaccccaacaatggcggcaccacctacaaccagaagttcgaggacagattcaccatcagccgggacaacagcaagaacaccctgtacctccagatgaactccctgagagccgaggacaccgccgtgtactattgtgccagaggctggaacttcgactactggggccagggaacactggtcaccgttagctctacgcgtgaggacctgaagaacgtgttcccacctgaggtggccgtgttcgagcctagcgaggccgagatcagccacacccagaaagccaccctcgtgtgcctggctaccggcttctaccccgaccatgtggaactgtcttggtgggtcaacggcaaagaggtgcacagcggcgtgtgtaccgacccccagccactgaaagaacagcccgccctgaacgacagccggtactgcctgagcagcagactgagagtgtccgccaccttctggcagaacccccggaaccacttcagatgccaggtgcagttctacggcctgagcgagaacgacgagtggacccaggacagagccaagcccgtgacccagatcgtgtctgccgaagcctggggcagagccgattgcggctttaccagcgagagctaccagcagggcgtgctgagcgccaccatcctgtacgagatcctgctgggcaaggccaccctgtacgccgtgctggtgtctgccctggtgctgatggctatggtcaagcggaaggacagccgggga

SEQ ID NO: 21681 - DNA, 2742 bp, Artificial Sequence
  Synthetic Polynucleotide
atggccttaccagtgaccgccttgctcctgccgctggccttgctgctccacgccgccaggccggaagtgcagctggttgaatctggcggaggactggttcagcctggcggatctctgagactgtcttgtgccgccagcggcttcagcttcagcgacttttggatgagctgggtccgacaggcccctggcaaaggacttgaatgggtcgccacaatcagccaggccggcagcgagaaggactacgtggactctgtgaagggcagattcaccatcagccgggacaacgccaagaagtccctgtacctccagatgaacagcctgagagccgaggacaccgccgtgtactattgtgcctctggcgtgtacagcttcgactacagaggccagggcaccctggtcacagtctcttctggtaccggcggaggcggatctggcggcggaggtagcggtggcggaggatctgaattcgacatccagatgacacagagccctagcagcctgtctgccagcgtgggagacagagtgaccatcacatgcaaggccagccaggatgtgggcacagccgtggattggtatcagcagaagcctggcaaggcccctaagctgctgatctactgggccagcacaagacacacaggcgtgcccagcagattttctggcagcggctctggcaccgacttcaccctgacaatatccagcctccagcctgaggacttcgccacctactactgtcagcagagctggaacaccccttggacattcggccagggcaccaagctggaaatcaagagactcgagggacagcctaaggccaatcctaccgtgacactgttccctccaagcagcgaagaactccaggccaacaaggccacacttgtgtgcctgatctccgacttctaccctggggctgtgacagtggcttggaaggccgatggatctcctgtgaaagccggcgtggaaaccaccaagccatccaagcagagcaacaacaaatacgccgccagctcctacctgagcctgacacctgagcagtggaagtcccacagatcctacagctgccaagtgacccacgaaggcagcaccgtggaaaagacagtggcccctacagagtgcagccccatcaagaccgatgtgattacaatggaccccaaggacaactgctccaaggacgccaacgataccctgctgctccagctgaccaacaccagcgcctactacatgtacttgttgctgctgctgaagtccgtggtgtacttcgccatcatcacatgctgcctgctgcggagaaccgccttctgctgcaacggcgagaagtctagggccaagcgatctggatctggagcaacaaacttctcactactcaaacaagcaggtgacgtggaggagaatcccgggcctactagtatggactggatttggcgcatccttttccttgtcggcgctgctaccggcgcgcattccgggccccagctccagctgcaagagtctggacctggcctggtcaagcctagcgagacactgagcctgacctgtaccgtgtccggcgatagcatcagcagcggcgattactactggggctggatcagacagcctcctggcaaaggactggaatggatcggccacatctactacagcggcgtgacctactacaaccccagcctgaagtccagagtgaccatcagcgtggacaccagccggaaccagttctccctgaagctgtctagcgtgacagccgccgataccgccgtgtactactgcaccagagaggacagcagcaactggcggagtagaggccagggaacactggtcacagttagctctggatccggcggaggcggaagtggaggcggaggatctggcggcggaggctctttcgaagaagtgcagctggttgaatcaggtggcggcctggttcaacctggcggatctctgagactgagctgtgccgccagcggcttcacctttaccgactacacaatccactgggtccgacaggcccctggcaaaggacttgagtgggtcgccaacatcaaccccaacaatggcggcaccacctacaaccagaagttcgaggacagattcaccatcagccgggacaacagcaagaacaccctgtacctccagatgaactccctgagagccgaggacaccgccgtgtactattgtgccagaggctggaacttcgactactggggccagggaacactggtcaccgttagctctacgcgtgcctctacaaagggaccctccgtgtttcctctggctcccagcagcaagtctacaagcggaggaacagccgctctgggctgcctggtcaaggattactttcccgagcctgtgaccgtgtcctggaatagcggagcactgacaagcggcgtgcacacctttccagccgtgctgcaaagcagcggcctgtactctctgagcagcgtggtcacagtgcctagctctagcctgggcacccagacctacatctgcaatgtgaaccacaagcctagcaacaccaaggtggacaagagagtggaacccaagagctgtgaagtgaaaaccgactccaccgaccacgtgaagcccaaagagacagagaacaccaagcagcccagcaagagctgccacaagcccaaggccatcgtgcacaccgagaaagtgaacatgatgagcctgaccgtgctgggcctgcggatgctgttcgccaaaaccgtggccgtgaacttcctgctgaccgccaagctgttcttcctc

SEQ ID NO: 21682 - DNA, 2685 bp, Artificial Sequence
  Synthetic Polynucleotide
atggccttaccagtgaccgccttgctcctgccgctggccttgctgctccacgccgccaggccggaagtgcagctggttgaatctggcggaggactggttcagcctggcggatctctgagactgtcttgtgccgccagcggcttcagcttcagcgacttttggatgagctgggtccgacaggcccctggcaaaggacttgaatgggtcgccacaatcagccaggccggcagcgagaaggactacgtggactctgtgaagggcagattcaccatcagccgggacaacgccaagaagtccctgtacctccagatgaacagcctgagagccgaggacaccgccgtgtactattgtgcctctggcgtgtacagcttcgactacagaggccagggcaccctggtcacagtctcttctggtaccggcggaggcggatctggcggcggaggtagcggtggcggaggatctgaattcgacatccagatgacacagagccctagcagcctgtctgccagcgtgggagacagagtgaccatcacatgcaaggccagccaggatgtgggcacagccgtggattggtatcagcagaagcctggcaaggcccctaagctgctgatctactgggccagcacaagacacacaggcgtgcccagcagattttctggcagcggctctggcaccgacttcaccctgacaatatccagcctccagcctgaggacttcgccacctactactgtcagcagagctggaacaccccttggacattcggccagggcaccaagctggaaatcaagagactcgagggacagcctaaggccaatcctaccgtgacactgttccctccaagcagcgaagaactccaggccaacaaggccacacttgtgtgcctgatctccgacttctaccctggggctgtgacagtggcttggaaggccgatggatctcctgtgaaagccggcgtggaaaccaccaagccatccaagcagagcaacaacaaatacgccgccagctcctacctgagcctgacacctgagcagtggaagtcccacagatcctacagctgccaagtgacccacgaaggcagcaccgtggaaaagacagtggcccctacagagtgcagcggcagagccgattgcggctttaccagcgagagctaccagcagggcgtgctgagcgccaccatcctgtacgagatcctgctgggcaaggccaccctgtacgccgtgctggtgtctgccctggtgctgatggctatggtcaagcggaaggacagccggggacgcgccaagagaagcggatctggcgtgaagcagaccctgaatttcgacctgctgaagctggctggcgacgtggaatccaacccaggccctactagtatggactggatttggcgcatccttttccttgtcggcgctgctaccggcgcgcattccgggccccagctccagctgcaagagtctggacctggcctggtcaagcctagcgagacactgagcctgacctgtaccgtgtccggcgatagcatcagcagcggcgattactactggggctggatcagacagcctcctggcaaaggactggaatggatcggccacatctactacagcggcgtgacctactacaaccccagcctgaagtccagagtgaccatcagcgtggacaccagccggaaccagttctccctgaagctgtctagcgtgacagccgccgataccgccgtgtactactgcaccagagaggacagcagcaactggcggagtagaggccagggaacactggtcacagttagctctggatccggcggaggcggaagtggaggcggaggatctggcggcggaggctctttcgaagaagtgcagctggttgaatcaggtggcggcctggttcaacctggcggatctctgagactgagctgtgccgccagcggcttcacctttaccgactacacaatccactgggtccgacaggcccctggcaaaggacttgagtgggtcgccaacatcaaccccaacaatggcggcaccacctacaaccagaagttcgaggacagattcaccatcagccgggacaacagcaagaacaccctgtacctccagatgaactccctgagagccgaggacaccgccgtgtactattgtgccagaggctggaacttcgactactggggccagggaacactggtcaccgttagctctacgcgtgcctctacaaagggaccctccgtgtttcctctggctcccagcagcaagtctacaagcggaggaacagccgctctgggctgcctggtcaaggattactttcccgagcctgtgaccgtgtcctggaatagcggagcactgacaagcggcgtgcacacctttccagccgtgctgcaaagcagcggcctgtactctctgagcagcgtggtcacagtgcctagctctagcctgggcacccagacctacatctgcaatgtgaaccacaagcctagcaacaccaaggtggacaagagagtggaacccaagagctgtatccccgaggacacattcttcccaagccccgagagcagctgcgacgtgaagctggtggaaaagagcttcgagacagacaccaacctgaacttccagaacctgagcgtgatcggcttcagaatcctgctgctgaaagtggccggctttaacctgctgatgaccctgcggctgtggtccagc

SEQ ID NO: 21683 - DNA, 1512 bp, Artificial Sequence
  Synthetic Polynucleotide
atggccttaccagtgaccgccttgctcctgccgctggccttgctgctccacgccgccaggccggaagtgcaactggtggaatctggcggcggactggtgcagcctggcggatctctgagactgagctgtgccgccagcggcttcaacatcaaggacacctacatccactgggtgcgccaggcccctggaaagggactggaatgggtggcccggatctaccccaccaacggctacaccagatacgccgacagcgtgaagggccggttcaccatcagcgccgacaccagcaagaataccgcctacctccagatgaacagcctgcgggccgaggataccgccgtgtactactgctcaagatggggaggcgacggcttcgctgctatggacgtgtggggccagggcacccttgtgaccgtgtcatctggcggaggcggaagtggaggcggaggatctggcggcggaggctctgacatccagatgacacagagccctagcagcctgtctgccagcgtgggagacagagtgaccatcacctgtagagccagccaggacgtgaacacagccgtggcttggtatcagcagaagcctggcaaggcccctaagctgctgatctacagcgccagctttctggaaagcggcgtgcccagcagattcagcggaagcagaagcggcaccgacttcaccctgacaatatccagcctccagcctgaggacttcgccacctactactgccagcaggcttacaccacacctccaacattcggccagggcaccaaggtggaaatcaagagaacaacgcgtgagcagaaactgatctcggaagaggatctggcgaagcccaccacgacgccagcgccgcgaccaccaacaccggcgcccaccatcgcgtcgcagcccctgtccctgcgcccagaggcgtgccggccagcggcggggggcgcagtgcacacgagggggctggacttcgcctgtgacatctacatctgggcgcccttggccgggacttgtggggtccttctcctgtcactggttatcaccctttactgcaaacggggcagaaagaaactcctgtatatattcaaacaaccatttatgagaccagtacaaactactcaagaggaagatggctgtagctgccgatttccagaagaagaagaaggaggatgtgaactgagagtgaagttcagcaggagcgcagacgcccccgcgtaccagcagggccagaaccagctctataacgagctgaatctaggacgaagagaggagtacgatgttttggacaagagacgtggccgggaccctgagatggggggaaagccgagaaggaagaaccctcaggaaggcctgtacaatgaactgcagaaagataagatggcggaggcctacagtgagattgggatgaaaggcgagcgccggaggggcaaggggcacgatggcctttaccagggtctcagtacagccaccaaggacacctacgacgcccttcacatgcaggccctgccccctcgctga

SEQ ID NO: 21684 - DNA, 2571 bp, Artificial Sequence
  Synthetic Polynucleotide
atggccttaccagtgaccgccttgctcctgccgctggccttgctgctccacgccgccaggccggacatccagatgacacagagccctagcagcctgtctgccagcgtgggagacagagtgaccatcacctgtagagccagccaggacgtgaacacagccgtggcttggtatcagcagaagcctggcaaggcccctaagctgctgatctacagcgccagctttctggaaagcggcgtgcccagcagattcagcggaagcagaagcggcaccgacttcaccctgacaatatccagcctccagcctgaggacttcgccacctactactgccagcaggcttacaccacacctccaacattcggccagggcaccaaggtggaaatcaagagaacactcgagatccagaaccctgatcctgccgtgtaccagctgcgggatagcaagagcagcgacaagagcgtgtgtctgttcaccgacttcgacagccagaccaacgtgtcccagagcaaggactccgacgtgtacatcaccgataagtgcgtgctggacatgcggagcatggacttcaagagcaactccgccgtggcctggtccaacaagtccgatttcgcctgcgccaacgccttcaacaacagcattatccccgaggacacattcttcccaagcagcgacgtgccctgcgacgtgaagctggtggaaaagagcttcgagacagacaccaacctgaacttccagaacctgagcgtgatcggcttcagaatcctgctgctgaaagtggccggctttaacctgctgatgaccctgcggctgtggtccagccgcgccaagagaagcggatctggcgtgaagcagaccctgaatttcgacctgctgaagctggctggcgacgtggaatccaacccaggccctactagtatggactggatttggcgcatccttttccttgtcggcgctgctaccggcgcgcattccttcgaagaagtgcaactggtggaatctggcggcggactggtgcagcctggcggatctctgagactgagctgtgccgccagcggcttcaacatcaaggacacctacatccactgggtgcgccaggcccctggaaagggactggaatgggtggcccggatctaccccaccaacggctacaccagatacgccgacagcgtgaagggccggttcaccatcagcgccgacaccagcaagaataccgcctacctccagatgaacagcctgcgggccgaggataccgccgtgtactactgctcaagatggggaggcgacggcttcgctgctatggacgtgtggggccagggcacccttgtgaccgtgtcatctacgcgtgaggacctgaagaacgtgttcccacctgaggtggccgtgttcgagcctagcaaggccgagatcgcccacacccagaaagccaccctcgtgtgcctggctaccggcttctaccccgaccatgtggaactgtcttggtgggtcaacggcaaagaggtgcacagcggcgtgtgtaccgacccccagccactgaaagaacagcccgccctgaacgacagccggtactgcctgagcagcagactgagagtgtccgccaccttctggcagaacccccggaaccacttcagatgccaggtgcagttctacggcctgagcgagaacgacgagtggacccaggacagagccaagcccgtgacccagatcgtgtctgccgaagcctggggcagagccgattgcggcatcaccagcgccagctaccaccagggcgtgctgagcgccaccatcctgtacgagatcctgctgggcaaggccaccctgtacgccgtgctggtgtctgccctggtgctgatggctatggtcaagcggaaggacagccggggaagggccaagcgatctggatctggagcaacaaacttctcactactcaaacaagcaggtgacgtggaggagaatcccgggccttctagaggccatatgaccgagtacaagcccacggtgcgcctcgccacccgcgacgacgtccccagggccgtacgcaccctcgccgccgcgttcgccgactaccccgccacgcgccacaccgtcgatccggaccgccacatcgagcgggtcaccgagctgcaagaactcttcctcacgcgcgtcgggctcgacatcggcaaggtgtgggtcgcggacgacggcgccgcggtggcggtctggaccacgccggagagcgtcgaagcgggggcggtgttcgccgagatcggcccgcgcatggccgagttgagcggttcccggctggccgcgcagcaacagatggaaggcctcctggcgccgcaccggcccaaggagcccgcgtggttcctggccaccgtcggcgtctcgcccgaccaccagggcaagggtctgggcagcgccgtcgtgctccccggagtggaggcggccgagcgcgccggggtgcccgccttcctggagacctccgcgccccgcaacctccccttctacgagcggctcggcttcaccgtcaccgccgacgtcgaggtgcccgaaggaccgcgcacctggtgcatgacccgcaagcccggtgcctga

SEQ ID NO: 21685 - DNA, 2568 bp, Artificial Sequence
  Synthetic Polynucleotide
atggccttaccagtgaccgccttgctcctgccgctggccttgctgctccacgccgccaggccggacatccagatgacacagagccctagcagcctgtctgccagcgtgggagacagagtgaccatcacctgtagagccagccaggacgtgaacacagccgtggcttggtatcagcagaagcctggcaaggcccctaagctgctgatctacagcgccagctttctggaaagcggcgtgcccagcagattcagcggaagcagaagcggcaccgacttcaccctgacaatatccagcctccagcctgaggacttcgccacctactactgccagcaggcttacaccacacctccaacattcggccagggcaccaaggtggaaatcaagagaacactcgaggacctgaagaacgtgttcccacctgaggtggccgtgttcgagcctagcaaggccgagatcgcccacacccagaaagccaccctcgtgtgcctggctaccggcttctaccccgaccatgtggaactgtcttggtgggtcaacggcaaagaggtgcacagcggcgtgtgtaccgacccccagccactgaaagaacagcccgccctgaacgacagccggtactgcctgagcagcagactgagagtgtccgccaccttctggcagaacccccggaaccacttcagatgccaggtgcagttctacggcctgagcgagaacgacgagtggacccaggacagagccaagcccgtgacccagatcgtgtctgccgaagcctggggcagagccgattgcggcatcaccagcgccagctaccaccagggcgtgctgagcgccaccatcctgtacgagatcctgctgggcaaggccaccctgtacgccgtgctggtgtctgccctggtgctgatggctatggtcaagcggaaggacagccggggaagggccaagcgatctggatctggagcaacaaacttctcactactcaaacaagcaggtgacgtggaggagaatcccgggcctactagtatggactggatttggcgcatccttttccttgtcggcgctgctaccggcgcgcattccttcgaagaagtgcaactggtggaatctggcggcggactggtgcagcctggcggatctctgagactgagctgtgccgccagcggcttcaacatcaaggacacctacatccactgggtgcgccaggcccctggaaagggactggaatgggtggcccggatctaccccaccaacggctacaccagatacgccgacagcgtgaagggccggttcaccatcagcgccgacaccagcaagaataccgcctacctccagatgaacagcctgcgggccgaggataccgccgtgtactactgctcaagatggggaggcgacggcttcgctgctatggacgtgtggggccagggcacccttgtgaccgtgtcatctacgcgtatccagaaccctgatcctgccgtgtaccagctgcgggatagcaagagcagcgacaagagcgtgtgtctgttcaccgacttcgacagccagaccaacgtgtcccagagcaaggactccgacgtgtacatcaccgataagtgcgtgctggacatgcggagcatggacttcaagagcaactccgccgtggcctggtccaacaagtccgatttcgcctgcgccaacgccttcaacaacagcattatccccgaggacacattcttcccaagcagcgacgtgccctgcgacgtgaagctggtggaaaagagcttcgagacagacaccaacctgaacttccagaacctgagcgtgatcggcttcagaatcctgctgctgaaagtggccggctttaacctgctgatgaccctgcggctgtggtccagccgcgccaagagaagcggatctggcgtgaagcagaccctgaatttcgacctgctgaagctggctggcgacgtggaatccaacccaggcccttctagaggccatatgaccgagtacaagcccacggtgcgcctcgccacccgcgacgacgtccccagggccgtacgcaccctcgccgccgcgttcgccgactaccccgccacgcgccacaccgtcgatccggaccgccacatcgagcgggtcaccgagctgcaagaactcttcctcacgcgcgtcgggctcgacatcggcaaggtgtgggtcgcggacgacggcgccgcggtggcggtctggaccacgccggagagcgtcgaagcgggggcggtgttcgccgagatcggcccgcgcatggccgagttgagcggttcccggctggccgcgcagcaacagatggaaggcctcctggcgccgcaccggcccaaggagcccgcgtggttcctggccaccgtcggcgtctcgcccgaccaccagggcaagggtctgggcagcgccgtcgtgctccccggagtggaggcggccgagcgcgccggggtgcccgccttcctggagacctccgcgccccgcaacctccccttctacgagcggctcggcttcaccgtcaccgccgacgtcgaggtgcccgaaggaccgcgcacctggtgcatgacccgcaagcccggtgcctga

SEQ ID NO: 21686 - DNA, 1866 bp, Artificial Sequence
  Synthetic Polynucleotide
atggccttaccagtgaccgccttgctcctgccgctggccttgctgctccacgccgccaggccggacatccagatgacacagagccctagcagcctgtctgccagcgtgggagacagagtgaccatcacctgtagagccagccaggacgtgaacacagccgtggcttggtatcagcagaagcctggcaaggcccctaagctgctgatctacagcgccagctttctggaaagcggcgtgcccagcagattcagcggaagcagaagcggcaccgacttcaccctgacaatatccagcctccagcctgaggacttcgccacctactactgccagcaggcttacaccacacctccaacattcggccagggcaccaaggtggaaatcaagagaacactcgaggacctgaagaacgtgttcccacctgaggtggccgtgttcgagcctagcgaggccgagatcagccacacccagaaagccaccctcgtgtgcctggctaccggcttctaccccgaccatgtggaactgtcttggtgggtcaacggcaaagaggtgcacagcggcgtgtgtaccgacccccagccactgaaagaacagcccgccctgaacgacagccggtactgcctgagcagcagactgagagtgtccgccaccttctggcagaacccccggaaccacttcagatgccaggtgcagttctacggcctgagcgagaacgacgagtggacccaggacagagccaagcccgtgacccagatcgtgtctgccgaagcctggggcagagccgattgcggctttaccagcgagagctaccagcagggcgtgctgagcgccaccatcctgtacgagatcctgctgggcaaggccaccctgtacgccgtgctggtgtctgccctggtgctgatggctatggtcaagcggaaggacagccggggaagggccaagcgatctggatctggagcaacaaacttctcactactcaaacaagcaggtgacgtggaggagaatcccgggcctactagtatggactggatttggcgcatccttttccttgtcggcgctgctaccggcgcgcattccttcgaagaagtgcaactggtggaatctggcggcggactggtgcagcctggcggatctctgagactgagctgtgccgccagcggcttcaacatcaaggacacctacatccactgggtgcgccaggcccctggaaagggactggaatgggtggcccggatctaccccaccaacggctacaccagatacgccgacagcgtgaagggccggttcaccatcagcgccgacaccagcaagaataccgcctacctccagatgaacagcctgcgggccgaggataccgccgtgtactactgctcaagatggggaggcgacggcttcgctgctatggacgtgtggggccagggcacccttgtgaccgtgtcatctacgcgtatccagaaccctgatcctgccgtgtaccagctgcgggatagcaagagcagcgacaagagcgtgtgtctgttcaccgacttcgacagccagaccaacgtgtcccagagcaaggactccgacgtgtacatcaccgataagtgcgtgctggacatgcggagcatggacttcaagagcaactccgccgtggcctggtccaacaagtccgatttcgcctgcgccaacgccttcaacaacagcattatccccgaggacacattcttcccaagccccgagagcagctgcgacgtgaagctggtggaaaagagcttcgagacagacaccaacctgaacttccagaacctgagcgtgatcggcttcagaatcctgctgctgaaagtggccggctttaacctgctgatgaccctgcggctgtggtccagc

SEQ ID NO: 21687 - DNA, 1878 bp, Artificial Sequence
  Synthetic Polynucleotide
atggccttaccagtgaccgccttgctcctgccgctggccttgctgctccacgccgccaggccggacatccagatgacacagagccctagcagcctgtctgccagcgtgggagacagagtgaccatcacctgtagagccagccaggacgtgaacacagccgtggcttggtatcagcagaagcctggcaaggcccctaagctgctgatctacagcgccagctttctggaaagcggcgtgcccagcagattcagcggaagcagaagcggcaccgacttcaccctgacaatatccagcctccagcctgaggacttcgccacctactactgccagcaggcttacaccacacctccaacattcggccagggcaccaaggtggaaatcaagagaacactcgagatccagaaccctgatcctgccgtgtaccagctgcgggatagcaagagcagcgacaagagcgtgtgtctgttcaccgacttcgacagccagaccaacgtgtcccagagcaaggactccgacgtgtacatcaccgataagtgcgtgctggacatgcggagcatggacttcaagagcaactccgccgtggcctggtccaacaagtccgatttcgcctgcgccaacgccttcaacaacagcattatccccgaggacacattcttcccaagccccgagagcagctgcgacgtgaagctggtggaaaagagcttcgagacagacaccaacctgaacttccagaacctgagcgtgatcggcttcagaatcctgctgctgaaagtggccggctttaacctgctgatgaccctgcggctgtggtccagccgcgccaagagaagcggatctggcgtgaagcagaccctgaatttcgacctgctgaagctggctggcgacgtggaatccaacccaggccctactagtatggactggatttggcgcatccttttccttgtcggcgctgctaccggcgcgcattccttcgaagaagtgcaactggtggaatctggcggcggactggtgcagcctggcggatctctgagactgagctgtgccgccagcggcttcaacatcaaggacacctacatccactgggtgcgccaggcccctggaaagggactggaatgggtggcccggatctaccccaccaacggctacaccagatacgccgacagcgtgaagggccggttcaccatcagcgccgacaccagcaagaataccgcctacctccagatgaacagcctgcgggccgaggataccgccgtgtactactgctcaagatggggaggcgacggcttcgctgctatggacgtgtggggccagggcacccttgtgaccgtgtcatctacgcgtgaggacctgaagaacgtgttcccacctgaggtggccgtgttcgagcctagcgaggccgagatcagccacacccagaaagccaccctcgtgtgcctggctaccggcttctaccccgaccatgtggaactgtcttggtgggtcaacggcaaagaggtgcacagcggcgtgtgtaccgacccccagccactgaaagaacagcccgccctgaacgacagccggtactgcctgagcagcagactgagagtgtccgccaccttctggcagaacccccggaaccacttcagatgccaggtgcagttctacggcctgagcgagaacgacgagtggacccaggacagagccaagcccgtgacccagatcgtgtctgccgaagcctggggcagagccgattgcggctttaccagcgagagctaccagcagggcgtgctgagcgccaccatcctgtacgagatcctgctgggcaaggccaccctgtacgccgtgctggtgtctgccctggtgctgatggctatggtcaagcggaaggacagccgggga

SEQ ID NO: 21688 - DNA, 2703 bp, Artificial Sequence
  Synthetic Polynucleotide
atggccttaccagtgaccgccttgctcctgccgctggccttgctgctccacgccgccaggccgctcgaggggaaaccaattcccaaccctcttctgggactggattcaaccggcagcggcgaggacctgaagaacgtgttcccacctgaggtggccgtgttcgagcctagcaaggccgagatcgcccacacccagaaagccaccctcgtgtgcctggctaccggcttctaccccgaccatgtggaactgtcttggtgggtcaacggcaaagaggtgcacagcggcgtgtgtaccgacccccagccactgaaagaacagcccgccctgaacgacagccggtactgcctgagcagcagactgagagtgtccgccaccttctggcagaacccccggaaccacttcagatgccaggtgcagttctacggcctgagcgagaacgacgagtggacccaggacagagccaagcccgtgacccagatcgtgtctgccgaagcctggggcagagccgattgcggcatcaccagcgccagctaccaccagggcgtgctgagcgccaccatcctgtacgagatcctgctgggcaaggccaccctgtacgccgtgctggtgtctgccctggtgctgatggctatggtcaagcggaaggacagccggggaagggccaagcgatctggatctggagcaacaaacttctcactactcaaacaagcaggtgacgtggaggagaatcccgggcctactagcatggccttaccagtgaccgccttgctcctgccgctggccttgctgctccacgccgccaggccggacatccagatgacacagagccctagcagcctgtctgccagcgtgggagacagagtgaccatcacctgtagagccagccaggacgtgaacacagccgtggcttggtatcagcagaagcctggcaaggcccctaagctgctgatctacagcgccagctttctggaaagcggcgtgcccagcagattcagcggaagcagaagcggcaccgacttcaccctgacaatatccagcctccagcctgaggacttcgccacctactactgccagcaggcttacaccacacctccaacattcggccagggcaccaaggtggaaatcaagagaacaggcggaggcggaagtggaggcggaggatctggcggcggaggctctgaagtgcaactggtggaatctggcggcggactggtgcagcctggcggatctctgagactgagctgtgccgccagcggcttcaacatcaaggacacctacatccactgggtgcgccaggcccctggaaagggactggaatgggtggcccggatctaccccaccaacggctacaccagatacgccgacagcgtgaagggccggttcaccatcagcgccgacaccagcaagaataccgcctacctccagatgaacagcctgcgggccgaggataccgccgtgtactactgctcaagatggggaggcgacggcttcgctgctatggacgtgtggggccagggcacccttgtgaccgtgtcatctacgcgtgagcagaaactgatctcggaagaggatgggagcggcatccagaaccctgatcctgccgtgtaccagctgcgggatagcaagagcagcgacaagagcgtgtgtctgttcaccgacttcgacagccagaccaacgtgtcccagagcaaggactccgacgtgtacatcaccgataagtgcgtgctggacatgcggagcatggacttcaagagcaactccgccgtggcctggtccaacaagtccgatttcgcctgcgccaacgccttcaacaacagcattatccccgaggacacattcttcccaagcagcgacgtgccctgcgacgtgaagctggtggaaaagagcttcgagacagacaccaacctgaacttccagaacctgagcgtgatcggcttcagaatcctgctgctgaaagtggccggctttaacctgctgatgaccctgcggctgtggtccagccgcgccaagagaagcggatctggcgtgaagcagaccctgaatttcgacctgctgaagctggctggcgacgtggaatccaacccaggcccttctagaggccatatgaccgagtacaagcccacggtgcgcctcgccacccgcgacgacgtccccagggccgtacgcaccctcgccgccgcgttcgccgactaccccgccacgcgccacaccgtcgatccggaccgccacatcgagcgggtcaccgagctgcaagaactcttcctcacgcgcgtcgggctcgacatcggcaaggtgtgggtcgcggacgacggcgccgcggtggcggtctggaccacgccggagagcgtcgaagcgggggcggtgttcgccgagatcggcccgcgcatggccgagttgagcggttcccggctggccgcgcagcaacagatggaaggcctcctggcgccgcaccggcccaaggagcccgcgtggttcctggccaccgtcggcgtctcgcccgaccaccagggcaagggtctgggcagcgccgtcgtgctccccggagtggaggcggccgagcgcgccggggtgcccgccttcctggagacctccgcgccccgcaacctccccttctacgagcggctcggcttcaccgtcaccgccgacgtcgaggtgcccgaaggaccgcgcacctggtgcatgacccgcaagcccggtgcctga

SEQ ID NO: 21689 - DNA, 2679 bp, Artificial Sequence
  Synthetic Polynucleotide
atggccttaccagtgaccgccttgctcctgccgctggccttgctgctccacgccgccaggccggacatccagatgacacagagccctagcagcctgtctgccagcgtgggagacagagtgaccatcacctgtagagccagccaggacgtgaacacagccgtggcttggtatcagcagaagcctggcaaggcccctaagctgctgatctacagcgccagctttctggaaagcggcgtgcccagcagattcagcggaagcagaagcggcaccgacttcaccctgacaatatccagcctccagcctgaggacttcgccacctactactgccagcaggcttacaccacacctccaacattcggccagggcaccaaggtggaaatcaagagaacactcgaggggaaaccaattcccaaccctcttctgggactggattcaaccggcagcggcgacaagcagctggacgccgacgtgtcccccaagcctaccatcttcctgccctctatcgccgagacaaagctccagaaggccggcacctacctgtgcctgctggaaaagttcttcccagatgtgattaagatccactggcaggaaaagaagtccaacaccatcctgggcagccaggaaggcaacaccatgaagaccaacgacacctacatgaagttcagctggctgaccgtgcccgagaagtccctggacaaagaacacagatgcatcgtgcggcacgaaaacaacaagaacggcgtggaccaggaaatcatcttcccacccatcaagaccgatgtgattacaatggaccccaaggacaactgctccaaggacgccaacgataccctgctgctccagctgaccaacaccagcgcctactacatgtacttgttgctgctgctgaagtccgtggtgtacttcgccatcatcacatgctgcctgctgcggagaaccgccttctgctgcaacggcgagaagtctagggccaagcgatctggatctggagcaacaaacttctcactactcaaacaagcaggtgacgtggaggagaatcccgggcctactagtatggactggatttggcgcatccttttccttgtcggcgctgctaccggcgcgcattccttcgaagaagtgcaactggtggaatctggcggcggactggtgcagcctggcggatctctgagactgagctgtgccgccagcggcttcaacatcaaggacacctacatccactgggtgcgccaggcccctggaaagggactggaatgggtggcccggatctaccccaccaacggctacaccagatacgccgacagcgtgaagggccggttcaccatcagcgccgacaccagcaagaataccgcctacctccagatgaacagcctgcgggccgaggataccgccgtgtactactgctcaagatggggaggcgacggcttcgctgctatggacgtgtggggccagggcacccttgtgaccgtgtcatctacgcgtgagcagaaactgatctcggaagaggatgggagcggcagccagcctcacaccaagcccagcgtgttcgtgatgaagaacggcaccaacgtggcctgcctcgtgaaagagttctaccccaaggacatcaggatcaacctggtgtccagcaagaagatcaccgagttcgaccccgccatcgtgatctcccccagcggcaagtacaacgccgtgaagctggggaagtacgaggacagcaacagcgtgacctgctccgtgcagcacgacaacaagaccgtgcacagcaccgactttgaagtgaaaaccgactccaccgaccacgtgaagcccaaagagacagagaacaccaagcagcccagcaagagctgccacaagcccaaggccatcgtgcacaccgagaaagtgaacatgatgagcctgaccgtgctgggcctgcggatgctgttcgccaaaaccgtggccgtgaacttcctgctgaccgccaagctgttcttcctccgcgccaagagaagcggatctggcgtgaagcagaccctgaatttcgacctgctgaagctggctggcgacgtggaatccaacccaggcccttctagaggccatatgaccgagtacaagcccacggtgcgcctcgccacccgcgacgacgtccccagggccgtacgcaccctcgccgccgcgttcgccgactaccccgccacgcgccacaccgtcgatccggaccgccacatcgagcgggtcaccgagctgcaagaactcttcctcacgcgcgtcgggctcgacatcggcaaggtgtgggtcgcggacgacggcgccgcggtggcggtctggaccacgccggagagcgtcgaagcgggggcggtgttcgccgagatcggcccgcgcatggccgagttgagcggttcccggctggccgcgcagcaacagatggaaggcctcctggcgccgcaccggcccaaggagcccgcgtggttcctggccaccgtcggcgtctcgcccgaccaccagggcaagggtctgggcagcgccgtcgtgctccccggagtggaggcggccgagcgcgccggggtgcccgccttcctggagacctccgcgccccgcaacctccccttctacgagcggctcggcttcaccgtcaccgccgacgtcgaggtgcccgaaggaccgcgcacctggtgcatgacccgcaagcccggtgcctga

SEQ ID NO: 21690 - DNA, 1890 bp, Artificial Sequence
  Synthetic Polynucleotide
atggccttaccagtgaccgccttgctcctgccgctggccttgctgctccacgccgccaggccggacatccagatgacacagagccctagcagcctgtctgccagcgtgggagacagagtgaccatcacctgtagagccagccaggacgtgaacacagccgtggcttggtatcagcagaagcctggcaaggcccctaagctgctgatctacagcgccagctttctggaaagcggcgtgcccagcagattcagcggaagcagaagcggcaccgacttcaccctgacaatatccagcctccagcctgaggacttcgccacctactactgccagcaggcttacaccacacctccaacattcggccagggcaccaaggtggaaatcaagagaacactcgagagccagcctcacaccaagcccagcgtgttcgtgatgaagaacggcaccaacgtggcctgcctcgtgaaagagttctaccccaaggacatcaggatcaacctggtgtccagcaagaagatcaccgagttcgaccccgccatcgtgatctcccccagcggcaagtacaacgccgtgaagctggggaagtacgaggacagcaacagcgtgacctgctccgtgcagcacgacaacaagaccgtgcacagcaccgactttgaagtgaaaaccgactccaccgaccacgtgaagcccaaagagacagagaacaccaagcagcccagcaagagctgccacaagcccaaggccatcgtgcacaccgagaaagtgaacatgatgagcctgaccgtgctgggcctgcggatgctgttcgccaaaaccgtggccgtgaacttcctgctgaccgccaagctgttcttcctcagggccaagcgatctggatctggagcaacaaacttctcactactcaaacaagcaggtgacgtggaggagaatcccgggcctactagtatggactggatttggcgcatccttttccttgtcggcgctgctaccggcgcgcattccttcgaagaagtgcaactggtggaatctggcggcggactggtgcagcctggcggatctctgagactgagctgtgccgccagcggcttcaacatcaaggacacctacatccactgggtgcgccaggcccctggaaagggactggaatgggtggcccggatctaccccaccaacggctacaccagatacgccgacagcgtgaagggccggttcaccatcagcgccgacaccagcaagaataccgcctacctccagatgaacagcctgcgggccgaggataccgccgtgtactactgctcaagatggggaggcgacggcttcgctgctatggacgtgtggggccagggcacccttgtgaccgtgtcatctacgcgtgacaagcagctggacgccgacgtgtcccccaagcctaccatcttcctgccctctatcgccgagacaaagctccagaaggccggcacctacctgtgcctgctggaaaagttcttcccagatgtgattaagatccactggcaggaaaagaagtccaacaccatcctgggcagccaggaaggcaacaccatgaagaccaacgacacctacatgaagttcagctggctgaccgtgcccgagaagtccctggacaaagaacacagatgcatcgtgcggcacgaaaacaacaagaacggcgtggaccaggaaatcatcttcccacccatcaagaccgatgtgattacaatggaccccaaggacaactgctccaaggacgccaacgataccctgctgctccagctgaccaacaccagcgcctactacatgtacttgttgctgctgctgaagtccgtggtgtacttcgccatcatcacatgctgcctgctgcggagaaccgccttctgctgcaacggcgagaagtct

SEQ ID NO: 21691 - DNA, 2724 bp, Artificial Sequence
  Synthetic Polynucleotide
atggccttaccagtgaccgccttgctcctgccgctggccttgctgctccacgccgccaggccgctcgaggggaaaccaattcccaaccctcttctgggactggattcaaccggcagcggcgacaagcagctggacgccgacgtgtcccccaagcctaccatcttcctgccctctatcgccgagacaaagctccagaaggccggcacctacctgtgcctgctggaaaagttcttcccagatgtgattaagatccactggcaggaaaagaagtccaacaccatcctgggcagccaggaaggcaacaccatgaagaccaacgacacctacatgaagttcagctggctgaccgtgcccgagaagtccctggacaaagaacacagatgcatcgtgcggcacgaaaacaacaagaacggcgtggaccaggaaatcatcttcccacccatcaagaccgatgtgattacaatggaccccaaggacaactgctccaaggacgccaacgataccctgctgctccagctgaccaacaccagcgcctactacatgtacttgttgctgctgctgaagtccgtggtgtacttcgccatcatcacatgctgcctgctgcggagaaccgccttctgctgcaacggcgagaagtctagggccaagcgatctggatctggagcaacaaacttctcactactcaaacaagcaggtgacgtggaggagaatcccgggcctactagcatggccttaccagtgaccgccttgctcctgccgctggccttgctgctccacgccgccaggccggacatccagatgacacagagccctagcagcctgtctgccagcgtgggagacagagtgaccatcacctgtagagccagccaggacgtgaacacagccgtggcttggtatcagcagaagcctggcaaggcccctaagctgctgatctacagcgccagctttctggaaagcggcgtgcccagcagattcagcggaagcagaagcggcaccgacttcaccctgacaatatccagcctccagcctgaggacttcgccacctactactgccagcaggcttacaccacacctccaacattcggccagggcaccaaggtggaaatcaagagaacaggcggaggcggaagtggaggcggaggatctggcggcggaggctctgaagtgcaactggtggaatctggcggcggactggtgcagcctggcggatctctgagactgagctgtgccgccagcggcttcaacatcaaggacacctacatccactgggtgcgccaggcccctggaaagggactggaatgggtggcccggatctaccccaccaacggctacaccagatacgccgacagcgtgaagggccggttcaccatcagcgccgacaccagcaagaataccgcctacctccagatgaacagcctgcgggccgaggataccgccgtgtactactgctcaagatggggaggcgacggcttcgctgctatggacgtgtggggccagggcacccttgtgaccgtgtcatctacgcgtgagcagaaactgatctcggaagaggatgggagcggcagccagcctcacaccaagcccagcgtgttcgtgatgaagaacggcaccaacgtggcctgcctcgtgaaagagttctaccccaaggacatcaggatcaacctggtgtccagcaagaagatcaccgagttcgaccccgccatcgtgatctcccccagcggcaagtacaacgccgtgaagctggggaagtacgaggacagcaacagcgtgacctgctccgtgcagcacgacaacaagaccgtgcacagcaccgactttgaagtgaaaaccgactccaccgaccacgtgaagcccaaagagacagagaacaccaagcagcccagcaagagctgccacaagcccaaggccatcgtgcacaccgagaaagtgaacatgatgagcctgaccgtgctgggcctgcggatgctgttcgccaaaaccgtggccgtgaacttcctgctgaccgccaagctgttcttcctccgcgccaagagaagcggatctggcgtgaagcagaccctgaatttcgacctgctgaagctggctggcgacgtggaatccaacccaggcccttctagaggccatatgaccgagtacaagcccacggtgcgcctcgccacccgcgacgacgtccccagggccgtacgcaccctcgccgccgcgttcgccgactaccccgccacgcgccacaccgtcgatccggaccgccacatcgagcgggtcaccgagctgcaagaactcttcctcacgcgcgtcgggctcgacatcggcaaggtgtgggtcgcggacgacggcgccgcggtggcggtctggaccacgccggagagcgtcgaagcgggggcggtgttcgccgagatcggcccgcgcatggccgagttgagcggttcccggctggccgcgcagcaacagatggaaggcctcctggcgccgcaccggcccaaggagcccgcgtggttcctggccaccgtcggcgtctcgcccgaccaccagggcaagggtctgggcagcgccgtcgtgctccccggagtggaggcggccgagcgcgccggggtgcccgccttcctggagacctccgcgccccgcaacctccccttctacgagcggctcggcttcaccgtcaccgccgacgtcgaggtgcccgaaggaccgcgcacctggtgcatgacccgcaagcccggtgcctga

SEQ ID NO: 21692 - DNA, 3099 bp, Artificial Sequence
  Synthetic Polynucleotide
atggccttaccagtgaccgccttgctcctgccgctggccttgctgctccacgccgccaggccggacatccagatgacacagagccctagcagcctgtctgccagcgtgggagacagagtgaccatcacctgtagagccagccaggacgtgaacacagccgtggcttggtatcagcagaagcctggcaaggcccctaagctgctgatctacagcgccagctttctggaaagcggcgtgcccagcagattcagcggaagcagaagcggcaccgacttcaccctgacaatatccagcctccagcctgaggacttcgccacctactactgccagcaggcttacaccacacctccaacattcggccagggcaccaaggtggaaatcaagagaacaggacagcctaaggccaatcctaccgtgacactgttccctccaagcagcgaagaactccaggccaacaaggccacacttgtgtgcctgatctccgacttctaccctggggctgtgacagtggcttggaaggccgatggatctcctgtgaaagccggcgtggaaaccaccaagccatccaagcagagcaacaacaaatacgccgccagctcctacctgagcctgacacctgagcagtggaagtcccacagatcctacagctgccaagtgacccacgaaggcagcaccgtggaaaagacagtggcccctacagagtgcagcggatcccagagcttcggcctgctggaccccaagctgtgctacctgctggatggcatcctgttcatctacggcgtgatcctgaccgccctgttcctgagagtgaagttcagcagaagcgccgacgcccctgcctaccagcagggacagaaccaactgtacaacgagctgaacctgggcagacgggaagagtacgacgtgctggacaagcggagaggcagggaccctgagatgggcggaaagccccagcggagaaagaacccccaggaaggactgtataacgaactccagaaagacaagatggccgaagcctacagcgagatcggcatgaagggcgagcggagaagaggcaagggccacgatggcctgtaccagggcctgagcaccgccaccaaggacacctatgacgccctgcacatgcaggccctgcctccaagaagggccaagcgatctggatctggagcaacaaacttctcactactcaaacaagcaggtgacgtggaggagaatcccgggcctactagtatggactggatttggcgcatccttttccttgtcggcgctgctaccggcgcgcattccttcgaagaagtgcaactggtggaatctggcggcggactggtgcagcctggcggatctctgagactgagctgtgccgccagcggcttcaacatcaaggacacctacatccactgggtgcgccaggcccctggaaagggactggaatgggtggcccggatctaccccaccaacggctacaccagatacgccgacagcgtgaagggccggttcaccatcagcgccgacaccagcaagaataccgcctacctccagatgaacagcctgcgggccgaggataccgccgtgtactactgctcaagatggggaggcgacggcttcgctgctatggacgtgtggggccagggcacccttgtgaccgtgtcatctgcctctacaaagggaccctccgtgtttcctctggctcccagcagcaagtctacaagcggaggaacagccgctctgggctgcctggtcaaggattactttcccgagcctgtgaccgtgtcctggaatagcggagcactgacaagcggcgtgcacacctttccagccgtgctgcaaagcagcggcctgtactctctgagcagcgtggtcacagtgcctagctctagcctgggcacccagacctacatctgcaatgtgaaccacaagcctagcaacaccaaggtggacaagagagtggaacccaagagctgtggtacccagagttttgggttgttggaccctaaattgtgctatctgttggacggaatcctgttcatttacggagtgatcctgaccgcattgttcctgcgggttaagttttccagatccgcagacgcacccgcttaccaacaagggcagaaccaactctacaatgaacttaatttggggcggagggaagagtacgacgttctggacaaaaggaggggacgagatcccgagatgggcggaaagcctcagcgaaggaagaatccgcaagaggggctttataacgaactccagaaagataaaatggcagaagcctatagtgagattgggatgaagggagaaaggaggaggggtaaaggtcacgatgggttgtaccaaggattgagcacagccactaaagatacctatgatgcgctccacatgcaggccctgccgccaagacgcgccaagagaagcggatctggcgtgaagcagaccctgaatttcgacctgctgaagctggctggcgacgtggaatccaacccaggcccttctagaggccatatgaccgagtacaagcccacggtgcgcctcgccacccgcgacgacgtccccagggccgtacgcaccctcgccgccgcgttcgccgactaccccgccacgcgccacaccgtcgatccggaccgccacatcgagcgggtcaccgagctgcaagaactcttcctcacgcgcgtcgggctcgacatcggcaaggtgtgggtcgcggacgacggcgccgcggtggcggtctggaccacgccggagagcgtcgaagcgggggcggtgttcgccgagatcggcccgcgcatggccgagttgagcggttcccggctggccgcgcagcaacagatggaaggcctcctggcgccgcaccggcccaaggagcccgcgtggttcctggccaccgtcggcgtctcgcccgaccaccagggcaagggtctgggcagcgccgtcgtgctccccggagtggaggcggccgagcgcgccggggtgcccgccttcctggagacctccgcgccccgcaacctccccttctacgagcggctcggcttcaccgtcaccgccgacgtcgaggtgcccgaaggaccgcgcacctggtgcatgacccgcaagcccggtgcctga

SEQ ID NO: 21693 - DNA, 1944 bp, Artificial Sequence
  Synthetic Polynucleotide
atggccttaccagtgaccgccttgctcctgccgctggccttgctgctccacgccgccaggccggacatccagatgacacagagccctagcagcctgtctgccagcgtgggagacagagtgaccatcacctgtagagccagccaggacgtgaacacagccgtggcttggtatcagcagaagcctggcaaggcccctaagctgctgatctacagcgccagctttctggaaagcggcgtgcccagcagattcagcggaagcagaagcggcaccgacttcaccctgacaatatccagcctccagcctgaggacttcgccacctactactgccagcaggcttacaccacacctccaacattcggccagggcaccaaggtggaaatcaagagaacactcgagggacagcctaaggccaatcctaccgtgacactgttccctccaagcagcgaagaactccaggccaacaaggccacacttgtgtgcctgatctccgacttctaccctggggctgtgacagtggcttggaaggccgatggatctcctgtgaaagccggcgtggaaaccaccaagccatccaagcagagcaacaacaaatacgccgccagctcctacctgagcctgacacctgagcagtggaagtcccacagatcctacagctgccaagtgacccacgaaggcagcaccgtggaaaagacagtggcccctacagagtgcagccccatcaagaccgatgtgattacaatggaccccaaggacaactgctccaaggacgccaacgataccctgctgctccagctgaccaacaccagcgcctactacatgtacttgttgctgctgctgaagtccgtggtgtacttcgccatcatcacatgctgcctgctgcggagaaccgccttctgctgcaacggcgagaagtctagggccaagcgatctggatctggagcaacaaacttctcactactcaaacaagcaggtgacgtggaggagaatcccgggcctactagtatggactggatttggcgcatccttttccttgtcggcgctgctaccggcgcgcattccttcgaagaagtgcaactggtggaatctggcggcggactggtgcagcctggcggatctctgagactgagctgtgccgccagcggcttcaacatcaaggacacctacatccactgggtgcgccaggcccctggaaagggactggaatgggtggcccggatctaccccaccaacggctacaccagatacgccgacagcgtgaagggccggttcaccatcagcgccgacaccagcaagaataccgcctacctccagatgaacagcctgcgggccgaggataccgccgtgtactactgctcaagatggggaggcgacggcttcgctgctatggacgtgtggggccagggcacccttgtgaccgtgtcatctacgcgtgcctctacaaagggaccctccgtgtttcctctggctcccagcagcaagtctacaagcggaggaacagccgctctgggctgcctggtcaaggattactttcccgagcctgtgaccgtgtcctggaatagcggagcactgacaagcggcgtgcacacctttccagccgtgctgcaaagcagcggcctgtactctctgagcagcgtggtcacagtgcctagctctagcctgggcacccagacctacatctgcaatgtgaaccacaagcctagcaacaccaaggtggacaagagagtggaacccaagagctgtgaagtgaaaaccgactccaccgaccacgtgaagcccaaagagacagagaacaccaagcagcccagcaagagctgccacaagcccaaggccatcgtgcacaccgagaaagtgaacatgatgagcctgaccgtgctgggcctgcggatgctgttcgccaaaaccgtggccgtgaacttcctgctgaccgccaagctgttcttcctc

SEQ ID NO: 21694 - DNA, 1878 bp, Artificial Sequence
  Synthetic Polynucleotide
atggccttaccagtgaccgccttgctcctgccgctggccttgctgctccacgccgccaggccggacatccagatgacacagagccctagcagcctgtctgccagcgtgggagacagagtgaccatcacctgtagagccagccaggacgtgaacacagccgtggcttggtatcagcagaagcctggcaaggcccctaagctgctgatctacagcgccagctttctggaaagcggcgtgcccagcagattcagcggaagcagaagcggcaccgacttcaccctgacaatatccagcctccagcctgaggacttcgccacctactactgccagcaggcttacaccacacctccaacattcggccagggcaccaaggtggaaatcaagagaacactcgagggacagcctaaggccaatcctaccgtgacactgttccctccaagcagcgaagaactccaggccaacaaggccacacttgtgtgcctgatctccgacttctaccctggggctgtgacagtggcttggaaggccgatggatctcctgtgaaagccggcgtggaaaccaccaagccatccaagcagagcaacaacaaatacgccgccagctcctacctgagcctgacacctgagcagtggaagtcccacagatcctacagctgccaagtgacccacgaaggcagcaccgtggaaaagacagtggcccctacagagtgcagcggcagagccgattgcggctttaccagcgagagctaccagcagggcgtgctgagcgccaccatcctgtacgagatcctgctgggcaaggccaccctgtacgccgtgctggtgtctgccctggtgctgatggctatggtcaagcggaaggacagccggggaagggccaagcgatctggatctggagcaacaaacttctcactactcaaacaagcaggtgacgtggaggagaatcccgggcctactagtatggactggatttggcgcatccttttccttgtcggcgctgctaccggcgcgcattccttcgaagaagtgcaactggtggaatctggcggcggactggtgcagcctggcggatctctgagactgagctgtgccgccagcggcttcaacatcaaggacacctacatccactgggtgcgccaggcccctggaaagggactggaatgggtggcccggatctaccccaccaacggctacaccagatacgccgacagcgtgaagggccggttcaccatcagcgccgacaccagcaagaataccgcctacctccagatgaacagcctgcgggccgaggataccgccgtgtactactgctcaagatggggaggcgacggcttcgctgctatggacgtgtggggccagggcacccttgtgaccgtgtcatctacgcgtgcctctacaaagggaccctccgtgtttcctctggctcccagcagcaagtctacaagcggaggaacagccgctctgggctgcctggtcaaggattactttcccgagcctgtgaccgtgtcctggaatagcggagcactgacaagcggcgtgcacacctttccagccgtgctgcaaagcagcggcctgtactctctgagcagcgtggtcacagtgcctagctctagcctgggcacccagacctacatctgcaatgtgaaccacaagcctagcaacaccaaggtggacaagagagtggaacccaagagctgtatccccgaggacacattcttcccaagccccgagagcagctgcgacgtgaagctggtggaaaagagcttcgagacagacaccaacctgaacttccagaacctgagcgtgatcggcttcagaatcctgctgctgaaagtggccggctttaacctgctgatgaccctgcggctgtggtccagc

SEQ ID NO: 21695 - DNA, 1356 bp, Artificial Sequence
  Synthetic Polynucleotide
atggccttaccagtgaccgccttgctcctgccgctggccttgctgctccacgccgccaggccggacatccagatgacacagagccctagcagcctgtctgccagcgtgggagacagagtgaccatcacctgtagagccagccaggacgtgaacacagccgtggcttggtatcagcagaagcctggcaaggcccctaagctgctgatctacagcgccagctttctggaaagcggcgtgcccagcagattcagcggaagcagaagcggcaccgacttcaccctgacaatatccagcctccagcctgaggacttcgccacctactactgccagcaggcttacaccacacctccaacattcggccagggcaccaaggtggaaatcaagagaacaggcggaggcggaagtggaggcggaggatctggcggcggaggctctgaagtgcaactggtggaatctggcggcggactggtgcagcctggcggatctctgagactgagctgtgccgccagcggcttcaacatcaaggacacctacatccactgggtgcgccaggcccctggaaagggactggaatgggtggcccggatctaccccaccaacggctacaccagatacgccgacagcgtgaagggccggttcaccatcagcgccgacaccagcaagaataccgcctacctccagatgaacagcctgcgggccgaggataccgccgtgtactactgctcaagatggggaggcgacggcttcgctgctatggacgtgtggggccagggcacccttgtgaccgtgtcatctacgcgtgacggtaacgaggagatgggaggaatcactcaaaccccttacaaagtctcaatttcaggaacaactgttatccttacatgtccccagtatcctggcagcgagatcctttggcagcataacgacaagaatatagggggagatgaagacgataagaatatcggatctgacgaggatcacttgagcctgaaagagttctccgagcttgaacaaagcggatattatgtgtgctatccgcgcgggtcaaagccggaagacgctaacttttacctttatctccgagccagagtgtgcgaaaattgcatggaaatggacgttatgtccgttgctacaatagttatcgtagatatatgcatcacgggtggactgcttctgctggtttattattggtccaagaatagaaaggccaaagctaaacccgtgaccagaggcgctggcgcaggcggaaggcaaaggggacaaaacaaagaacggccaccaccagtgccaaatccagattatgagcctattcggaaaggacagagggacctgtactctggcctgaatcagagaagaatc

SEQ ID NO: 21696 - DNA, 1251 bp, Artificial Sequence
  Synthetic Polynucleotide
atggccttaccagtgaccgccttgctcctgccgctggccttgctgctccacgccgccaggccggacatccagatgacacagagccctagcagcctgtctgccagcgtgggagacagagtgaccatcacctgtagagccagccaggacgtgaacacagccgtggcttggtatcagcagaagcctggcaaggcccctaagctgctgatctacagcgccagctttctggaaagcggcgtgcccagcagattcagcggaagcagaagcggcaccgacttcaccctgacaatatccagcctccagcctgaggacttcgccacctactactgccagcaggcttacaccacacctccaacattcggccagggcaccaaggtggaaatcaagagaacaggcggaggcggaagtggaggcggaggatctggcggcggaggctctgaagtgcaactggtggaatctggcggcggactggtgcagcctggcggatctctgagactgagctgtgccgccagcggcttcaacatcaaggacacctacatccactgggtgcgccaggcccctggaaagggactggaatgggtggcccggatctaccccaccaacggctacaccagatacgccgacagcgtgaagggccggttcaccatcagcgccgacaccagcaagaataccgcctacctccagatgaacagcctgcgggccgaggataccgccgtgtactactgctcaagatggggaggcgacggcttcgctgctatggacgtgtggggccagggcacccttgtgaccgtgtcatctacgcgtttcaagatccccatcgaggaactggaagatcgggtgttcgtgaactgcaacacctctatcacctgggtggaaggcaccgtgggaacactgctgagcgacatcaccagactggacctcggcaagcggattctggaccctcggggcatctacagatgcaacggcaccgacatctacaaggacaaagaaagcaccgtgcaggtccactacagaatgtgccagtcctgcgtggaactggaccctgctacagtggccggcatcatcgtgaccgatgtgatcgctactctgctgctggctctgggagtgttctgcttcgccggacacgaaacaggcagactgtctggcgctgccgatacacaggccctgctgagaaacgaccaagtgtatcagcccctgcgcgacagagatgatgcccagtattctcacctcggcggcaactgggctagaaacaag

SEQ ID NO: 21697 - DNA, 1281 bp, Artificial Sequence
  Synthetic Polynucleotide
atggccttaccagtgaccgccttgctcctgccgctggccttgctgctccacgccgccaggccggacatccagatgacacagagccctagcagcctgtctgccagcgtgggagacagagtgaccatcacctgtagagccagccaggacgtgaacacagccgtggcttggtatcagcagaagcctggcaaggcccctaagctgctgatctacagcgccagctttctggaaagcggcgtgcccagcagattcagcggaagcagaagcggcaccgacttcaccctgacaatatccagcctccagcctgaggacttcgccacctactactgccagcaggcttacaccacacctccaacattcggccagggcaccaaggtggaaatcaagagaacaggcggaggcggaagtggaggcggaggatctggcggcggaggctctgaagtgcaactggtggaatctggcggcggactggtgcagcctggcggatctctgagactgagctgtgccgccagcggcttcaacatcaaggacacctacatccactgggtgcgccaggcccctggaaagggactggaatgggtggcccggatctaccccaccaacggctacaccagatacgccgacagcgtgaagggccggttcaccatcagcgccgacaccagcaagaataccgcctacctccagatgaacagcctgcgggccgaggataccgccgtgtactactgctcaagatggggaggcgacggcttcgctgctatggacgtgtggggccagggcacccttgtgaccgtgtcatctacgcgtcagagcatcaagggcaaccacctggtcaaggtgtacgactaccaagaggacggcagcgtgctgctgacatgtgatgccgaggccaagaacatcacctggtttaaggacggcaagatgatcggcttcctgaccgaggacaagaagaagtggaacctgggcagcaacgctaaggaccccagaggcatgtatcagtgcaagggcagccagaacaagagcaagcccctccaggtgtactaccggatgtgccagaactgcatcgagctgaacgccgctaccatcagcggctttctgttcgccgagatcgtgtccatcttcgtgctggccgtgggcgtgtactttatcgctggacaggatggcgtgcggcagagcagagcttccgataagcaaaccctgctgcctaacgaccagctgtaccagcctctgaaggacagagaggacgaccagtacagccacctccagggcaatcagctgagaagaaac

SEQ ID NO: 21698 - DNA, 2271 bp, Artificial Sequence
  Synthetic Polynucleotide
atggccttaccagtgaccgccttgctcctgccgctggccttgctgctccacgccgccaggccggaagtgcagctggttgaatctggcggaggactggttcagcctggcggatctctgagactgtcttgtgccgccagcggcttcagcttcagcgacttttggatgagctgggtccgacaggcccctggcaaaggacttgaatgggtcgccacaatcagccaggccggcagcgagaaggactacgtggactctgtgaagggcagattcaccatcagccgggacaacgccaagaagtccctgtacctccagatgaacagcctgagagccgaggacaccgccgtgtactattgtgcctctggcgtgtacagcttcgactacagaggccagggcaccctggtcacagtctcttctggtaccggcggaggcggatctggcggcggaggtagcggtggcggaggatctgaattcgacatccagatgacacagagccctagcagcctgtctgccagcgtgggagacagagtgaccatcacctgtagagccagccaggacgtgaacacagccgtggcttggtatcagcagaagcctggcaaggcccctaagctgctgatctacagcgccagctttctggaaagcggcgtgcccagcagattcagcggaagcagaagcggcaccgacttcaccctgacaatatccagcctccagcctgaggacttcgccacctactactgccagcaggcttacaccacacctccaacattcggccagggcaccaaggtggaaatcaagagaacactcgaggacctgaagaacgtgttcccacctgaggtggccgtgttcgagcctagcgaggccgagatcagccacacccagaaagccaccctcgtgtgcctggctaccggcttctaccccgaccatgtggaactgtcttggtgggtcaacggcaaagaggtgcacagcggcgtgtgtaccgacccccagccactgaaagaacagcccgccctgaacgacagccggtactgcctgagcagcagactgagagtgtccgccaccttctggcagaacccccggaaccacttcagatgccaggtgcagttctacggcctgagcgagaacgacgagtggacccaggacagagccaagcccgtgacccagatcgtgtctgccgaagcctggggcagagccgattgcggctttaccagcgagagctaccagcagggcgtgctgagcgccaccatcctgtacgagatcctgctgggcaaggccaccctgtacgccgtgctggtgtctgccctggtgctgatggctatggtcaagcggaaggacagccggggaagggccaagcgatctggatctggagcaacaaacttctcactactcaaacaagcaggtgacgtggaggagaatcccgggcctactagtatggactggatttggcgcatccttttccttgtcggcgctgctaccggcgcgcattccttcgaagaagtgcaactggtggaatctggcggcggactggtgcagcctggcggatctctgagactgagctgtgccgccagcggcttcaacatcaaggacacctacatccactgggtgcgccaggcccctggaaagggactggaatgggtggcccggatctaccccaccaacggctacaccagatacgccgacagcgtgaagggccggttcaccatcagcgccgacaccagcaagaataccgcctacctccagatgaacagcctgcgggccgaggataccgccgtgtactactgctcaagatggggaggcgacggcttcgctgctatggacgtgtggggccagggcacccttgtgaccgtgtcatctacgcgtatccagaaccctgatcctgccgtgtaccagctgcgggatagcaagagcagcgacaagagcgtgtgtctgttcaccgacttcgacagccagaccaacgtgtcccagagcaaggactccgacgtgtacatcaccgataagtgcgtgctggacatgcggagcatggacttcaagagcaactccgccgtggcctggtccaacaagtccgatttcgcctgcgccaacgccttcaacaacagcattatccccgaggacacattcttcccaagccccgagagcagctgcgacgtgaagctggtggaaaagagcttcgagacagacaccaacctgaacttccagaacctgagcgtgatcggcttcagaatcctgctgctgaaagtggccggctttaacctgctgatgaccctgcggctgtggtccagc

SEQ ID NO: 21699 - DNA, 2349 bp, Artificial Sequence
  Synthetic Polynucleotide
atggccttaccagtgaccgccttgctcctgccgctggccttgctgctccacgccgccaggccggaagtgcagctggttgaatctggcggaggactggttcagcctggcggatctctgagactgtcttgtgccgccagcggcttcagcttcagcgacttttggatgagctgggtccgacaggcccctggcaaaggacttgaatgggtcgccacaatcagccaggccggcagcgagaaggactacgtggactctgtgaagggcagattcaccatcagccgggacaacgccaagaagtccctgtacctccagatgaacagcctgagagccgaggacaccgccgtgtactattgtgcctctggcgtgtacagcttcgactacagaggccagggcaccctggtcacagtctcttctggtaccggcggaggcggatctggcggcggaggtagcggtggcggaggatctgaattcgacatccagatgacacagagccctagcagcctgtctgccagcgtgggagacagagtgaccatcacctgtagagccagccaggacgtgaacacagccgtggcttggtatcagcagaagcctggcaaggcccctaagctgctgatctacagcgccagctttctggaaagcggcgtgcccagcagattcagcggaagcagaagcggcaccgacttcaccctgacaatatccagcctccagcctgaggacttcgccacctactactgccagcaggcttacaccacacctccaacattcggccagggcaccaaggtggaaatcaagagaacactcgagggacagcctaaggccaatcctaccgtgacactgttccctccaagcagcgaagaactccaggccaacaaggccacacttgtgtgcctgatctccgacttctaccctggggctgtgacagtggcttggaaggccgatggatctcctgtgaaagccggcgtggaaaccaccaagccatccaagcagagcaacaacaaatacgccgccagctcctacctgagcctgacacctgagcagtggaagtcccacagatcctacagctgccaagtgacccacgaaggcagcaccgtggaaaagacagtggcccctacagagtgcagccccatcaagaccgatgtgattacaatggaccccaaggacaactgctccaaggacgccaacgataccctgctgctccagctgaccaacaccagcgcctactacatgtacttgttgctgctgctgaagtccgtggtgtacttcgccatcatcacatgctgcctgctgcggagaaccgccttctgctgcaacggcgagaagtctagggccaagcgatctggatctggagcaacaaacttctcactactcaaacaagcaggtgacgtggaggagaatcccgggcctactagtatggactggatttggcgcatccttttccttgtcggcgctgctaccggcgcgcattccttcgaagaagtgcaactggtggaatctggcggcggactggtgcagcctggcggatctctgagactgagctgtgccgccagcggcttcaacatcaaggacacctacatccactgggtgcgccaggcccctggaaagggactggaatgggtggcccggatctaccccaccaacggctacaccagatacgccgacagcgtgaagggccggttcaccatcagcgccgacaccagcaagaataccgcctacctccagatgaacagcctgcgggccgaggataccgccgtgtactactgctcaagatggggaggcgacggcttcgctgctatggacgtgtggggccagggcacccttgtgaccgtgtcatctacgcgtgcctctacaaagggaccctccgtgtttcctctggctcccagcagcaagtctacaagcggaggaacagccgctctgggctgcctggtcaaggattactttcccgagcctgtgaccgtgtcctggaatagcggagcactgacaagcggcgtgcacacctttccagccgtgctgcaaagcagcggcctgtactctctgagcagcgtggtcacagtgcctagctctagcctgggcacccagacctacatctgcaatgtgaaccacaagcctagcaacaccaaggtggacaagagagtggaacccaagagctgtgaagtgaaaaccgactccaccgaccacgtgaagcccaaagagacagagaacaccaagcagcccagcaagagctgccacaagcccaaggccatcgtgcacaccgagaaagtgaacatgatgagcctgaccgtgctgggcctgcggatgctgttcgccaaaaccgtggccgtgaacttcctgctgaccgccaagctgttcttcctc

SEQ ID NO: 21700 - DNA, 2292 bp, Artificial Sequence
  Synthetic Polynucleotide
atggccttaccagtgaccgccttgctcctgccgctggccttgctgctccacgccgccaggccggaagtgcagctggttgaatctggcggaggactggttcagcctggcggatctctgagactgtcttgtgccgccagcggcttcagcttcagcgacttttggatgagctgggtccgacaggcccctggcaaaggacttgaatgggtcgccacaatcagccaggccggcagcgagaaggactacgtggactctgtgaagggcagattcaccatcagccgggacaacgccaagaagtccctgtacctccagatgaacagcctgagagccgaggacaccgccgtgtactattgtgcctctggcgtgtacagcttcgactacagaggccagggcaccctggtcacagtctcttctggtaccggcggaggcggatctggcggcggaggtagcggtggcggaggatctgaattcgacatccagatgacacagagccctagcagcctgtctgccagcgtgggagacagagtgaccatcacctgtagagccagccaggacgtgaacacagccgtggcttggtatcagcagaagcctggcaaggcccctaagctgctgatctacagcgccagctttctggaaagcggcgtgcccagcagattcagcggaagcagaagcggcaccgacttcaccctgacaatatccagcctccagcctgaggacttcgccacctactactgccagcaggcttacaccacacctccaacattcggccagggcaccaaggtggaaatcaagagaacactcgagggacagcctaaggccaatcctaccgtgacactgttccctccaagcagcgaagaactccaggccaacaaggccacacttgtgtgcctgatctccgacttctaccctggggctgtgacagtggcttggaaggccgatggatctcctgtgaaagccggcgtggaaaccaccaagccatccaagcagagcaacaacaaatacgccgccagctcctacctgagcctgacacctgagcagtggaagtcccacagatcctacagctgccaagtgacccacgaaggcagcaccgtggaaaagacagtggcccctacagagtgcagcggcagagccgattgcggctttaccagcgagagctaccagcagggcgtgctgagcgccaccatcctgtacgagatcctgctgggcaaggccaccctgtacgccgtgctggtgtctgccctggtgctgatggctatggtcaagcggaaggacagccggggacgcgccaagagaagcggatctggcgtgaagcagaccctgaatttcgacctgctgaagctggctggcgacgtggaatccaacccaggccctactagtatggactggatttggcgcatccttttccttgtcggcgctgctaccggcgcgcattccttcgaagaagtgcaactggtggaatctggcggcggactggtgcagcctggcggatctctgagactgagctgtgccgccagcggcttcaacatcaaggacacctacatccactgggtgcgccaggcccctggaaagggactggaatgggtggcccggatctaccccaccaacggctacaccagatacgccgacagcgtgaagggccggttcaccatcagcgccgacaccagcaagaataccgcctacctccagatgaacagcctgcgggccgaggataccgccgtgtactactgctcaagatggggaggcgacggcttcgctgctatggacgtgtggggccagggcacccttgtgaccgtgtcatctacgcgtgcctctacaaagggaccctccgtgtttcctctggctcccagcagcaagtctacaagcggaggaacagccgctctgggctgcctggtcaaggattactttcccgagcctgtgaccgtgtcctggaatagcggagcactgacaagcggcgtgcacacctttccagccgtgctgcaaagcagcggcctgtactctctgagcagcgtggtcacagtgcctagctctagcctgggcacccagacctacatctgcaatgtgaaccacaagcctagcaacaccaaggtggacaagagagtggaacccaagagctgtatccccgaggacacattcttcccaagccccgagagcagctgcgacgtgaagctggtggaaaagagcttcgagacagacaccaacctgaacttccagaacctgagcgtgatcggcttcagaatcctgctgctgaaagtggccggctttaacctgctgatgaccctgcggctgtggtccagc

SEQ ID NO: 21701 - DNA, 2694 bp, Artificial Sequence
  Synthetic Polynucleotide
atggccttaccagtgaccgccttgctcctgccgctggccttgctgctccacgccgccaggccggaagtgcagctggttgaatctggcggaggactggttcagcctggcggatctctgagactgtcttgtgccgccagcggcttcagcttcagcgacttttggatgagctgggtccgacaggcccctggcaaaggacttgaatgggtcgccacaatcagccaggccggcagcgagaaggactacgtggactctgtgaagggcagattcaccatcagccgggacaacgccaagaagtccctgtacctccagatgaacagcctgagagccgaggacaccgccgtgtactattgtgcctctggcgtgtacagcttcgactacagaggccagggcaccctggtcacagtctcttctggtaccggcggaggcggatctggcggcggaggtagcggtggcggaggatctgaattcgacatccagatgacacagagccctagcagcctgtctgccagcgtgggagacagagtgaccatcacctgtagagccagccaggacgtgaacacagccgtggcttggtatcagcagaagcctggcaaggcccctaagctgctgatctacagcgccagctttctggaaagcggcgtgcccagcagattcagcggaagcagaagcggcaccgacttcaccctgacaatatccagcctccagcctgaggacttcgccacctactactgccagcaggcttacaccacacctccaacattcggccagggcaccaaggtggaaatcaagagaacactcgagatccagaaccctgatcctgccgtgtaccagctgcgggatagcaagagcagcgacaagagcgtgtgtctgttcaccgacttcgacagccagaccaacgtgtcccagagcaaggactccgacgtgtacatcaccgataagtgcgtgctggacatgcggagcatggacttcaagagcaactccgccgtggcctggtccaacaagtccgatttcgcctgcgccaacgccttcaacaacagcattatccccgaggacacattcttcccaagccccgagagcagctgcgacgtgaagctggtggaaaagagcttcgagacagacaccaacctgaacttccagaacctgagcgtgatcggcttcagaatcctgctgctgaaagtggccggctttaacctgctgatgaccctgcggctgtggtccagccgcgccaagagaagcggatctggcgtgaagcagaccctgaatttcgacctgctgaagctggctggcgacgtggaatccaacccaggccctactagtatggactggatttggcgcatccttttccttgtcggcgctgctaccggcgcgcattccgggccccagctccagctgcaagagtctggacctggcctggtcaagcctagcgagacactgagcctgacctgtaccgtgtccggcgatagcatcagcagcggcgattactactggggctggatcagacagcctcctggcaaaggactggaatggatcggccacatctactacagcggcgtgacctactacaaccccagcctgaagtccagagtgaccatcagcgtggacaccagccggaaccagttctccctgaagctgtctagcgtgacagccgccgataccgccgtgtactactgcaccagagaggacagcagcaactggcggagtagaggccagggaacactggtcacagttagctctggatccggcggaggcggaagtggaggcggaggatctggcggcggaggctctttcgaagaagtgcaactggtggaatctggcggcggactggtgcagcctggcggatctctgagactgagctgtgccgccagcggcttcaacatcaaggacacctacatccactgggtgcgccaggcccctggaaagggactggaatgggtggcccggatctaccccaccaacggctacaccagatacgccgacagcgtgaagggccggttcaccatcagcgccgacaccagcaagaataccgcctacctccagatgaacagcctgcgggccgaggataccgccgtgtactactgctcaagatggggaggcgacggcttcgctgctatggacgtgtggggccagggcacccttgtgaccgtgtcatctacgcgtgaggacctgaagaacgtgttcccacctgaggtggccgtgttcgagcctagcgaggccgagatcagccacacccagaaagccaccctcgtgtgcctggctaccggcttctaccccgaccatgtggaactgtcttggtgggtcaacggcaaagaggtgcacagcggcgtgtgtaccgacccccagccactgaaagaacagcccgccctgaacgacagccggtactgcctgagcagcagactgagagtgtccgccaccttctggcagaacccccggaaccacttcagatgccaggtgcagttctacggcctgagcgagaacgacgagtggacccaggacagagccaagcccgtgacccagatcgtgtctgccgaagcctggggcagagccgattgcggctttaccagcgagagctaccagcagggcgtgctgagcgccaccatcctgtacgagatcctgctgggcaaggccaccctgtacgccgtgctggtgtctgccctggtgctgatggctatggtcaagcggaaggacagccgggga

SEQ ID NO: 21702 - DNA, 2760 bp, Artificial Sequence
  Synthetic Polynucleotide
atggccttaccagtgaccgccttgctcctgccgctggccttgctgctccacgccgccaggccggaagtgcagctggttgaatctggcggaggactggttcagcctggcggatctctgagactgtcttgtgccgccagcggcttcagcttcagcgacttttggatgagctgggtccgacaggcccctggcaaaggacttgaatgggtcgccacaatcagccaggccggcagcgagaaggactacgtggactctgtgaagggcagattcaccatcagccgggacaacgccaagaagtccctgtacctccagatgaacagcctgagagccgaggacaccgccgtgtactattgtgcctctggcgtgtacagcttcgactacagaggccagggcaccctggtcacagtctcttctggtaccggcggaggcggatctggcggcggaggtagcggtggcggaggatctgaattcgacatccagatgacacagagccctagcagcctgtctgccagcgtgggagacagagtgaccatcacctgtagagccagccaggacgtgaacacagccgtggcttggtatcagcagaagcctggcaaggcccctaagctgctgatctacagcgccagctttctggaaagcggcgtgcccagcagattcagcggaagcagaagcggcaccgacttcaccctgacaatatccagcctccagcctgaggacttcgccacctactactgccagcaggcttacaccacacctccaacattcggccagggcaccaaggtggaaatcaagagaacactcgagggacagcctaaggccaatcctaccgtgacactgttccctccaagcagcgaagaactccaggccaacaaggccacacttgtgtgcctgatctccgacttctaccctggggctgtgacagtggcttggaaggccgatggatctcctgtgaaagccggcgtggaaaccaccaagccatccaagcagagcaacaacaaatacgccgccagctcctacctgagcctgacacctgagcagtggaagtcccacagatcctacagctgccaagtgacccacgaaggcagcaccgtggaaaagacagtggcccctacagagtgcagccccatcaagaccgatgtgattacaatggaccccaaggacaactgctccaaggacgccaacgataccctgctgctccagctgaccaacaccagcgcctactacatgtacttgttgctgctgctgaagtccgtggtgtacttcgccatcatcacatgctgcctgctgcggagaaccgccttctgctgcaacggcgagaagtctagggccaagcgatctggatctggagcaacaaacttctcactactcaaacaagcaggtgacgtggaggagaatcccgggcctactagtatggactggatttggcgcatccttttccttgtcggcgctgctaccggcgcgcattccgggccccagctccagctgcaagagtctggacctggcctggtcaagcctagcgagacactgagcctgacctgtaccgtgtccggcgatagcatcagcagcggcgattactactggggctggatcagacagcctcctggcaaaggactggaatggatcggccacatctactacagcggcgtgacctactacaaccccagcctgaagtccagagtgaccatcagcgtggacaccagccggaaccagttctccctgaagctgtctagcgtgacagccgccgataccgccgtgtactactgcaccagagaggacagcagcaactggcggagtagaggccagggaacactggtcacagttagctctggatccggcggaggcggaagtggaggcggaggatctggcggcggaggctctttcgaagaagtgcaactggtggaatctggcggcggactggtgcagcctggcggatctctgagactgagctgtgccgccagcggcttcaacatcaaggacacctacatccactgggtgcgccaggcccctggaaagggactggaatgggtggcccggatctaccccaccaacggctacaccagatacgccgacagcgtgaagggccggttcaccatcagcgccgacaccagcaagaataccgcctacctccagatgaacagcctgcgggccgaggataccgccgtgtactactgctcaagatggggaggcgacggcttcgctgctatggacgtgtggggccagggcacccttgtgaccgtgtcatctacgcgtgcctctacaaagggaccctccgtgtttcctctggctcccagcagcaagtctacaagcggaggaacagccgctctgggctgcctggtcaaggattactttcccgagcctgtgaccgtgtcctggaatagcggagcactgacaagcggcgtgcacacctttccagccgtgctgcaaagcagcggcctgtactctctgagcagcgtggtcacagtgcctagctctagcctgggcacccagacctacatctgcaatgtgaaccacaagcctagcaacaccaaggtggacaagagagtggaacccaagagctgtgaagtgaaaaccgactccaccgaccacgtgaagcccaaagagacagagaacaccaagcagcccagcaagagctgccacaagcccaaggccatcgtgcacaccgagaaagtgaacatgatgagcctgaccgtgctgggcctgcggatgctgttcgccaaaaccgtggccgtgaacttcctgctgaccgccaagctgttcttcctc

SEQ ID NO: 21703 - DNA, 2703 bp, Artificial Sequence
  Synthetic Polynucleotide
atggccttaccagtgaccgccttgctcctgccgctggccttgctgctccacgccgccaggccggaagtgcagctggttgaatctggcggaggactggttcagcctggcggatctctgagactgtcttgtgccgccagcggcttcagcttcagcgacttttggatgagctgggtccgacaggcccctggcaaaggacttgaatgggtcgccacaatcagccaggccggcagcgagaaggactacgtggactctgtgaagggcagattcaccatcagccgggacaacgccaagaagtccctgtacctccagatgaacagcctgagagccgaggacaccgccgtgtactattgtgcctctggcgtgtacagcttcgactacagaggccagggcaccctggtcacagtctcttctggtaccggcggaggcggatctggcggcggaggtagcggtggcggaggatctgaattcgacatccagatgacacagagccctagcagcctgtctgccagcgtgggagacagagtgaccatcacctgtagagccagccaggacgtgaacacagccgtggcttggtatcagcagaagcctggcaaggcccctaagctgctgatctacagcgccagctttctggaaagcggcgtgcccagcagattcagcggaagcagaagcggcaccgacttcaccctgacaatatccagcctccagcctgaggacttcgccacctactactgccagcaggcttacaccacacctccaacattcggccagggcaccaaggtggaaatcaagagaacactcgagggacagcctaaggccaatcctaccgtgacactgttccctccaagcagcgaagaactccaggccaacaaggccacacttgtgtgcctgatctccgacttctaccctggggctgtgacagtggcttggaaggccgatggatctcctgtgaaagccggcgtggaaaccaccaagccatccaagcagagcaacaacaaatacgccgccagctcctacctgagcctgacacctgagcagtggaagtcccacagatcctacagctgccaagtgacccacgaaggcagcaccgtggaaaagacagtggcccctacagagtgcagcggcagagccgattgcggctttaccagcgagagctaccagcagggcgtgctgagcgccaccatcctgtacgagatcctgctgggcaaggccaccctgtacgccgtgctggtgtctgccctggtgctgatggctatggtcaagcggaaggacagccggggacgcgccaagagaagcggatctggcgtgaagcagaccctgaatttcgacctgctgaagctggctggcgacgtggaatccaacccaggccctactagtatggactggatttggcgcatccttttccttgtcggcgctgctaccggcgcgcattccgggccccagctccagctgcaagagtctggacctggcctggtcaagcctagcgagacactgagcctgacctgtaccgtgtccggcgatagcatcagcagcggcgattactactggggctggatcagacagcctcctggcaaaggactggaatggatcggccacatctactacagcggcgtgacctactacaaccccagcctgaagtccagagtgaccatcagcgtggacaccagccggaaccagttctccctgaagctgtctagcgtgacagccgccgataccgccgtgtactactgcaccagagaggacagcagcaactggcggagtagaggccagggaacactggtcacagttagctctggatccggcggaggcggaagtggaggcggaggatctggcggcggaggctctttcgaagaagtgcaactggtggaatctggcggcggactggtgcagcctggcggatctctgagactgagctgtgccgccagcggcttcaacatcaaggacacctacatccactgggtgcgccaggcccctggaaagggactggaatgggtggcccggatctaccccaccaacggctacaccagatacgccgacagcgtgaagggccggttcaccatcagcgccgacaccagcaagaataccgcctacctccagatgaacagcctgcgggccgaggataccgccgtgtactactgctcaagatggggaggcgacggcttcgctgctatggacgtgtggggccagggcacccttgtgaccgtgtcatctacgcgtgcctctacaaagggaccctccgtgtttcctctggctcccagcagcaagtctacaagcggaggaacagccgctctgggctgcctggtcaaggattactttcccgagcctgtgaccgtgtcctggaatagcggagcactgacaagcggcgtgcacacctttccagccgtgctgcaaagcagcggcctgtactctctgagcagcgtggtcacagtgcctagctctagcctgggcacccagacctacatctgcaatgtgaaccacaagcctagcaacaccaaggtggacaagagagtggaacccaagagctgtatccccgaggacacattcttcccaagccccgagagcagctgcgacgtgaagctggtggaaaagagcttcgagacagacaccaacctgaacttccagaacctgagcgtgatcggcttcagaatcctgctgctgaaagtggccggctttaacctgctgatgaccctgcggctgtggtccagc

SEQ ID NO: 21704 - DNA, 1500 bp, Artificial Sequence; identical to SEQ ID NO: 10518
  Synthetic Polynucleotide

SEQ ID NO: 21705 - DNA, 2559 bp, Artificial Sequence; identical to SEQ ID NO: 10520
  Synthetic Polynucleotide

SEQ ID NO: 21706 - DNA, 2556 bp, Artificial Sequence; identical to SEQ ID NO: 10521
  Synthetic Polynucleotide

SEQ ID NO: 21707 - DNA, 1854 bp, Artificial Sequence; identical to SEQ ID NO: 10522
  Synthetic Polynucleotide

SEQ ID NO: 21708 - DNA, 1866 bp, Artificial Sequence; identical to SEQ ID NO: 10524
  Synthetic Polynucleotide

SEQ ID NO: 21709 - DNA, 2691 bp, Artificial Sequence; identical to SEQ ID NO: 10526
  Synthetic Polynucleotide

SEQ ID NO: 21710 - DNA, 2667 bp, Artificial Sequence; identical to SEQ ID NO: 10531
  Synthetic Polynucleotide

SEQ ID NO: 21711 - DNA, 1878 bp, Artificial Sequence; identical to SEQ ID NO: 10532
  Synthetic Polynucleotide

SEQ ID NO: 21712 - DNA, 2712 bp, Artificial Sequence; identical to SEQ ID NO: 10533
  Synthetic Polynucleotide

SEQ ID NO: 21713 - DNA, 3087 bp, Artificial Sequence; identical to SEQ ID NO: 10534
  Synthetic Polynucleotide

SEQ ID NO: 21714 - DNA, 1932 bp, Artificial Sequence; identical to SEQ ID NO: 10542
  Synthetic Polynucleotide

SEQ ID NO: 21715 - DNA, 1866 bp, Artificial Sequence; identical to SEQ ID NO: 10544
  Synthetic Polynucleotide

SEQ ID NO: 21716 - DNA, 1344 bp, Artificial Sequence; identical to SEQ ID NO: 10545
  Synthetic Polynucleotide

SEQ ID NO: 21717 - DNA, 1239 bp, Artificial Sequence; identical to SEQ ID NO: 10546
  Synthetic Polynucleotide

SEQ ID NO: 21718 - DNA, 1269 bp, Artificial Sequence; identical to SEQ ID NO: 10547
  Synthetic Polynucleotide

SEQ ID NO: 21719 - DNA, 2259 bp, Artificial Sequence; identical to SEQ ID NO: 10570
  Synthetic Polynucleotide

SEQ ID NO: 21720 - DNA, 2337 bp, Artificial Sequence; identical to SEQ ID NO: 10573
  Synthetic Polynucleotide

SEQ ID NO: 21721 - DNA, 2280 bp, Artificial Sequence; identical to SEQ ID NO: 10574
  Synthetic Polynucleotide

SEQ ID NO: 21722 - DNA, 2682 bp, Artificial Sequence; identical to SEQ ID NO: 10575
  Synthetic Polynucleotide

SEQ ID NO: 21723 - DNA, 2748 bp, Artificial Sequence; identical to SEQ ID NO: 10577
  Synthetic Polynucleotide

SEQ ID NO: 21724 - DNA, 2691 bp, Artificial Sequence; identical to SEQ ID NO: 10578
  Synthetic Polynucleotide

SEQ ID NO: 21725 - DNA, 1500 bp, Artificial Sequence
  Synthetic Polynucleotide
atggccttaccagtgaccgccttgctcctgccgctggccttgctgctccacgccgccaggccggaagtgcagctggttgaatcaggtggcggcctggttcaacctggcggatctctgagactgagctgtgccgccagcggctacaccttcagcgactactttatgagctgggtccgacaggcccctggcaaaggacttgaatgggtcgccaccatcagcaatggcggcacctacacttactaccccgacagcgtgaagggcagattcaccatctccagagacaacagcaagaacaccctgtacctccagatgaactccctgagagccgaggacaccgccgtgtactactgcgccagattcgacggctacatcttcgactattggggccagggcaccctggtcacagtctcttctggcggaggcggaagtggaggcggaggatctggcggcggaggctctgacatccagatgacacagagccctagcagcctgtctgccagcgtgggagacagagtgaccatcacctgtagagccagccaggacatcagcagctacctgaactggtatcagcagaagcccggcaaggcccctaagctgctgatctactacaccagcagactgcacagcggcgtgcccagcagattttctggctctggcagcggcaccgacttcaccctgacaatatctagcctccagcctgaggacttcgccacctactattgccagcagggcaacaccctgccttacacatttggacagggcaccaaggtggaaatcaagagaacgcgtgagcagaaactgatctcggaagaggatctggcgaagcccaccacgacgccagcgccgcgaccaccaacaccggcgcccaccatcgcgtcgcagcccctgtccctgcgcccagaggcgtgccggccagcggcggggggcgcagtgcacacgagggggctggacttcgcctgtgacatctacatctgggcgcccttggccgggacttgtggggtccttctcctgtcactggttatcaccctttactgcaaacggggcagaaagaaactcctgtatatattcaaacaaccatttatgagaccagtacaaactactcaagaggaagatggctgtagctgccgatttccagaagaagaagaaggaggatgtgaactgagagtgaagttcagcaggagcgcagacgcccccgcgtaccagcagggccagaaccagctctataacgagctgaatctaggacgaagagaggagtacgatgttttggacaagagacgtggccgggaccctgagatggggggaaagccgagaaggaagaaccctcaggaaggcctgtacaatgaactgcagaaagataagatggcggaggcctacagtgagattgggatgaaaggcgagcgccggaggggcaaggggcacgatggcctttaccagggtctcagtacagccaccaaggacacctacgacgcccttcacatgcaggccctgccccctcgctga

SEQ ID NO: 21726 - DNA, 2559 bp, Artificial Sequence
  Synthetic Polynucleotide
atggccttaccagtgaccgccttgctcctgccgctggccttgctgctccacgccgccaggccggacatccagatgacacagagccctagcagcctgtctgccagcgtgggagacagagtgaccatcacctgtagagccagccaggacatcagcagctacctgaactggtatcagcagaagcccggcaaggcccctaagctgctgatctactacaccagcagactgcacagcggcgtgcccagcagattttctggctctggcagcggcaccgacttcaccctgacaatatctagcctccagcctgaggacttcgccacctactattgccagcagggcaacaccctgccttacacatttggacagggcaccaaggtggaaatcaagagactcgagatccagaaccctgatcctgccgtgtaccagctgcgggatagcaagagcagcgacaagagcgtgtgtctgttcaccgacttcgacagccagaccaacgtgtcccagagcaaggactccgacgtgtacatcaccgataagtgcgtgctggacatgcggagcatggacttcaagagcaactccgccgtggcctggtccaacaagtccgatttcgcctgcgccaacgccttcaacaacagcattatccccgaggacacattcttcccaagcagcgacgtgccctgcgacgtgaagctggtggaaaagagcttcgagacagacaccaacctgaacttccagaacctgagcgtgatcggcttcagaatcctgctgctgaaagtggccggctttaacctgctgatgaccctgcggctgtggtccagccgcgccaagagaagcggatctggcgtgaagcagaccctgaatttcgacctgctgaagctggctggcgacgtggaatccaacccaggccctactagtatggactggatttggcgcatccttttccttgtcggcgctgctaccggcgcgcattccttcgaagaagtgcagctggttgaatcaggtggcggcctggttcaacctggcggatctctgagactgagctgtgccgccagcggctacaccttcagcgactactttatgagctgggtccgacaggcccctggcaaaggacttgaatgggtcgccaccatcagcaatggcggcacctacacttactaccccgacagcgtgaagggcagattcaccatctccagagacaacagcaagaacaccctgtacctccagatgaactccctgagagccgaggacaccgccgtgtactactgcgccagattcgacggctacatcttcgactattggggccagggcaccctggtcacagtctcttctacgcgtgaggacctgaagaacgtgttcccacctgaggtggccgtgttcgagcctagcaaggccgagatcgcccacacccagaaagccaccctcgtgtgcctggctaccggcttctaccccgaccatgtggaactgtcttggtgggtcaacggcaaagaggtgcacagcggcgtgtgtaccgacccccagccactgaaagaacagcccgccctgaacgacagccggtactgcctgagcagcagactgagagtgtccgccaccttctggcagaacccccggaaccacttcagatgccaggtgcagttctacggcctgagcgagaacgacgagtggacccaggacagagccaagcccgtgacccagatcgtgtctgccgaagcctggggcagagccgattgcggcatcaccagcgccagctaccaccagggcgtgctgagcgccaccatcctgtacgagatcctgctgggcaaggccaccctgtacgccgtgctggtgtctgccctggtgctgatggctatggtcaagcggaaggacagccggggaagggccaagcgatctggatctggagcaacaaacttctcactactcaaacaagcaggtgacgtggaggagaatcccgggccttctagaggccatatgaccgagtacaagcccacggtgcgcctcgccacccgcgacgacgtccccagggccgtacgcaccctcgccgccgcgttcgccgactaccccgccacgcgccacaccgtcgatccggaccgccacatcgagcgggtcaccgagctgcaagaactcttcctcacgcgcgtcgggctcgacatcggcaaggtgtgggtcgcggacgacggcgccgcggtggcggtctggaccacgccggagagcgtcgaagcgggggcggtgttcgccgagatcggcccgcgcatggccgagttgagcggttcccggctggccgcgcagcaacagatggaaggcctcctggcgccgcaccggcccaaggagcccgcgtggttcctggccaccgtcggcgtctcgcccgaccaccagggcaagggtctgggcagcgccgtcgtgctccccggagtggaggcggccgagcgcgccggggtgcccgccttcctggagacctccgcgccccgcaacctccccttctacgagcggctcggcttcaccgtcaccgccgacgtcgaggtgcccgaaggaccgcgcacctggtgcatgacccgcaagcccggtgcctga

SEQ ID NO: 21727 - DNA, 2556 bp, Artificial Sequence
  Synthetic Polynucleotide
atggccttaccagtgaccgccttgctcctgccgctggccttgctgctccacgccgccaggccggacatccagatgacacagagccctagcagcctgtctgccagcgtgggagacagagtgaccatcacctgtagagccagccaggacatcagcagctacctgaactggtatcagcagaagcccggcaaggcccctaagctgctgatctactacaccagcagactgcacagcggcgtgcccagcagattttctggctctggcagcggcaccgacttcaccctgacaatatctagcctccagcctgaggacttcgccacctactattgccagcagggcaacaccctgccttacacatttggacagggcaccaaggtggaaatcaagagactcgaggacctgaagaacgtgttcccacctgaggtggccgtgttcgagcctagcaaggccgagatcgcccacacccagaaagccaccctcgtgtgcctggctaccggcttctaccccgaccatgtggaactgtcttggtgggtcaacggcaaagaggtgcacagcggcgtgtgtaccgacccccagccactgaaagaacagcccgccctgaacgacagccggtactgcctgagcagcagactgagagtgtccgccaccttctggcagaacccccggaaccacttcagatgccaggtgcagttctacggcctgagcgagaacgacgagtggacccaggacagagccaagcccgtgacccagatcgtgtctgccgaagcctggggcagagccgattgcggcatcaccagcgccagctaccaccagggcgtgctgagcgccaccatcctgtacgagatcctgctgggcaaggccaccctgtacgccgtgctggtgtctgccctggtgctgatggctatggtcaagcggaaggacagccggggaagggccaagcgatctggatctggagcaacaaacttctcactactcaaacaagcaggtgacgtggaggagaatcccgggcctactagtatggactggatttggcgcatccttttccttgtcggcgctgctaccggcgcgcattccttcgaagaagtgcagctggttgaatcaggtggcggcctggttcaacctggcggatctctgagactgagctgtgccgccagcggctacaccttcagcgactactttatgagctgggtccgacaggcccctggcaaaggacttgaatgggtcgccaccatcagcaatggcggcacctacacttactaccccgacagcgtgaagggcagattcaccatctccagagacaacagcaagaacaccctgtacctccagatgaactccctgagagccgaggacaccgccgtgtactactgcgccagattcgacggctacatcttcgactattggggccagggcaccctggtcacagtctcttctacgcgtatccagaaccctgatcctgccgtgtaccagctgcgggatagcaagagcagcgacaagagcgtgtgtctgttcaccgacttcgacagccagaccaacgtgtcccagagcaaggactccgacgtgtacatcaccgataagtgcgtgctggacatgcggagcatggacttcaagagcaactccgccgtggcctggtccaacaagtccgatttcgcctgcgccaacgccttcaacaacagcattatccccgaggacacattcttcccaagcagcgacgtgccctgcgacgtgaagctggtggaaaagagcttcgagacagacaccaacctgaacttccagaacctgagcgtgatcggcttcagaatcctgctgctgaaagtggccggctttaacctgctgatgaccctgcggctgtggtccagccgcgccaagagaagcggatctggcgtgaagcagaccctgaatttcgacctgctgaagctggctggcgacgtggaatccaacccaggcccttctagaggccatatgaccgagtacaagcccacggtgcgcctcgccacccgcgacgacgtccccagggccgtacgcaccctcgccgccgcgttcgccgactaccccgccacgcgccacaccgtcgatccggaccgccacatcgagcgggtcaccgagctgcaagaactcttcctcacgcgcgtcgggctcgacatcggcaaggtgtgggtcgcggacgacggcgccgcggtggcggtctggaccacgccggagagcgtcgaagcgggggcggtgttcgccgagatcggcccgcgcatggccgagttgagcggttcccggctggccgcgcagcaacagatggaaggcctcctggcgccgcaccggcccaaggagcccgcgtggttcctggccaccgtcggcgtctcgcccgaccaccagggcaagggtctgggcagcgccgtcgtgctccccggagtggaggcggccgagcgcgccggggtgcccgccttcctggagacctccgcgccccgcaacctccccttctacgagcggctcggcttcaccgtcaccgccgacgtcgaggtgcccgaaggaccgcgcacctggtgcatgacccgcaagcccggtgcctga

SEQ ID NO: 21728 - DNA, 1854 bp, Artificial Sequence
  Synthetic Polynucleotide
atggccttaccagtgaccgccttgctcctgccgctggccttgctgctccacgccgccaggccggacatccagatgacacagagccctagcagcctgtctgccagcgtgggagacagagtgaccatcacctgtagagccagccaggacatcagcagctacctgaactggtatcagcagaagcccggcaaggcccctaagctgctgatctactacaccagcagactgcacagcggcgtgcccagcagattttctggctctggcagcggcaccgacttcaccctgacaatatctagcctccagcctgaggacttcgccacctactattgccagcagggcaacaccctgccttacacatttggacagggcaccaaggtggaaatcaagagactcgaggacctgaagaacgtgttcccacctgaggtggccgtgttcgagcctagcgaggccgagatcagccacacccagaaagccaccctcgtgtgcctggctaccggcttctaccccgaccatgtggaactgtcttggtgggtcaacggcaaagaggtgcacagcggcgtgtgtaccgacccccagccactgaaagaacagcccgccctgaacgacagccggtactgcctgagcagcagactgagagtgtccgccaccttctggcagaacccccggaaccacttcagatgccaggtgcagttctacggcctgagcgagaacgacgagtggacccaggacagagccaagcccgtgacccagatcgtgtctgccgaagcctggggcagagccgattgcggctttaccagcgagagctaccagcagggcgtgctgagcgccaccatcctgtacgagatcctgctgggcaaggccaccctgtacgccgtgctggtgtctgccctggtgctgatggctatggtcaagcggaaggacagccggggaagggccaagcgatctggatctggagcaacaaacttctcactactcaaacaagcaggtgacgtggaggagaatcccgggcctactagtatggactggatttggcgcatccttttccttgtcggcgctgctaccggcgcgcattccttcgaagaagtgcagctggttgaatcaggtggcggcctggttcaacctggcggatctctgagactgagctgtgccgccagcggctacaccttcagcgactactttatgagctgggtccgacaggcccctggcaaaggacttgaatgggtcgccaccatcagcaatggcggcacctacacttactaccccgacagcgtgaagggcagattcaccatctccagagacaacagcaagaacaccctgtacctccagatgaactccctgagagccgaggacaccgccgtgtactactgcgccagattcgacggctacatcttcgactattggggccagggcaccctggtcacagtctcttctacgcgtatccagaaccctgatcctgccgtgtaccagctgcgggatagcaagagcagcgacaagagcgtgtgtctgttcaccgacttcgacagccagaccaacgtgtcccagagcaaggactccgacgtgtacatcaccgataagtgcgtgctggacatgcggagcatggacttcaagagcaactccgccgtggcctggtccaacaagtccgatttcgcctgcgccaacgccttcaacaacagcattatccccgaggacacattcttcccaagccccgagagcagctgcgacgtgaagctggtggaaaagagcttcgagacagacaccaacctgaacttccagaacctgagcgtgatcggcttcagaatcctgctgctgaaagtggccggctttaacctgctgatgaccctgcggctgtggtccagc

SEQ ID NO: 21729 - DNA, 1866 bp, Artificial Sequence
  Synthetic Polynucleotide
atggccttaccagtgaccgccttgctcctgccgctggccttgctgctccacgccgccaggccggacatccagatgacacagagccctagcagcctgtctgccagcgtgggagacagagtgaccatcacctgtagagccagccaggacatcagcagctacctgaactggtatcagcagaagcccggcaaggcccctaagctgctgatctactacaccagcagactgcacagcggcgtgcccagcagattttctggctctggcagcggcaccgacttcaccctgacaatatctagcctccagcctgaggacttcgccacctactattgccagcagggcaacaccctgccttacacatttggacagggcaccaaggtggaaatcaagagactcgagatccagaaccctgatcctgccgtgtaccagctgcgggatagcaagagcagcgacaagagcgtgtgtctgttcaccgacttcgacagccagaccaacgtgtcccagagcaaggactccgacgtgtacatcaccgataagtgcgtgctggacatgcggagcatggacttcaagagcaactccgccgtggcctggtccaacaagtccgatttcgcctgcgccaacgccttcaacaacagcattatccccgaggacacattcttcccaagccccgagagcagctgcgacgtgaagctggtggaaaagagcttcgagacagacaccaacctgaacttccagaacctgagcgtgatcggcttcagaatcctgctgctgaaagtggccggctttaacctgctgatgaccctgcggctgtggtccagccgcgccaagagaagcggatctggcgtgaagcagaccctgaatttcgacctgctgaagctggctggcgacgtggaatccaacccaggccctactagtatggactggatttggcgcatccttttccttgtcggcgctgctaccggcgcgcattccttcgaagaagtgcagctggttgaatcaggtggcggcctggttcaacctggcggatctctgagactgagctgtgccgccagcggctacaccttcagcgactactttatgagctgggtccgacaggcccctggcaaaggacttgaatgggtcgccaccatcagcaatggcggcacctacacttactaccccgacagcgtgaagggcagattcaccatctccagagacaacagcaagaacaccctgtacctccagatgaactccctgagagccgaggacaccgccgtgtactactgcgccagattcgacggctacatcttcgactattggggccagggcaccctggtcacagtctcttctacgcgtgaggacctgaagaacgtgttcccacctgaggtggccgtgttcgagcctagcgaggccgagatcagccacacccagaaagccaccctcgtgtgcctggctaccggcttctaccccgaccatgtggaactgtcttggtgggtcaacggcaaagaggtgcacagcggcgtgtgtaccgacccccagccactgaaagaacagcccgccctgaacgacagccggtactgcctgagcagcagactgagagtgtccgccaccttctggcagaacccccggaaccacttcagatgccaggtgcagttctacggcctgagcgagaacgacgagtggacccaggacagagccaagcccgtgacccagatcgtgtctgccgaagcctggggcagagccgattgcggctttaccagcgagagctaccagcagggcgtgctgagcgccaccatcctgtacgagatcctgctgggcaaggccaccctgtacgccgtgctggtgtctgccctggtgctgatggctatggtcaagcggaaggacagccgggga

SEQ ID NO: 21730 - DNA, 2691 bp, Artificial Sequence
  Synthetic Polynucleotide
atggccttaccagtgaccgccttgctcctgccgctggccttgctgctccacgccgccaggccgctcgaggggaaaccaattcccaaccctcttctgggactggattcaaccggcagcggcgaggacctgaagaacgtgttcccacctgaggtggccgtgttcgagcctagcaaggccgagatcgcccacacccagaaagccaccctcgtgtgcctggctaccggcttctaccccgaccatgtggaactgtcttggtgggtcaacggcaaagaggtgcacagcggcgtgtgtaccgacccccagccactgaaagaacagcccgccctgaacgacagccggtactgcctgagcagcagactgagagtgtccgccaccttctggcagaacccccggaaccacttcagatgccaggtgcagttctacggcctgagcgagaacgacgagtggacccaggacagagccaagcccgtgacccagatcgtgtctgccgaagcctggggcagagccgattgcggcatcaccagcgccagctaccaccagggcgtgctgagcgccaccatcctgtacgagatcctgctgggcaaggccaccctgtacgccgtgctggtgtctgccctggtgctgatggctatggtcaagcggaaggacagccggggaagggccaagcgatctggatctggagcaacaaacttctcactactcaaacaagcaggtgacgtggaggagaatcccgggcctactagcatggccttaccagtgaccgccttgctcctgccgctggccttgctgctccacgccgccaggccggacatccagatgacacagagccctagcagcctgtctgccagcgtgggagacagagtgaccatcacctgtagagccagccaggacatcagcagctacctgaactggtatcagcagaagcccggcaaggcccctaagctgctgatctactacaccagcagactgcacagcggcgtgcccagcagattttctggctctggcagcggcaccgacttcaccctgacaatatctagcctccagcctgaggacttcgccacctactattgccagcagggcaacaccctgccttacacatttggacagggcaccaaggtggaaatcaagagaggcggaggcggaagtggaggcggaggatctggcggcggaggctctgaagtgcagctggttgaatcaggtggcggcctggttcaacctggcggatctctgagactgagctgtgccgccagcggctacaccttcagcgactactttatgagctgggtccgacaggcccctggcaaaggacttgaatgggtcgccaccatcagcaatggcggcacctacacttactaccccgacagcgtgaagggcagattcaccatctccagagacaacagcaagaacaccctgtacctccagatgaactccctgagagccgaggacaccgccgtgtactactgcgccagattcgacggctacatcttcgactattggggccagggcaccctggtcacagtctcttctacgcgtgagcagaaactgatctcggaagaggatgggagcggcatccagaaccctgatcctgccgtgtaccagctgcgggatagcaagagcagcgacaagagcgtgtgtctgttcaccgacttcgacagccagaccaacgtgtcccagagcaaggactccgacgtgtacatcaccgataagtgcgtgctggacatgcggagcatggacttcaagagcaactccgccgtggcctggtccaacaagtccgatttcgcctgcgccaacgccttcaacaacagcattatccccgaggacacattcttcccaagcagcgacgtgccctgcgacgtgaagctggtggaaaagagcttcgagacagacaccaacctgaacttccagaacctgagcgtgatcggcttcagaatcctgctgctgaaagtggccggctttaacctgctgatgaccctgcggctgtggtccagccgcgccaagagaagcggatctggcgtgaagcagaccctgaatttcgacctgctgaagctggctggcgacgtggaatccaacccaggcccttctagaggccatatgaccgagtacaagcccacggtgcgcctcgccacccgcgacgacgtccccagggccgtacgcaccctcgccgccgcgttcgccgactaccccgccacgcgccacaccgtcgatccggaccgccacatcgagcgggtcaccgagctgcaagaactcttcctcacgcgcgtcgggctcgacatcggcaaggtgtgggtcgcggacgacggcgccgcggtggcggtctggaccacgccggagagcgtcgaagcgggggcggtgttcgccgagatcggcccgcgcatggccgagttgagcggttcccggctggccgcgcagcaacagatggaaggcctcctggcgccgcaccggcccaaggagcccgcgtggttcctggccaccgtcggcgtctcgcccgaccaccagggcaagggtctgggcagcgccgtcgtgctccccggagtggaggcggccgagcgcgccggggtgcccgccttcctggagacctccgcgccccgcaacctccccttctacgagcggctcggcttcaccgtcaccgccgacgtcgaggtgcccgaaggaccgcgcacctggtgcatgacccgcaagcccggtgcctga

SEQ ID NO: 21731 - DNA, 2667 bp, Artificial Sequence
  Synthetic Polynucleotide
atggccttaccagtgaccgccttgctcctgccgctggccttgctgctccacgccgccaggccggacatccagatgacacagagccctagcagcctgtctgccagcgtgggagacagagtgaccatcacctgtagagccagccaggacatcagcagctacctgaactggtatcagcagaagcccggcaaggcccctaagctgctgatctactacaccagcagactgcacagcggcgtgcccagcagattttctggctctggcagcggcaccgacttcaccctgacaatatctagcctccagcctgaggacttcgccacctactattgccagcagggcaacaccctgccttacacatttggacagggcaccaaggtggaaatcaagagactcgaggggaaaccaattcccaaccctcttctgggactggattcaaccggcagcggcgacaagcagctggacgccgacgtgtcccccaagcctaccatcttcctgccctctatcgccgagacaaagctccagaaggccggcacctacctgtgcctgctggaaaagttcttcccagatgtgattaagatccactggcaggaaaagaagtccaacaccatcctgggcagccaggaaggcaacaccatgaagaccaacgacacctacatgaagttcagctggctgaccgtgcccgagaagtccctggacaaagaacacagatgcatcgtgcggcacgaaaacaacaagaacggcgtggaccaggaaatcatcttcccacccatcaagaccgatgtgattacaatggaccccaaggacaactgctccaaggacgccaacgataccctgctgctccagctgaccaacaccagcgcctactacatgtacttgttgctgctgctgaagtccgtggtgtacttcgccatcatcacatgctgcctgctgcggagaaccgccttctgctgcaacggcgagaagtctagggccaagcgatctggatctggagcaacaaacttctcactactcaaacaagcaggtgacgtggaggagaatcccgggcctactagtatggactggatttggcgcatccttttccttgtcggcgctgctaccggcgcgcattccttcgaagaagtgcagctggttgaatcaggtggcggcctggttcaacctggcggatctctgagactgagctgtgccgccagcggctacaccttcagcgactactttatgagctgggtccgacaggcccctggcaaaggacttgaatgggtcgccaccatcagcaatggcggcacctacacttactaccccgacagcgtgaagggcagattcaccatctccagagacaacagcaagaacaccctgtacctccagatgaactccctgagagccgaggacaccgccgtgtactactgcgccagattcgacggctacatcttcgactattggggccagggcaccctggtcacagtctcttctacgcgtgagcagaaactgatctcggaagaggatgggagcggcagccagcctcacaccaagcccagcgtgttcgtgatgaagaacggcaccaacgtggcctgcctcgtgaaagagttctaccccaaggacatcaggatcaacctggtgtccagcaagaagatcaccgagttcgaccccgccatcgtgatctcccccagcggcaagtacaacgccgtgaagctggggaagtacgaggacagcaacagcgtgacctgctccgtgcagcacgacaacaagaccgtgcacagcaccgactttgaagtgaaaaccgactccaccgaccacgtgaagcccaaagagacagagaacaccaagcagcccagcaagagctgccacaagcccaaggccatcgtgcacaccgagaaagtgaacatgatgagcctgaccgtgctgggcctgcggatgctgttcgccaaaaccgtggccgtgaacttcctgctgaccgccaagctgttcttcctccgcgccaagagaagcggatctggcgtgaagcagaccctgaatttcgacctgctgaagctggctggcgacgtggaatccaacccaggcccttctagaggccatatgaccgagtacaagcccacggtgcgcctcgccacccgcgacgacgtccccagggccgtacgcaccctcgccgccgcgttcgccgactaccccgccacgcgccacaccgtcgatccggaccgccacatcgagcgggtcaccgagctgcaagaactcttcctcacgcgcgtcgggctcgacatcggcaaggtgtgggtcgcggacgacggcgccgcggtggcggtctggaccacgccggagagcgtcgaagcgggggcggtgttcgccgagatcggcccgcgcatggccgagttgagcggttcccggctggccgcgcagcaacagatggaaggcctcctggcgccgcaccggcccaaggagcccgcgtggttcctggccaccgtcggcgtctcgcccgaccaccagggcaagggtctgggcagcgccgtcgtgctccccggagtggaggcggccgagcgcgccggggtgcccgccttcctggagacctccgcgccccgcaacctccccttctacgagcggctcggcttcaccgtcaccgccgacgtcgaggtgcccgaaggaccgcgcacctggtgcatgacccgcaagcccggtgcctga

SEQ ID NO: 21732 - DNA, 1878 bp, Artificial Sequence
  Synthetic Polynucleotide
atggccttaccagtgaccgccttgctcctgccgctggccttgctgctccacgccgccaggccggacatccagatgacacagagccctagcagcctgtctgccagcgtgggagacagagtgaccatcacctgtagagccagccaggacatcagcagctacctgaactggtatcagcagaagcccggcaaggcccctaagctgctgatctactacaccagcagactgcacagcggcgtgcccagcagattttctggctctggcagcggcaccgacttcaccctgacaatatctagcctccagcctgaggacttcgccacctactattgccagcagggcaacaccctgccttacacatttggacagggcaccaaggtggaaatcaagagactcgagagccagcctcacaccaagcccagcgtgttcgtgatgaagaacggcaccaacgtggcctgcctcgtgaaagagttctaccccaaggacatcaggatcaacctggtgtccagcaagaagatcaccgagttcgaccccgccatcgtgatctcccccagcggcaagtacaacgccgtgaagctggggaagtacgaggacagcaacagcgtgacctgctccgtgcagcacgacaacaagaccgtgcacagcaccgactttgaagtgaaaaccgactccaccgaccacgtgaagcccaaagagacagagaacaccaagcagcccagcaagagctgccacaagcccaaggccatcgtgcacaccgagaaagtgaacatgatgagcctgaccgtgctgggcctgcggatgctgttcgccaaaaccgtggccgtgaacttcctgctgaccgccaagctgttcttcctcagggccaagcgatctggatctggagcaacaaacttctcactactcaaacaagcaggtgacgtggaggagaatcccgggcctactagtatggactggatttggcgcatccttttccttgtcggcgctgctaccggcgcgcattccttcgaagaagtgcagctggttgaatcaggtggcggcctggttcaacctggcggatctctgagactgagctgtgccgccagcggctacaccttcagcgactactttatgagctgggtccgacaggcccctggcaaaggacttgaatgggtcgccaccatcagcaatggcggcacctacacttactaccccgacagcgtgaagggcagattcaccatctccagagacaacagcaagaacaccctgtacctccagatgaactccctgagagccgaggacaccgccgtgtactactgcgccagattcgacggctacatcttcgactattggggccagggcaccctggtcacagtctcttctacgcgtgacaagcagctggacgccgacgtgtcccccaagcctaccatcttcctgccctctatcgccgagacaaagctccagaaggccggcacctacctgtgcctgctggaaaagttcttcccagatgtgattaagatccactggcaggaaaagaagtccaacaccatcctgggcagccaggaaggcaacaccatgaagaccaacgacacctacatgaagttcagctggctgaccgtgcccgagaagtccctggacaaagaacacagatgcatcgtgcggcacgaaaacaacaagaacggcgtggaccaggaaatcatcttcccacccatcaagaccgatgtgattacaatggaccccaaggacaactgctccaaggacgccaacgataccctgctgctccagctgaccaacaccagcgcctactacatgtacttgttgctgctgctgaagtccgtggtgtacttcgccatcatcacatgctgcctgctgcggagaaccgccttctgctgcaacggcgagaagtct

SEQ ID NO: 21733 - DNA, 2712 bp, Artificial Sequence
  Synthetic Polynucleotide
atggccttaccagtgaccgccttgctcctgccgctggccttgctgctccacgccgccaggccgctcgaggggaaaccaattcccaaccctcttctgggactggattcaaccggcagcggcgacaagcagctggacgccgacgtgtcccccaagcctaccatcttcctgccctctatcgccgagacaaagctccagaaggccggcacctacctgtgcctgctggaaaagttcttcccagatgtgattaagatccactggcaggaaaagaagtccaacaccatcctgggcagccaggaaggcaacaccatgaagaccaacgacacctacatgaagttcagctggctgaccgtgcccgagaagtccctggacaaagaacacagatgcatcgtgcggcacgaaaacaacaagaacggcgtggaccaggaaatcatcttcccacccatcaagaccgatgtgattacaatggaccccaaggacaactgctccaaggacgccaacgataccctgctgctccagctgaccaacaccagcgcctactacatgtacttgttgctgctgctgaagtccgtggtgtacttcgccatcatcacatgctgcctgctgcggagaaccgccttctgctgcaacggcgagaagtctagggccaagcgatctggatctggagcaacaaacttctcactactcaaacaagcaggtgacgtggaggagaatcccgggcctactagcatggccttaccagtgaccgccttgctcctgccgctggccttgctgctccacgccgccaggccggacatccagatgacacagagccctagcagcctgtctgccagcgtgggagacagagtgaccatcacctgtagagccagccaggacatcagcagctacctgaactggtatcagcagaagcccggcaaggcccctaagctgctgatctactacaccagcagactgcacagcggcgtgcccagcagattttctggctctggcagcggcaccgacttcaccctgacaatatctagcctccagcctgaggacttcgccacctactattgccagcagggcaacaccctgccttacacatttggacagggcaccaaggtggaaatcaagagaggcggaggcggaagtggaggcggaggatctggcggcggaggctctgaagtgcagctggttgaatcaggtggcggcctggttcaacctggcggatctctgagactgagctgtgccgccagcggctacaccttcagcgactactttatgagctgggtccgacaggcccctggcaaaggacttgaatgggtcgccaccatcagcaatggcggcacctacacttactaccccgacagcgtgaagggcagattcaccatctccagagacaacagcaagaacaccctgtacctccagatgaactccctgagagccgaggacaccgccgtgtactactgcgccagattcgacggctacatcttcgactattggggccagggcaccctggtcacagtctcttctacgcgtgagcagaaactgatctcggaagaggatgggagcggcagccagcctcacaccaagcccagcgtgttcgtgatgaagaacggcaccaacgtggcctgcctcgtgaaagagttctaccccaaggacatcaggatcaacctggtgtccagcaagaagatcaccgagttcgaccccgccatcgtgatctcccccagcggcaagtacaacgccgtgaagctggggaagtacgaggacagcaacagcgtgacctgctccgtgcagcacgacaacaagaccgtgcacagcaccgactttgaagtgaaaaccgactccaccgaccacgtgaagcccaaagagacagagaacaccaagcagcccagcaagagctgccacaagcccaaggccatcgtgcacaccgagaaagtgaacatgatgagcctgaccgtgctgggcctgcggatgctgttcgccaaaaccgtggccgtgaacttcctgctgaccgccaagctgttcttcctccgcgccaagagaagcggatctggcgtgaagcagaccctgaatttcgacctgctgaagctggctggcgacgtggaatccaacccaggcccttctagaggccatatgaccgagtacaagcccacggtgcgcctcgccacccgcgacgacgtccccagggccgtacgcaccctcgccgccgcgttcgccgactaccccgccacgcgccacaccgtcgatccggaccgccacatcgagcgggtcaccgagctgcaagaactcttcctcacgcgcgtcgggctcgacatcggcaaggtgtgggtcgcggacgacggcgccgcggtggcggtctggaccacgccggagagcgtcgaagcgggggcggtgttcgccgagatcggcccgcgcatggccgagttgagcggttcccggctggccgcgcagcaacagatggaaggcctcctggcgccgcaccggcccaaggagcccgcgtggttcctggccaccgtcggcgtctcgcccgaccaccagggcaagggtctgggcagcgccgtcgtgctccccggagtggaggcggccgagcgcgccggggtgcccgccttcctggagacctccgcgccccgcaacctccccttctacgagcggctcggcttcaccgtcaccgccgacgtcgaggtgcccgaaggaccgcgcacctggtgcatgacccgcaagcccggtgcctga

SEQ ID NO: 21734 - DNA, 3087 bp, Artificial Sequence
  Synthetic Polynucleotide
atggccttaccagtgaccgccttgctcctgccgctggccttgctgctccacgccgccaggccggacatccagatgacacagagccctagcagcctgtctgccagcgtgggagacagagtgaccatcacctgtagagccagccaggacatcagcagctacctgaactggtatcagcagaagcccggcaaggcccctaagctgctgatctactacaccagcagactgcacagcggcgtgcccagcagattttctggctctggcagcggcaccgacttcaccctgacaatatctagcctccagcctgaggacttcgccacctactattgccagcagggcaacaccctgccttacacatttggacagggcaccaaggtggaaatcaagagaggacagcctaaggccaatcctaccgtgacactgttccctccaagcagcgaagaactccaggccaacaaggccacacttgtgtgcctgatctccgacttctaccctggggctgtgacagtggcttggaaggccgatggatctcctgtgaaagccggcgtggaaaccaccaagccatccaagcagagcaacaacaaatacgccgccagctcctacctgagcctgacacctgagcagtggaagtcccacagatcctacagctgccaagtgacccacgaaggcagcaccgtggaaaagacagtggcccctacagagtgcagcggatcccagagcttcggcctgctggaccccaagctgtgctacctgctggatggcatcctgttcatctacggcgtgatcctgaccgccctgttcctgagagtgaagttcagcagaagcgccgacgcccctgcctaccagcagggacagaaccaactgtacaacgagctgaacctgggcagacgggaagagtacgacgtgctggacaagcggagaggcagggaccctgagatgggcggaaagccccagcggagaaagaacccccaggaaggactgtataacgaactccagaaagacaagatggccgaagcctacagcgagatcggcatgaagggcgagcggagaagaggcaagggccacgatggcctgtaccagggcctgagcaccgccaccaaggacacctatgacgccctgcacatgcaggccctgcctccaagaagggccaagcgatctggatctggagcaacaaacttctcactactcaaacaagcaggtgacgtggaggagaatcccgggcctactagtatggactggatttggcgcatccttttccttgtcggcgctgctaccggcgcgcattccttcgaagaagtgcagctggttgaatcaggtggcggcctggttcaacctggcggatctctgagactgagctgtgccgccagcggctacaccttcagcgactactttatgagctgggtccgacaggcccctggcaaaggacttgaatgggtcgccaccatcagcaatggcggcacctacacttactaccccgacagcgtgaagggcagattcaccatctccagagacaacagcaagaacaccctgtacctccagatgaactccctgagagccgaggacaccgccgtgtactactgcgccagattcgacggctacatcttcgactattggggccagggcaccctggtcacagtctcttctgcctctacaaagggaccctccgtgtttcctctggctcccagcagcaagtctacaagcggaggaacagccgctctgggctgcctggtcaaggattactttcccgagcctgtgaccgtgtcctggaatagcggagcactgacaagcggcgtgcacacctttccagccgtgctgcaaagcagcggcctgtactctctgagcagcgtggtcacagtgcctagctctagcctgggcacccagacctacatctgcaatgtgaaccacaagcctagcaacaccaaggtggacaagagagtggaacccaagagctgtggtacccagagttttgggttgttggaccctaaattgtgctatctgttggacggaatcctgttcatttacggagtgatcctgaccgcattgttcctgcgggttaagttttccagatccgcagacgcacccgcttaccaacaagggcagaaccaactctacaatgaacttaatttggggcggagggaagagtacgacgttctggacaaaaggaggggacgagatcccgagatgggcggaaagcctcagcgaaggaagaatccgcaagaggggctttataacgaactccagaaagataaaatggcagaagcctatagtgagattgggatgaagggagaaaggaggaggggtaaaggtcacgatgggttgtaccaaggattgagcacagccactaaagatacctatgatgcgctccacatgcaggccctgccgccaagacgcgccaagagaagcggatctggcgtgaagcagaccctgaatttcgacctgctgaagctggctggcgacgtggaatccaacccaggcccttctagaggccatatgaccgagtacaagcccacggtgcgcctcgccacccgcgacgacgtccccagggccgtacgcaccctcgccgccgcgttcgccgactaccccgccacgcgccacaccgtcgatccggaccgccacatcgagcgggtcaccgagctgcaagaactcttcctcacgcgcgtcgggctcgacatcggcaaggtgtgggtcgcggacgacggcgccgcggtggcggtctggaccacgccggagagcgtcgaagcgggggcggtgttcgccgagatcggcccgcgcatggccgagttgagcggttcccggctggccgcgcagcaacagatggaaggcctcctggcgccgcaccggcccaaggagcccgcgtggttcctggccaccgtcggcgtctcgcccgaccaccagggcaagggtctgggcagcgccgtcgtgctccccggagtggaggcggccgagcgcgccggggtgcccgccttcctggagacctccgcgccccgcaacctccccttctacgagcggctcggcttcaccgtcaccgccgacgtcgaggtgcccgaaggaccgcgcacctggtgcatgacccgcaagcccggtgcctga

SEQ ID NO: 21735 - DNA, 1932 bp, Artificial Sequence
  Synthetic Polynucleotide
atggccttaccagtgaccgccttgctcctgccgctggccttgctgctccacgccgccaggccggacatccagatgacacagagccctagcagcctgtctgccagcgtgggagacagagtgaccatcacctgtagagccagccaggacatcagcagctacctgaactggtatcagcagaagcccggcaaggcccctaagctgctgatctactacaccagcagactgcacagcggcgtgcccagcagattttctggctctggcagcggcaccgacttcaccctgacaatatctagcctccagcctgaggacttcgccacctactattgccagcagggcaacaccctgccttacacatttggacagggcaccaaggtggaaatcaagagactcgagggacagcctaaggccaatcctaccgtgacactgttccctccaagcagcgaagaactccaggccaacaaggccacacttgtgtgcctgatctccgacttctaccctggggctgtgacagtggcttggaaggccgatggatctcctgtgaaagccggcgtggaaaccaccaagccatccaagcagagcaacaacaaatacgccgccagctcctacctgagcctgacacctgagcagtggaagtcccacagatcctacagctgccaagtgacccacgaaggcagcaccgtggaaaagacagtggcccctacagagtgcagccccatcaagaccgatgtgattacaatggaccccaaggacaactgctccaaggacgccaacgataccctgctgctccagctgaccaacaccagcgcctactacatgtacttgttgctgctgctgaagtccgtggtgtacttcgccatcatcacatgctgcctgctgcggagaaccgccttctgctgcaacggcgagaagtctagggccaagcgatctggatctggagcaacaaacttctcactactcaaacaagcaggtgacgtggaggagaatcccgggcctactagtatggactggatttggcgcatccttttccttgtcggcgctgctaccggcgcgcattccttcgaagaagtgcagctggttgaatcaggtggcggcctggttcaacctggcggatctctgagactgagctgtgccgccagcggctacaccttcagcgactactttatgagctgggtccgacaggcccctggcaaaggacttgaatgggtcgccaccatcagcaatggcggcacctacacttactaccccgacagcgtgaagggcagattcaccatctccagagacaacagcaagaacaccctgtacctccagatgaactccctgagagccgaggacaccgccgtgtactactgcgccagattcgacggctacatcttcgactattggggccagggcaccctggtcacagtctcttctacgcgtgcctctacaaagggaccctccgtgtttcctctggctcccagcagcaagtctacaagcggaggaacagccgctctgggctgcctggtcaaggattactttcccgagcctgtgaccgtgtcctggaatagcggagcactgacaagcggcgtgcacacctttccagccgtgctgcaaagcagcggcctgtactctctgagcagcgtggtcacagtgcctagctctagcctgggcacccagacctacatctgcaatgtgaaccacaagcctagcaacaccaaggtggacaagagagtggaacccaagagctgtgaagtgaaaaccgactccaccgaccacgtgaagcccaaagagacagagaacaccaagcagcccagcaagagctgccacaagcccaaggccatcgtgcacaccgagaaagtgaacatgatgagcctgaccgtgctgggcctgcggatgctgttcgccaaaaccgtggccgtgaacttcctgctgaccgccaagctgttcttcctc

SEQ ID NO: 21736 - DNA, 1866 bp, Artificial Sequence
  Synthetic Polynucleotide
atggccttaccagtgaccgccttgctcctgccgctggccttgctgctccacgccgccaggccggacatccagatgacacagagccctagcagcctgtctgccagcgtgggagacagagtgaccatcacctgtagagccagccaggacatcagcagctacctgaactggtatcagcagaagcccggcaaggcccctaagctgctgatctactacaccagcagactgcacagcggcgtgcccagcagattttctggctctggcagcggcaccgacttcaccctgacaatatctagcctccagcctgaggacttcgccacctactattgccagcagggcaacaccctgccttacacatttggacagggcaccaaggtggaaatcaagagactcgagggacagcctaaggccaatcctaccgtgacactgttccctccaagcagcgaagaactccaggccaacaaggccacacttgtgtgcctgatctccgacttctaccctggggctgtgacagtggcttggaaggccgatggatctcctgtgaaagccggcgtggaaaccaccaagccatccaagcagagcaacaacaaatacgccgccagctcctacctgagcctgacacctgagcagtggaagtcccacagatcctacagctgccaagtgacccacgaaggcagcaccgtggaaaagacagtggcccctacagagtgcagcggcagagccgattgcggctttaccagcgagagctaccagcagggcgtgctgagcgccaccatcctgtacgagatcctgctgggcaaggccaccctgtacgccgtgctggtgtctgccctggtgctgatggctatggtcaagcggaaggacagccggggaagggccaagcgatctggatctggagcaacaaacttctcactactcaaacaagcaggtgacgtggaggagaatcccgggcctactagtatggactggatttggcgcatccttttccttgtcggcgctgctaccggcgcgcattccttcgaagaagtgcagctggttgaatcaggtggcggcctggttcaacctggcggatctctgagactgagctgtgccgccagcggctacaccttcagcgactactttatgagctgggtccgacaggcccctggcaaaggacttgaatgggtcgccaccatcagcaatggcggcacctacacttactaccccgacagcgtgaagggcagattcaccatctccagagacaacagcaagaacaccctgtacctccagatgaactccctgagagccgaggacaccgccgtgtactactgcgccagattcgacggctacatcttcgactattggggccagggcaccctggtcacagtctcttctacgcgtgcctctacaaagggaccctccgtgtttcctctggctcccagcagcaagtctacaagcggaggaacagccgctctgggctgcctggtcaaggattactttcccgagcctgtgaccgtgtcctggaatagcggagcactgacaagcggcgtgcacacctttccagccgtgctgcaaagcagcggcctgtactctctgagcagcgtggtcacagtgcctagctctagcctgggcacccagacctacatctgcaatgtgaaccacaagcctagcaacaccaaggtggacaagagagtggaacccaagagctgtatccccgaggacacattcttcccaagccccgagagcagctgcgacgtgaagctggtggaaaagagcttcgagacagacaccaacctgaacttccagaacctgagcgtgatcggcttcagaatcctgctgctgaaagtggccggctttaacctgctgatgaccctgcggctgtggtccagc

SEQ ID NO: 21737 - DNA, 1344 bp, Artificial Sequence
  Synthetic Polynucleotide
atggccttaccagtgaccgccttgctcctgccgctggccttgctgctccacgccgccaggccggacatccagatgacacagagccctagcagcctgtctgccagcgtgggagacagagtgaccatcacctgtagagccagccaggacatcagcagctacctgaactggtatcagcagaagcccggcaaggcccctaagctgctgatctactacaccagcagactgcacagcggcgtgcccagcagattttctggctctggcagcggcaccgacttcaccctgacaatatctagcctccagcctgaggacttcgccacctactattgccagcagggcaacaccctgccttacacatttggacagggcaccaaggtggaaatcaagagaggcggaggcggaagtggaggcggaggatctggcggcggaggctctgaagtgcagctggttgaatcaggtggcggcctggttcaacctggcggatctctgagactgagctgtgccgccagcggctacaccttcagcgactactttatgagctgggtccgacaggcccctggcaaaggacttgaatgggtcgccaccatcagcaatggcggcacctacacttactaccccgacagcgtgaagggcagattcaccatctccagagacaacagcaagaacaccctgtacctccagatgaactccctgagagccgaggacaccgccgtgtactactgcgccagattcgacggctacatcttcgactattggggccagggcaccctggtcacagtctcttctacgcgtgacggtaacgaggagatgggaggaatcactcaaaccccttacaaagtctcaatttcaggaacaactgttatccttacatgtccccagtatcctggcagcgagatcctttggcagcataacgacaagaatatagggggagatgaagacgataagaatatcggatctgacgaggatcacttgagcctgaaagagttctccgagcttgaacaaagcggatattatgtgtgctatccgcgcgggtcaaagccggaagacgctaacttttacctttatctccgagccagagtgtgcgaaaattgcatggaaatggacgttatgtccgttgctacaatagttatcgtagatatatgcatcacgggtggactgcttctgctggtttattattggtccaagaatagaaaggccaaagctaaacccgtgaccagaggcgctggcgcaggcggaaggcaaaggggacaaaacaaagaacggccaccaccagtgccaaatccagattatgagcctattcggaaaggacagagggacctgtactctggcctgaatcagagaagaatc

SEQ ID NO: 21738 - DNA, 1239 bp, Artificial Sequence
  Synthetic Polynucleotide
atggccttaccagtgaccgccttgctcctgccgctggccttgctgctccacgccgccaggccggacatccagatgacacagagccctagcagcctgtctgccagcgtgggagacagagtgaccatcacctgtagagccagccaggacatcagcagctacctgaactggtatcagcagaagcccggcaaggcccctaagctgctgatctactacaccagcagactgcacagcggcgtgcccagcagattttctggctctggcagcggcaccgacttcaccctgacaatatctagcctccagcctgaggacttcgccacctactattgccagcagggcaacaccctgccttacacatttggacagggcaccaaggtggaaatcaagagaggcggaggcggaagtggaggcggaggatctggcggcggaggctctgaagtgcagctggttgaatcaggtggcggcctggttcaacctggcggatctctgagactgagctgtgccgccagcggctacaccttcagcgactactttatgagctgggtccgacaggcccctggcaaaggacttgaatgggtcgccaccatcagcaatggcggcacctacacttactaccccgacagcgtgaagggcagattcaccatctccagagacaacagcaagaacaccctgtacctccagatgaactccctgagagccgaggacaccgccgtgtactactgcgccagattcgacggctacatcttcgactattggggccagggcaccctggtcacagtctcttctacgcgtttcaagatccccatcgaggaactggaagatcgggtgttcgtgaactgcaacacctctatcacctgggtggaaggcaccgtgggaacactgctgagcgacatcaccagactggacctcggcaagcggattctggaccctcggggcatctacagatgcaacggcaccgacatctacaaggacaaagaaagcaccgtgcaggtccactacagaatgtgccagtcctgcgtggaactggaccctgctacagtggccggcatcatcgtgaccgatgtgatcgctactctgctgctggctctgggagtgttctgcttcgccggacacgaaacaggcagactgtctggcgctgccgatacacaggccctgctgagaaacgaccaagtgtatcagcccctgcgcgacagagatgatgcccagtattctcacctcggcggcaactgggctagaaacaag

SEQ ID NO: 21739 - DNA, 1269 bp, Artificial Sequence
  Synthetic Polynucleotide
atggccttaccagtgaccgccttgctcctgccgctggccttgctgctccacgccgccaggccggacatccagatgacacagagccctagcagcctgtctgccagcgtgggagacagagtgaccatcacctgtagagccagccaggacatcagcagctacctgaactggtatcagcagaagcccggcaaggcccctaagctgctgatctactacaccagcagactgcacagcggcgtgcccagcagattttctggctctggcagcggcaccgacttcaccctgacaatatctagcctccagcctgaggacttcgccacctactattgccagcagggcaacaccctgccttacacatttggacagggcaccaaggtggaaatcaagagaggcggaggcggaagtggaggcggaggatctggcggcggaggctctgaagtgcagctggttgaatcaggtggcggcctggttcaacctggcggatctctgagactgagctgtgccgccagcggctacaccttcagcgactactttatgagctgggtccgacaggcccctggcaaaggacttgaatgggtcgccaccatcagcaatggcggcacctacacttactaccccgacagcgtgaagggcagattcaccatctccagagacaacagcaagaacaccctgtacctccagatgaactccctgagagccgaggacaccgccgtgtactactgcgccagattcgacggctacatcttcgactattggggccagggcaccctggtcacagtctcttctacgcgtcagagcatcaagggcaaccacctggtcaaggtgtacgactaccaagaggacggcagcgtgctgctgacatgtgatgccgaggccaagaacatcacctggtttaaggacggcaagatgatcggcttcctgaccgaggacaagaagaagtggaacctgggcagcaacgctaaggaccccagaggcatgtatcagtgcaagggcagccagaacaagagcaagcccctccaggtgtactaccggatgtgccagaactgcatcgagctgaacgccgctaccatcagcggctttctgttcgccgagatcgtgtccatcttcgtgctggccgtgggcgtgtactttatcgctggacaggatggcgtgcggcagagcagagcttccgataagcaaaccctgctgcctaacgaccagctgtaccagcctctgaaggacagagaggacgaccagtacagccacctccagggcaatcagctgagaagaaac

SEQ ID NO: 21740 - DNA, 2259 bp, Artificial Sequence
  Synthetic Polynucleotide
atggccttaccagtgaccgccttgctcctgccgctggccttgctgctccacgccgccaggccggaagtgcagctggttgaatctggcggaggactggttcagcctggcggatctctgagactgtcttgtgccgccagcggcttcagcttcagcgacttttggatgagctgggtccgacaggcccctggcaaaggacttgaatgggtcgccacaatcagccaggccggcagcgagaaggactacgtggactctgtgaagggcagattcaccatcagccgggacaacgccaagaagtccctgtacctccagatgaacagcctgagagccgaggacaccgccgtgtactattgtgcctctggcgtgtacagcttcgactacagaggccagggcaccctggtcacagtctcttctggtaccggcggaggcggatctggcggcggaggtagcggtggcggaggatctgaattcgacatccagatgacacagagccctagcagcctgtctgccagcgtgggagacagagtgaccatcacctgtagagccagccaggacatcagcagctacctgaactggtatcagcagaagcccggcaaggcccctaagctgctgatctactacaccagcagactgcacagcggcgtgcccagcagattttctggctctggcagcggcaccgacttcaccctgacaatatctagcctccagcctgaggacttcgccacctactattgccagcagggcaacaccctgccttacacatttggacagggcaccaaggtggaaatcaagagactcgaggacctgaagaacgtgttcccacctgaggtggccgtgttcgagcctagcgaggccgagatcagccacacccagaaagccaccctcgtgtgcctggctaccggcttctaccccgaccatgtggaactgtcttggtgggtcaacggcaaagaggtgcacagcggcgtgtgtaccgacccccagccactgaaagaacagcccgccctgaacgacagccggtactgcctgagcagcagactgagagtgtccgccaccttctggcagaacccccggaaccacttcagatgccaggtgcagttctacggcctgagcgagaacgacgagtggacccaggacagagccaagcccgtgacccagatcgtgtctgccgaagcctggggcagagccgattgcggctttaccagcgagagctaccagcagggcgtgctgagcgccaccatcctgtacgagatcctgctgggcaaggccaccctgtacgccgtgctggtgtctgccctggtgctgatggctatggtcaagcggaaggacagccggggaagggccaagcgatctggatctggagcaacaaacttctcactactcaaacaagcaggtgacgtggaggagaatcccgggcctactagtatggactggatttggcgcatccttttccttgtcggcgctgctaccggcgcgcattccttcgaagaagtgcagctggttgaatcaggtggcggcctggttcaacctggcggatctctgagactgagctgtgccgccagcggctacaccttcagcgactactttatgagctgggtccgacaggcccctggcaaaggacttgaatgggtcgccaccatcagcaatggcggcacctacacttactaccccgacagcgtgaagggcagattcaccatctccagagacaacagcaagaacaccctgtacctccagatgaactccctgagagccgaggacaccgccgtgtactactgcgccagattcgacggctacatcttcgactattggggccagggcaccctggtcacagtctcttctacgcgtatccagaaccctgatcctgccgtgtaccagctgcgggatagcaagagcagcgacaagagcgtgtgtctgttcaccgacttcgacagccagaccaacgtgtcccagagcaaggactccgacgtgtacatcaccgataagtgcgtgctggacatgcggagcatggacttcaagagcaactccgccgtggcctggtccaacaagtccgatttcgcctgcgccaacgccttcaacaacagcattatccccgaggacacattcttcccaagccccgagagcagctgcgacgtgaagctggtggaaaagagcttcgagacagacaccaacctgaacttccagaacctgagcgtgatcggcttcagaatcctgctgctgaaagtggccggctttaacctgctgatgaccctgcggctgtggtccagc

SEQ ID NO: 21741 - DNA, 2337 bp, Artificial Sequence
  Synthetic Polynucleotide
atggccttaccagtgaccgccttgctcctgccgctggccttgctgctccacgccgccaggccggaagtgcagctggttgaatctggcggaggactggttcagcctggcggatctctgagactgtcttgtgccgccagcggcttcagcttcagcgacttttggatgagctgggtccgacaggcccctggcaaaggacttgaatgggtcgccacaatcagccaggccggcagcgagaaggactacgtggactctgtgaagggcagattcaccatcagccgggacaacgccaagaagtccctgtacctccagatgaacagcctgagagccgaggacaccgccgtgtactattgtgcctctggcgtgtacagcttcgactacagaggccagggcaccctggtcacagtctcttctggtaccggcggaggcggatctggcggcggaggtagcggtggcggaggatctgaattcgacatccagatgacacagagccctagcagcctgtctgccagcgtgggagacagagtgaccatcacctgtagagccagccaggacatcagcagctacctgaactggtatcagcagaagcccggcaaggcccctaagctgctgatctactacaccagcagactgcacagcggcgtgcccagcagattttctggctctggcagcggcaccgacttcaccctgacaatatctagcctccagcctgaggacttcgccacctactattgccagcagggcaacaccctgccttacacatttggacagggcaccaaggtggaaatcaagagactcgagggacagcctaaggccaatcctaccgtgacactgttccctccaagcagcgaagaactccaggccaacaaggccacacttgtgtgcctgatctccgacttctaccctggggctgtgacagtggcttggaaggccgatggatctcctgtgaaagccggcgtggaaaccaccaagccatccaagcagagcaacaacaaatacgccgccagctcctacctgagcctgacacctgagcagtggaagtcccacagatcctacagctgccaagtgacccacgaaggcagcaccgtggaaaagacagtggcccctacagagtgcagccccatcaagaccgatgtgattacaatggaccccaaggacaactgctccaaggacgccaacgataccctgctgctccagctgaccaacaccagcgcctactacatgtacttgttgctgctgctgaagtccgtggtgtacttcgccatcatcacatgctgcctgctgcggagaaccgccttctgctgcaacggcgagaagtctagggccaagcgatctggatctggagcaacaaacttctcactactcaaacaagcaggtgacgtggaggagaatcccgggcctactagtatggactggatttggcgcatccttttccttgtcggcgctgctaccggcgcgcattccttcgaagaagtgcagctggttgaatcaggtggcggcctggttcaacctggcggatctctgagactgagctgtgccgccagcggctacaccttcagcgactactttatgagctgggtccgacaggcccctggcaaaggacttgaatgggtcgccaccatcagcaatggcggcacctacacttactaccccgacagcgtgaagggcagattcaccatctccagagacaacagcaagaacaccctgtacctccagatgaactccctgagagccgaggacaccgccgtgtactactgcgccagattcgacggctacatcttcgactattggggccagggcaccctggtcacagtctcttctacgcgtgcctctacaaagggaccctccgtgtttcctctggctcccagcagcaagtctacaagcggaggaacagccgctctgggctgcctggtcaaggattactttcccgagcctgtgaccgtgtcctggaatagcggagcactgacaagcggcgtgcacacctttccagccgtgctgcaaagcagcggcctgtactctctgagcagcgtggtcacagtgcctagctctagcctgggcacccagacctacatctgcaatgtgaaccacaagcctagcaacaccaaggtggacaagagagtggaacccaagagctgtgaagtgaaaaccgactccaccgaccacgtgaagcccaaagagacagagaacaccaagcagcccagcaagagctgccacaagcccaaggccatcgtgcacaccgagaaagtgaacatgatgagcctgaccgtgctgggcctgcggatgctgttcgccaaaaccgtggccgtgaacttcctgctgaccgccaagctgttcttcctc

SEQ ID NO: 21742 - DNA, 2280 bp, Artificial Sequence
  Synthetic Polynucleotide
atggccttaccagtgaccgccttgctcctgccgctggccttgctgctccacgccgccaggccggaagtgcagctggttgaatctggcggaggactggttcagcctggcggatctctgagactgtcttgtgccgccagcggcttcagcttcagcgacttttggatgagctgggtccgacaggcccctggcaaaggacttgaatgggtcgccacaatcagccaggccggcagcgagaaggactacgtggactctgtgaagggcagattcaccatcagccgggacaacgccaagaagtccctgtacctccagatgaacagcctgagagccgaggacaccgccgtgtactattgtgcctctggcgtgtacagcttcgactacagaggccagggcaccctggtcacagtctcttctggtaccggcggaggcggatctggcggcggaggtagcggtggcggaggatctgaattcgacatccagatgacacagagccctagcagcctgtctgccagcgtgggagacagagtgaccatcacctgtagagccagccaggacatcagcagctacctgaactggtatcagcagaagcccggcaaggcccctaagctgctgatctactacaccagcagactgcacagcggcgtgcccagcagattttctggctctggcagcggcaccgacttcaccctgacaatatctagcctccagcctgaggacttcgccacctactattgccagcagggcaacaccctgccttacacatttggacagggcaccaaggtggaaatcaagagactcgagggacagcctaaggccaatcctaccgtgacactgttccctccaagcagcgaagaactccaggccaacaaggccacacttgtgtgcctgatctccgacttctaccctggggctgtgacagtggcttggaaggccgatggatctcctgtgaaagccggcgtggaaaccaccaagccatccaagcagagcaacaacaaatacgccgccagctcctacctgagcctgacacctgagcagtggaagtcccacagatcctacagctgccaagtgacccacgaaggcagcaccgtggaaaagacagtggcccctacagagtgcagcggcagagccgattgcggctttaccagcgagagctaccagcagggcgtgctgagcgccaccatcctgtacgagatcctgctgggcaaggccaccctgtacgccgtgctggtgtctgccctggtgctgatggctatggtcaagcggaaggacagccggggacgcgccaagagaagcggatctggcgtgaagcagaccctgaatttcgacctgctgaagctggctggcgacgtggaatccaacccaggccctactagtatggactggatttggcgcatccttttccttgtcggcgctgctaccggcgcgcattccttcgaagaagtgcagctggttgaatcaggtggcggcctggttcaacctggcggatctctgagactgagctgtgccgccagcggctacaccttcagcgactactttatgagctgggtccgacaggcccctggcaaaggacttgaatgggtcgccaccatcagcaatggcggcacctacacttactaccccgacagcgtgaagggcagattcaccatctccagagacaacagcaagaacaccctgtacctccagatgaactccctgagagccgaggacaccgccgtgtactactgcgccagattcgacggctacatcttcgactattggggccagggcaccctggtcacagtctcttctacgcgtgcctctacaaagggaccctccgtgtttcctctggctcccagcagcaagtctacaagcggaggaacagccgctctgggctgcctggtcaaggattactttcccgagcctgtgaccgtgtcctggaatagcggagcactgacaagcggcgtgcacacctttccagccgtgctgcaaagcagcggcctgtactctctgagcagcgtggtcacagtgcctagctctagcctgggcacccagacctacatctgcaatgtgaaccacaagcctagcaacaccaaggtggacaagagagtggaacccaagagctgtatccccgaggacacattcttcccaagccccgagagcagctgcgacgtgaagctggtggaaaagagcttcgagacagacaccaacctgaacttccagaacctgagcgtgatcggcttcagaatcctgctgctgaaagtggccggctttaacctgctgatgaccctgcggctgtggtccagc

SEQ ID NO: 21743 - DNA, 2682 bp, Artificial Sequence
  Synthetic Polynucleotide
atggccttaccagtgaccgccttgctcctgccgctggccttgctgctccacgccgccaggccggaagtgcagctggttgaatctggcggaggactggttcagcctggcggatctctgagactgtcttgtgccgccagcggcttcagcttcagcgacttttggatgagctgggtccgacaggcccctggcaaaggacttgaatgggtcgccacaatcagccaggccggcagcgagaaggactacgtggactctgtgaagggcagattcaccatcagccgggacaacgccaagaagtccctgtacctccagatgaacagcctgagagccgaggacaccgccgtgtactattgtgcctctggcgtgtacagcttcgactacagaggccagggcaccctggtcacagtctcttctggtaccggcggaggcggatctggcggcggaggtagcggtggcggaggatctgaattcgacatccagatgacacagagccctagcagcctgtctgccagcgtgggagacagagtgaccatcacctgtagagccagccaggacatcagcagctacctgaactggtatcagcagaagcccggcaaggcccctaagctgctgatctactacaccagcagactgcacagcggcgtgcccagcagattttctggctctggcagcggcaccgacttcaccctgacaatatctagcctccagcctgaggacttcgccacctactattgccagcagggcaacaccctgccttacacatttggacagggcaccaaggtggaaatcaagagactcgagatccagaaccctgatcctgccgtgtaccagctgcgggatagcaagagcagcgacaagagcgtgtgtctgttcaccgacttcgacagccagaccaacgtgtcccagagcaaggactccgacgtgtacatcaccgataagtgcgtgctggacatgcggagcatggacttcaagagcaactccgccgtggcctggtccaacaagtccgatttcgcctgcgccaacgccttcaacaacagcattatccccgaggacacattcttcccaagccccgagagcagctgcgacgtgaagctggtggaaaagagcttcgagacagacaccaacctgaacttccagaacctgagcgtgatcggcttcagaatcctgctgctgaaagtggccggctttaacctgctgatgaccctgcggctgtggtccagccgcgccaagagaagcggatctggcgtgaagcagaccctgaatttcgacctgctgaagctggctggcgacgtggaatccaacccaggccctactagtatggactggatttggcgcatccttttccttgtcggcgctgctaccggcgcgcattccgggccccagctccagctgcaagagtctggacctggcctggtcaagcctagcgagacactgagcctgacctgtaccgtgtccggcgatagcatcagcagcggcgattactactggggctggatcagacagcctcctggcaaaggactggaatggatcggccacatctactacagcggcgtgacctactacaaccccagcctgaagtccagagtgaccatcagcgtggacaccagccggaaccagttctccctgaagctgtctagcgtgacagccgccgataccgccgtgtactactgcaccagagaggacagcagcaactggcggagtagaggccagggaacactggtcacagttagctctggatccggcggaggcggaagtggaggcggaggatctggcggcggaggctctttcgaagaagtgcagctggttgaatcaggtggcggcctggttcaacctggcggatctctgagactgagctgtgccgccagcggctacaccttcagcgactactttatgagctgggtccgacaggcccctggcaaaggacttgaatgggtcgccaccatcagcaatggcggcacctacacttactaccccgacagcgtgaagggcagattcaccatctccagagacaacagcaagaacaccctgtacctccagatgaactccctgagagccgaggacaccgccgtgtactactgcgccagattcgacggctacatcttcgactattggggccagggcaccctggtcacagtctcttctacgcgtgaggacctgaagaacgtgttcccacctgaggtggccgtgttcgagcctagcgaggccgagatcagccacacccagaaagccaccctcgtgtgcctggctaccggcttctaccccgaccatgtggaactgtcttggtgggtcaacggcaaagaggtgcacagcggcgtgtgtaccgacccccagccactgaaagaacagcccgccctgaacgacagccggtactgcctgagcagcagactgagagtgtccgccaccttctggcagaacccccggaaccacttcagatgccaggtgcagttctacggcctgagcgagaacgacgagtggacccaggacagagccaagcccgtgacccagatcgtgtctgccgaagcctggggcagagccgattgcggctttaccagcgagagctaccagcagggcgtgctgagcgccaccatcctgtacgagatcctgctgggcaaggccaccctgtacgccgtgctggtgtctgccctggtgctgatggctatggtcaagcggaaggacagccgggga

SEQ ID NO: 21744 - DNA, 2748 bp, Artificial Sequence
  Synthetic Polynucleotide
atggccttaccagtgaccgccttgctcctgccgctggccttgctgctccacgccgccaggccggaagtgcagctggttgaatctggcggaggactggttcagcctggcggatctctgagactgtcttgtgccgccagcggcttcagcttcagcgacttttggatgagctgggtccgacaggcccctggcaaaggacttgaatgggtcgccacaatcagccaggccggcagcgagaaggactacgtggactctgtgaagggcagattcaccatcagccgggacaacgccaagaagtccctgtacctccagatgaacagcctgagagccgaggacaccgccgtgtactattgtgcctctggcgtgtacagcttcgactacagaggccagggcaccctggtcacagtctcttctggtaccggcggaggcggatctggcggcggaggtagcggtggcggaggatctgaattcgacatccagatgacacagagccctagcagcctgtctgccagcgtgggagacagagtgaccatcacctgtagagccagccaggacatcagcagctacctgaactggtatcagcagaagcccggcaaggcccctaagctgctgatctactacaccagcagactgcacagcggcgtgcccagcagattttctggctctggcagcggcaccgacttcaccctgacaatatctagcctccagcctgaggacttcgccacctactattgccagcagggcaacaccctgccttacacatttggacagggcaccaaggtggaaatcaagagactcgagggacagcctaaggccaatcctaccgtgacactgttccctccaagcagcgaagaactccaggccaacaaggccacacttgtgtgcctgatctccgacttctaccctggggctgtgacagtggcttggaaggccgatggatctcctgtgaaagccggcgtggaaaccaccaagccatccaagcagagcaacaacaaatacgccgccagctcctacctgagcctgacacctgagcagtggaagtcccacagatcctacagctgccaagtgacccacgaaggcagcaccgtggaaaagacagtggcccctacagagtgcagccccatcaagaccgatgtgattacaatggaccccaaggacaactgctccaaggacgccaacgataccctgctgctccagctgaccaacaccagcgcctactacatgtacttgttgctgctgctgaagtccgtggtgtacttcgccatcatcacatgctgcctgctgcggagaaccgccttctgctgcaacggcgagaagtctagggccaagcgatctggatctggagcaacaaacttctcactactcaaacaagcaggtgacgtggaggagaatcccgggcctactagtatggactggatttggcgcatccttttccttgtcggcgctgctaccggcgcgcattccgggccccagctccagctgcaagagtctggacctggcctggtcaagcctagcgagacactgagcctgacctgtaccgtgtccggcgatagcatcagcagcggcgattactactggggctggatcagacagcctcctggcaaaggactggaatggatcggccacatctactacagcggcgtgacctactacaaccccagcctgaagtccagagtgaccatcagcgtggacaccagccggaaccagttctccctgaagctgtctagcgtgacagccgccgataccgccgtgtactactgcaccagagaggacagcagcaactggcggagtagaggccagggaacactggtcacagttagctctggatccggcggaggcggaagtggaggcggaggatctggcggcggaggctctttcgaagaagtgcagctggttgaatcaggtggcggcctggttcaacctggcggatctctgagactgagctgtgccgccagcggctacaccttcagcgactactttatgagctgggtccgacaggcccctggcaaaggacttgaatgggtcgccaccatcagcaatggcggcacctacacttactaccccgacagcgtgaagggcagattcaccatctccagagacaacagcaagaacaccctgtacctccagatgaactccctgagagccgaggacaccgccgtgtactactgcgccagattcgacggctacatcttcgactattggggccagggcaccctggtcacagtctcttctacgcgtgcctctacaaagggaccctccgtgtttcctctggctcccagcagcaagtctacaagcggaggaacagccgctctgggctgcctggtcaaggattactttcccgagcctgtgaccgtgtcctggaatagcggagcactgacaagcggcgtgcacacctttccagccgtgctgcaaagcagcggcctgtactctctgagcagcgtggtcacagtgcctagctctagcctgggcacccagacctacatctgcaatgtgaaccacaagcctagcaacaccaaggtggacaagagagtggaacccaagagctgtgaagtgaaaaccgactccaccgaccacgtgaagcccaaagagacagagaacaccaagcagcccagcaagagctgccacaagcccaaggccatcgtgcacaccgagaaagtgaacatgatgagcctgaccgtgctgggcctgcggatgctgttcgccaaaaccgtggccgtgaacttcctgctgaccgccaagctgttcttcctc

SEQ ID NO: 21745 - DNA, 2691 bp, Artificial Sequence
  Synthetic Polynucleotide
atggccttaccagtgaccgccttgctcctgccgctggccttgctgctccacgccgccaggccggaagtgcagctggttgaatctggcggaggactggttcagcctggcggatctctgagactgtcttgtgccgccagcggcttcagcttcagcgacttttggatgagctgggtccgacaggcccctggcaaaggacttgaatgggtcgccacaatcagccaggccggcagcgagaaggactacgtggactctgtgaagggcagattcaccatcagccgggacaacgccaagaagtccctgtacctccagatgaacagcctgagagccgaggacaccgccgtgtactattgtgcctctggcgtgtacagcttcgactacagaggccagggcaccctggtcacagtctcttctggtaccggcggaggcggatctggcggcggaggtagcggtggcggaggatctgaattcgacatccagatgacacagagccctagcagcctgtctgccagcgtgggagacagagtgaccatcacctgtagagccagccaggacatcagcagctacctgaactggtatcagcagaagcccggcaaggcccctaagctgctgatctactacaccagcagactgcacagcggcgtgcccagcagattttctggctctggcagcggcaccgacttcaccctgacaatatctagcctccagcctgaggacttcgccacctactattgccagcagggcaacaccctgccttacacatttggacagggcaccaaggtggaaatcaagagactcgagggacagcctaaggccaatcctaccgtgacactgttccctccaagcagcgaagaactccaggccaacaaggccacacttgtgtgcctgatctccgacttctaccctggggctgtgacagtggcttggaaggccgatggatctcctgtgaaagccggcgtggaaaccaccaagccatccaagcagagcaacaacaaatacgccgccagctcctacctgagcctgacacctgagcagtggaagtcccacagatcctacagctgccaagtgacccacgaaggcagcaccgtggaaaagacagtggcccctacagagtgcagcggcagagccgattgcggctttaccagcgagagctaccagcagggcgtgctgagcgccaccatcctgtacgagatcctgctgggcaaggccaccctgtacgccgtgctggtgtctgccctggtgctgatggctatggtcaagcggaaggacagccggggacgcgccaagagaagcggatctggcgtgaagcagaccctgaatttcgacctgctgaagctggctggcgacgtggaatccaacccaggccctactagtatggactggatttggcgcatccttttccttgtcggcgctgctaccggcgcgcattccgggccccagctccagctgcaagagtctggacctggcctggtcaagcctagcgagacactgagcctgacctgtaccgtgtccggcgatagcatcagcagcggcgattactactggggctggatcagacagcctcctggcaaaggactggaatggatcggccacatctactacagcggcgtgacctactacaaccccagcctgaagtccagagtgaccatcagcgtggacaccagccggaaccagttctccctgaagctgtctagcgtgacagccgccgataccgccgtgtactactgcaccagagaggacagcagcaactggcggagtagaggccagggaacactggtcacagttagctctggatccggcggaggcggaagtggaggcggaggatctggcggcggaggctctttcgaagaagtgcagctggttgaatcaggtggcggcctggttcaacctggcggatctctgagactgagctgtgccgccagcggctacaccttcagcgactactttatgagctgggtccgacaggcccctggcaaaggacttgaatgggtcgccaccatcagcaatggcggcacctacacttactaccccgacagcgtgaagggcagattcaccatctccagagacaacagcaagaacaccctgtacctccagatgaactccctgagagccgaggacaccgccgtgtactactgcgccagattcgacggctacatcttcgactattggggccagggcaccctggtcacagtctcttctacgcgtgcctctacaaagggaccctccgtgtttcctctggctcccagcagcaagtctacaagcggaggaacagccgctctgggctgcctggtcaaggattactttcccgagcctgtgaccgtgtcctggaatagcggagcactgacaagcggcgtgcacacctttccagccgtgctgcaaagcagcggcctgtactctctgagcagcgtggtcacagtgcctagctctagcctgggcacccagacctacatctgcaatgtgaaccacaagcctagcaacaccaaggtggacaagagagtggaacccaagagctgtatccccgaggacacattcttcccaagccccgagagcagctgcgacgtgaagctggtggaaaagagcttcgagacagacaccaacctgaacttccagaacctgagcgtgatcggcttcagaatcctgctgctgaaagtggccggctttaacctgctgatgaccctgcggctgtggtccagc

SEQ ID NO: 21746 - DNA, 1500 bp, Artificial Sequence
  Synthetic Polynucleotide
atggccttaccagtgaccgccttgctcctgccgctggccttgctgctccacgccgccaggccggaagtgcagctggttgaatcaggtggcggcctggttcaacctggcggatctctgagactgagctgtgccgccagcggctacaccttcagcgactactttatgagctgggtccgacaggcccctggcaaaggacttgaatgggtcgccaccatcagcaatggcggcacctacacttactaccccgacagcgtgaagggcagattcaccatctccagagacaacagcaagaacaccctgtacctccagatgaactccctgagagccgaggacaccgccgtgtactactgcgccagattcgacggctacatcttcgactattggggccagggcaccctggtcacagtctcttctggcggaggcggaagtggaggcggaggatctggcggcggaggctctgacatccagatgacacagagccctagcagcctgtctgccagcgtgggagacagagtgaccatcacctgtagagccagccaggacatcagcaactacctgaactggtatcagcagaagcccggcaaggcccctaagctgctgatctactacaccagcagactgcacagcggcgtgcccagcagattttctggctctggcagcggcaccgacttcaccctgacaatatctagcctccagcctgaggacttcgccacctactattgccagcagggcaacaccctgccttggacatttggacagggcaccaaggtggaaatcaagagaacgcgtgagcagaaactgatctcggaagaggatctggcgaagcccaccacgacgccagcgccgcgaccaccaacaccggcgcccaccatcgcgtcgcagcccctgtccctgcgcccagaggcgtgccggccagcggcggggggcgcagtgcacacgagggggctggacttcgcctgtgacatctacatctgggcgcccttggccgggacttgtggggtccttctcctgtcactggttatcaccctttactgcaaacggggcagaaagaaactcctgtatatattcaaacaaccatttatgagaccagtacaaactactcaagaggaagatggctgtagctgccgatttccagaagaagaagaaggaggatgtgaactgagagtgaagttcagcaggagcgcagacgcccccgcgtaccagcagggccagaaccagctctataacgagctgaatctaggacgaagagaggagtacgatgttttggacaagagacgtggccgggaccctgagatggggggaaagccgagaaggaagaaccctcaggaaggcctgtacaatgaactgcagaaagataagatggcggaggcctacagtgagattgggatgaaaggcgagcgccggaggggcaaggggcacgatggcctttaccagggtctcagtacagccaccaaggacacctacgacgcccttcacatgcaggccctgccccctcgctga

SEQ ID NO: 21747 - DNA, 2559 bp, Artificial Sequence
  Synthetic Polynucleotide
atggccttaccagtgaccgccttgctcctgccgctggccttgctgctccacgccgccaggccggacatccagatgacacagagccctagcagcctgtctgccagcgtgggagacagagtgaccatcacctgtagagccagccaggacatcagcaactacctgaactggtatcagcagaagcccggcaaggcccctaagctgctgatctactacaccagcagactgcacagcggcgtgcccagcagattttctggctctggcagcggcaccgacttcaccctgacaatatctagcctccagcctgaggacttcgccacctactattgccagcagggcaacaccctgccttggacatttggacagggcaccaaggtggaaatcaagagactcgagatccagaaccctgatcctgccgtgtaccagctgcgggatagcaagagcagcgacaagagcgtgtgtctgttcaccgacttcgacagccagaccaacgtgtcccagagcaaggactccgacgtgtacatcaccgataagtgcgtgctggacatgcggagcatggacttcaagagcaactccgccgtggcctggtccaacaagtccgatttcgcctgcgccaacgccttcaacaacagcattatccccgaggacacattcttcccaagcagcgacgtgccctgcgacgtgaagctggtggaaaagagcttcgagacagacaccaacctgaacttccagaacctgagcgtgatcggcttcagaatcctgctgctgaaagtggccggctttaacctgctgatgaccctgcggctgtggtccagccgcgccaagagaagcggatctggcgtgaagcagaccctgaatttcgacctgctgaagctggctggcgacgtggaatccaacccaggccctactagtatggactggatttggcgcatccttttccttgtcggcgctgctaccggcgcgcattccttcgaagaagtgcagctggttgaatcaggtggcggcctggttcaacctggcggatctctgagactgagctgtgccgccagcggctacaccttcagcgactactttatgagctgggtccgacaggcccctggcaaaggacttgaatgggtcgccaccatcagcaatggcggcacctacacttactaccccgacagcgtgaagggcagattcaccatctccagagacaacagcaagaacaccctgtacctccagatgaactccctgagagccgaggacaccgccgtgtactactgcgccagattcgacggctacatcttcgactattggggccagggcaccctggtcacagtctcttctacgcgtgaggacctgaagaacgtgttcccacctgaggtggccgtgttcgagcctagcaaggccgagatcgcccacacccagaaagccaccctcgtgtgcctggctaccggcttctaccccgaccatgtggaactgtcttggtgggtcaacggcaaagaggtgcacagcggcgtgtgtaccgacccccagccactgaaagaacagcccgccctgaacgacagccggtactgcctgagcagcagactgagagtgtccgccaccttctggcagaacccccggaaccacttcagatgccaggtgcagttctacggcctgagcgagaacgacgagtggacccaggacagagccaagcccgtgacccagatcgtgtctgccgaagcctggggcagagccgattgcggcatcaccagcgccagctaccaccagggcgtgctgagcgccaccatcctgtacgagatcctgctgggcaaggccaccctgtacgccgtgctggtgtctgccctggtgctgatggctatggtcaagcggaaggacagccggggaagggccaagcgatctggatctggagcaacaaacttctcactactcaaacaagcaggtgacgtggaggagaatcccgggccttctagaggccatatgaccgagtacaagcccacggtgcgcctcgccacccgcgacgacgtccccagggccgtacgcaccctcgccgccgcgttcgccgactaccccgccacgcgccacaccgtcgatccggaccgccacatcgagcgggtcaccgagctgcaagaactcttcctcacgcgcgtcgggctcgacatcggcaaggtgtgggtcgcggacgacggcgccgcggtggcggtctggaccacgccggagagcgtcgaagcgggggcggtgttcgccgagatcggcccgcgcatggccgagttgagcggttcccggctggccgcgcagcaacagatggaaggcctcctggcgccgcaccggcccaaggagcccgcgtggttcctggccaccgtcggcgtctcgcccgaccaccagggcaagggtctgggcagcgccgtcgtgctccccggagtggaggcggccgagcgcgccggggtgcccgccttcctggagacctccgcgccccgcaacctccccttctacgagcggctcggcttcaccgtcaccgccgacgtcgaggtgcccgaaggaccgcgcacctggtgcatgacccgcaagcccggtgcctga

SEQ ID NO: 21748 - DNA, 2556 bp, Artificial Sequence
  Synthetic Polynucleotide
atggccttaccagtgaccgccttgctcctgccgctggccttgctgctccacgccgccaggccggacatccagatgacacagagccctagcagcctgtctgccagcgtgggagacagagtgaccatcacctgtagagccagccaggacatcagcaactacctgaactggtatcagcagaagcccggcaaggcccctaagctgctgatctactacaccagcagactgcacagcggcgtgcccagcagattttctggctctggcagcggcaccgacttcaccctgacaatatctagcctccagcctgaggacttcgccacctactattgccagcagggcaacaccctgccttggacatttggacagggcaccaaggtggaaatcaagagactcgaggacctgaagaacgtgttcccacctgaggtggccgtgttcgagcctagcaaggccgagatcgcccacacccagaaagccaccctcgtgtgcctggctaccggcttctaccccgaccatgtggaactgtcttggtgggtcaacggcaaagaggtgcacagcggcgtgtgtaccgacccccagccactgaaagaacagcccgccctgaacgacagccggtactgcctgagcagcagactgagagtgtccgccaccttctggcagaacccccggaaccacttcagatgccaggtgcagttctacggcctgagcgagaacgacgagtggacccaggacagagccaagcccgtgacccagatcgtgtctgccgaagcctggggcagagccgattgcggcatcaccagcgccagctaccaccagggcgtgctgagcgccaccatcctgtacgagatcctgctgggcaaggccaccctgtacgccgtgctggtgtctgccctggtgctgatggctatggtcaagcggaaggacagccggggaagggccaagcgatctggatctggagcaacaaacttctcactactcaaacaagcaggtgacgtggaggagaatcccgggcctactagtatggactggatttggcgcatccttttccttgtcggcgctgctaccggcgcgcattccttcgaagaagtgcagctggttgaatcaggtggcggcctggttcaacctggcggatctctgagactgagctgtgccgccagcggctacaccttcagcgactactttatgagctgggtccgacaggcccctggcaaaggacttgaatgggtcgccaccatcagcaatggcggcacctacacttactaccccgacagcgtgaagggcagattcaccatctccagagacaacagcaagaacaccctgtacctccagatgaactccctgagagccgaggacaccgccgtgtactactgcgccagattcgacggctacatcttcgactattggggccagggcaccctggtcacagtctcttctacgcgtatccagaaccctgatcctgccgtgtaccagctgcgggatagcaagagcagcgacaagagcgtgtgtctgttcaccgacttcgacagccagaccaacgtgtcccagagcaaggactccgacgtgtacatcaccgataagtgcgtgctggacatgcggagcatggacttcaagagcaactccgccgtggcctggtccaacaagtccgatttcgcctgcgccaacgccttcaacaacagcattatccccgaggacacattcttcccaagcagcgacgtgccctgcgacgtgaagctggtggaaaagagcttcgagacagacaccaacctgaacttccagaacctgagcgtgatcggcttcagaatcctgctgctgaaagtggccggctttaacctgctgatgaccctgcggctgtggtccagccgcgccaagagaagcggatctggcgtgaagcagaccctgaatttcgacctgctgaagctggctggcgacgtggaatccaacccaggcccttctagaggccatatgaccgagtacaagcccacggtgcgcctcgccacccgcgacgacgtccccagggccgtacgcaccctcgccgccgcgttcgccgactaccccgccacgcgccacaccgtcgatccggaccgccacatcgagcgggtcaccgagctgcaagaactcttcctcacgcgcgtcgggctcgacatcggcaaggtgtgggtcgcggacgacggcgccgcggtggcggtctggaccacgccggagagcgtcgaagcgggggcggtgttcgccgagatcggcccgcgcatggccgagttgagcggttcccggctggccgcgcagcaacagatggaaggcctcctggcgccgcaccggcccaaggagcccgcgtggttcctggccaccgtcggcgtctcgcccgaccaccagggcaagggtctgggcagcgccgtcgtgctccccggagtggaggcggccgagcgcgccggggtgcccgccttcctggagacctccgcgccccgcaacctccccttctacgagcggctcggcttcaccgtcaccgccgacgtcgaggtgcccgaaggaccgcgcacctggtgcatgacccgcaagcccggtgcctga

SEQ ID NO: 21749 - DNA, 1854 bp, Artificial Sequence
  Synthetic Polynucleotide
atggccttaccagtgaccgccttgctcctgccgctggccttgctgctccacgccgccaggccggacatccagatgacacagagccctagcagcctgtctgccagcgtgggagacagagtgaccatcacctgtagagccagccaggacatcagcaactacctgaactggtatcagcagaagcccggcaaggcccctaagctgctgatctactacaccagcagactgcacagcggcgtgcccagcagattttctggctctggcagcggcaccgacttcaccctgacaatatctagcctccagcctgaggacttcgccacctactattgccagcagggcaacaccctgccttggacatttggacagggcaccaaggtggaaatcaagagactcgaggacctgaagaacgtgttcccacctgaggtggccgtgttcgagcctagcgaggccgagatcagccacacccagaaagccaccctcgtgtgcctggctaccggcttctaccccgaccatgtggaactgtcttggtgggtcaacggcaaagaggtgcacagcggcgtgtgtaccgacccccagccactgaaagaacagcccgccctgaacgacagccggtactgcctgagcagcagactgagagtgtccgccaccttctggcagaacccccggaaccacttcagatgccaggtgcagttctacggcctgagcgagaacgacgagtggacccaggacagagccaagcccgtgacccagatcgtgtctgccgaagcctggggcagagccgattgcggctttaccagcgagagctaccagcagggcgtgctgagcgccaccatcctgtacgagatcctgctgggcaaggccaccctgtacgccgtgctggtgtctgccctggtgctgatggctatggtcaagcggaaggacagccggggaagggccaagcgatctggatctggagcaacaaacttctcactactcaaacaagcaggtgacgtggaggagaatcccgggcctactagtatggactggatttggcgcatccttttccttgtcggcgctgctaccggcgcgcattccttcgaagaagtgcagctggttgaatcaggtggcggcctggttcaacctggcggatctctgagactgagctgtgccgccagcggctacaccttcagcgactactttatgagctgggtccgacaggcccctggcaaaggacttgaatgggtcgccaccatcagcaatggcggcacctacacttactaccccgacagcgtgaagggcagattcaccatctccagagacaacagcaagaacaccctgtacctccagatgaactccctgagagccgaggacaccgccgtgtactactgcgccagattcgacggctacatcttcgactattggggccagggcaccctggtcacagtctcttctacgcgtatccagaaccctgatcctgccgtgtaccagctgcgggatagcaagagcagcgacaagagcgtgtgtctgttcaccgacttcgacagccagaccaacgtgtcccagagcaaggactccgacgtgtacatcaccgataagtgcgtgctggacatgcggagcatggacttcaagagcaactccgccgtggcctggtccaacaagtccgatttcgcctgcgccaacgccttcaacaacagcattatccccgaggacacattcttcccaagccccgagagcagctgcgacgtgaagctggtggaaaagagcttcgagacagacaccaacctgaacttccagaacctgagcgtgatcggcttcagaatcctgctgctgaaagtggccggctttaacctgctgatgaccctgcggctgtggtccagc

SEQ ID NO: 21750 - DNA, 1866 bp, Artificial Sequence
  Synthetic Polynucleotide
atggccttaccagtgaccgccttgctcctgccgctggccttgctgctccacgccgccaggccggacatccagatgacacagagccctagcagcctgtctgccagcgtgggagacagagtgaccatcacctgtagagccagccaggacatcagcaactacctgaactggtatcagcagaagcccggcaaggcccctaagctgctgatctactacaccagcagactgcacagcggcgtgcccagcagattttctggctctggcagcggcaccgacttcaccctgacaatatctagcctccagcctgaggacttcgccacctactattgccagcagggcaacaccctgccttggacatttggacagggcaccaaggtggaaatcaagagactcgagatccagaaccctgatcctgccgtgtaccagctgcgggatagcaagagcagcgacaagagcgtgtgtctgttcaccgacttcgacagccagaccaacgtgtcccagagcaaggactccgacgtgtacatcaccgataagtgcgtgctggacatgcggagcatggacttcaagagcaactccgccgtggcctggtccaacaagtccgatttcgcctgcgccaacgccttcaacaacagcattatccccgaggacacattcttcccaagccccgagagcagctgcgacgtgaagctggtggaaaagagcttcgagacagacaccaacctgaacttccagaacctgagcgtgatcggcttcagaatcctgctgctgaaagtggccggctttaacctgctgatgaccctgcggctgtggtccagccgcgccaagagaagcggatctggcgtgaagcagaccctgaatttcgacctgctgaagctggctggcgacgtggaatccaacccaggccctactagtatggactggatttggcgcatccttttccttgtcggcgctgctaccggcgcgcattccttcgaagaagtgcagctggttgaatcaggtggcggcctggttcaacctggcggatctctgagactgagctgtgccgccagcggctacaccttcagcgactactttatgagctgggtccgacaggcccctggcaaaggacttgaatgggtcgccaccatcagcaatggcggcacctacacttactaccccgacagcgtgaagggcagattcaccatctccagagacaacagcaagaacaccctgtacctccagatgaactccctgagagccgaggacaccgccgtgtactactgcgccagattcgacggctacatcttcgactattggggccagggcaccctggtcacagtctcttctacgcgtgaggacctgaagaacgtgttcccacctgaggtggccgtgttcgagcctagcgaggccgagatcagccacacccagaaagccaccctcgtgtgcctggctaccggcttctaccccgaccatgtggaactgtcttggtgggtcaacggcaaagaggtgcacagcggcgtgtgtaccgacccccagccactgaaagaacagcccgccctgaacgacagccggtactgcctgagcagcagactgagagtgtccgccaccttctggcagaacccccggaaccacttcagatgccaggtgcagttctacggcctgagcgagaacgacgagtggacccaggacagagccaagcccgtgacccagatcgtgtctgccgaagcctggggcagagccgattgcggctttaccagcgagagctaccagcagggcgtgctgagcgccaccatcctgtacgagatcctgctgggcaaggccaccctgtacgccgtgctggtgtctgccctggtgctgatggctatggtcaagcggaaggacagccgggga

SEQ ID NO: 21751 - DNA, 2691 bp, Artificial Sequence
  Synthetic Polynucleotide
atggccttaccagtgaccgccttgctcctgccgctggccttgctgctccacgccgccaggccgctcgaggggaaaccaattcccaaccctcttctgggactggattcaaccggcagcggcgaggacctgaagaacgtgttcccacctgaggtggccgtgttcgagcctagcaaggccgagatcgcccacacccagaaagccaccctcgtgtgcctggctaccggcttctaccccgaccatgtggaactgtcttggtgggtcaacggcaaagaggtgcacagcggcgtgtgtaccgacccccagccactgaaagaacagcccgccctgaacgacagccggtactgcctgagcagcagactgagagtgtccgccaccttctggcagaacccccggaaccacttcagatgccaggtgcagttctacggcctgagcgagaacgacgagtggacccaggacagagccaagcccgtgacccagatcgtgtctgccgaagcctggggcagagccgattgcggcatcaccagcgccagctaccaccagggcgtgctgagcgccaccatcctgtacgagatcctgctgggcaaggccaccctgtacgccgtgctggtgtctgccctggtgctgatggctatggtcaagcggaaggacagccggggaagggccaagcgatctggatctggagcaacaaacttctcactactcaaacaagcaggtgacgtggaggagaatcccgggcctactagcatggccttaccagtgaccgccttgctcctgccgctggccttgctgctccacgccgccaggccggacatccagatgacacagagccctagcagcctgtctgccagcgtgggagacagagtgaccatcacctgtagagccagccaggacatcagcaactacctgaactggtatcagcagaagcccggcaaggcccctaagctgctgatctactacaccagcagactgcacagcggcgtgcccagcagattttctggctctggcagcggcaccgacttcaccctgacaatatctagcctccagcctgaggacttcgccacctactattgccagcagggcaacaccctgccttggacatttggacagggcaccaaggtggaaatcaagagaggcggaggcggaagtggaggcggaggatctggcggcggaggctctgaagtgcagctggttgaatcaggtggcggcctggttcaacctggcggatctctgagactgagctgtgccgccagcggctacaccttcagcgactactttatgagctgggtccgacaggcccctggcaaaggacttgaatgggtcgccaccatcagcaatggcggcacctacacttactaccccgacagcgtgaagggcagattcaccatctccagagacaacagcaagaacaccctgtacctccagatgaactccctgagagccgaggacaccgccgtgtactactgcgccagattcgacggctacatcttcgactattggggccagggcaccctggtcacagtctcttctacgcgtgagcagaaactgatctcggaagaggatgggagcggcatccagaaccctgatcctgccgtgtaccagctgcgggatagcaagagcagcgacaagagcgtgtgtctgttcaccgacttcgacagccagaccaacgtgtcccagagcaaggactccgacgtgtacatcaccgataagtgcgtgctggacatgcggagcatggacttcaagagcaactccgccgtggcctggtccaacaagtccgatttcgcctgcgccaacgccttcaacaacagcattatccccgaggacacattcttcccaagcagcgacgtgccctgcgacgtgaagctggtggaaaagagcttcgagacagacaccaacctgaacttccagaacctgagcgtgatcggcttcagaatcctgctgctgaaagtggccggctttaacctgctgatgaccctgcggctgtggtccagccgcgccaagagaagcggatctggcgtgaagcagaccctgaatttcgacctgctgaagctggctggcgacgtggaatccaacccaggcccttctagaggccatatgaccgagtacaagcccacggtgcgcctcgccacccgcgacgacgtccccagggccgtacgcaccctcgccgccgcgttcgccgactaccccgccacgcgccacaccgtcgatccggaccgccacatcgagcgggtcaccgagctgcaagaactcttcctcacgcgcgtcgggctcgacatcggcaaggtgtgggtcgcggacgacggcgccgcggtggcggtctggaccacgccggagagcgtcgaagcgggggcggtgttcgccgagatcggcccgcgcatggccgagttgagcggttcccggctggccgcgcagcaacagatggaaggcctcctggcgccgcaccggcccaaggagcccgcgtggttcctggccaccgtcggcgtctcgcccgaccaccagggcaagggtctgggcagcgccgtcgtgctccccggagtggaggcggccgagcgcgccggggtgcccgccttcctggagacctccgcgccccgcaacctccccttctacgagcggctcggcttcaccgtcaccgccgacgtcgaggtgcccgaaggaccgcgcacctggtgcatgacccgcaagcccggtgcctga

SEQ ID NO: 21752 - DNA, 2667 bp, Artificial Sequence
  Synthetic Polynucleotide
atggccttaccagtgaccgccttgctcctgccgctggccttgctgctccacgccgccaggccggacatccagatgacacagagccctagcagcctgtctgccagcgtgggagacagagtgaccatcacctgtagagccagccaggacatcagcaactacctgaactggtatcagcagaagcccggcaaggcccctaagctgctgatctactacaccagcagactgcacagcggcgtgcccagcagattttctggctctggcagcggcaccgacttcaccctgacaatatctagcctccagcctgaggacttcgccacctactattgccagcagggcaacaccctgccttggacatttggacagggcaccaaggtggaaatcaagagactcgaggggaaaccaattcccaaccctcttctgggactggattcaaccggcagcggcgacaagcagctggacgccgacgtgtcccccaagcctaccatcttcctgccctctatcgccgagacaaagctccagaaggccggcacctacctgtgcctgctggaaaagttcttcccagatgtgattaagatccactggcaggaaaagaagtccaacaccatcctgggcagccaggaaggcaacaccatgaagaccaacgacacctacatgaagttcagctggctgaccgtgcccgagaagtccctggacaaagaacacagatgcatcgtgcggcacgaaaacaacaagaacggcgtggaccaggaaatcatcttcccacccatcaagaccgatgtgattacaatggaccccaaggacaactgctccaaggacgccaacgataccctgctgctccagctgaccaacaccagcgcctactacatgtacttgttgctgctgctgaagtccgtggtgtacttcgccatcatcacatgctgcctgctgcggagaaccgccttctgctgcaacggcgagaagtctagggccaagcgatctggatctggagcaacaaacttctcactactcaaacaagcaggtgacgtggaggagaatcccgggcctactagtatggactggatttggcgcatccttttccttgtcggcgctgctaccggcgcgcattccttcgaagaagtgcagctggttgaatcaggtggcggcctggttcaacctggcggatctctgagactgagctgtgccgccagcggctacaccttcagcgactactttatgagctgggtccgacaggcccctggcaaaggacttgaatgggtcgccaccatcagcaatggcggcacctacacttactaccccgacagcgtgaagggcagattcaccatctccagagacaacagcaagaacaccctgtacctccagatgaactccctgagagccgaggacaccgccgtgtactactgcgccagattcgacggctacatcttcgactattggggccagggcaccctggtcacagtctcttctacgcgtgagcagaaactgatctcggaagaggatgggagcggcagccagcctcacaccaagcccagcgtgttcgtgatgaagaacggcaccaacgtggcctgcctcgtgaaagagttctaccccaaggacatcaggatcaacctggtgtccagcaagaagatcaccgagttcgaccccgccatcgtgatctcccccagcggcaagtacaacgccgtgaagctggggaagtacgaggacagcaacagcgtgacctgctccgtgcagcacgacaacaagaccgtgcacagcaccgactttgaagtgaaaaccgactccaccgaccacgtgaagcccaaagagacagagaacaccaagcagcccagcaagagctgccacaagcccaaggccatcgtgcacaccgagaaagtgaacatgatgagcctgaccgtgctgggcctgcggatgctgttcgccaaaaccgtggccgtgaacttcctgctgaccgccaagctgttcttcctccgcgccaagagaagcggatctggcgtgaagcagaccctgaatttcgacctgctgaagctggctggcgacgtggaatccaacccaggcccttctagaggccatatgaccgagtacaagcccacggtgcgcctcgccacccgcgacgacgtccccagggccgtacgcaccctcgccgccgcgttcgccgactaccccgccacgcgccacaccgtcgatccggaccgccacatcgagcgggtcaccgagctgcaagaactcttcctcacgcgcgtcgggctcgacatcggcaaggtgtgggtcgcggacgacggcgccgcggtggcggtctggaccacgccggagagcgtcgaagcgggggcggtgttcgccgagatcggcccgcgcatggccgagttgagcggttcccggctggccgcgcagcaacagatggaaggcctcctggcgccgcaccggcccaaggagcccgcgtggttcctggccaccgtcggcgtctcgcccgaccaccagggcaagggtctgggcagcgccgtcgtgctccccggagtggaggcggccgagcgcgccggggtgcccgccttcctggagacctccgcgccccgcaacctccccttctacgagcggctcggcttcaccgtcaccgccgacgtcgaggtgcccgaaggaccgcgcacctggtgcatgacccgcaagcccggtgcctga

SEQ ID NO: 21753 - DNA, 1878 bp, Artificial Sequence
  Synthetic Polynucleotide
atggccttaccagtgaccgccttgctcctgccgctggccttgctgctccacgccgccaggccggacatccagatgacacagagccctagcagcctgtctgccagcgtgggagacagagtgaccatcacctgtagagccagccaggacatcagcaactacctgaactggtatcagcagaagcccggcaaggcccctaagctgctgatctactacaccagcagactgcacagcggcgtgcccagcagattttctggctctggcagcggcaccgacttcaccctgacaatatctagcctccagcctgaggacttcgccacctactattgccagcagggcaacaccctgccttggacatttggacagggcaccaaggtggaaatcaagagactcgagagccagcctcacaccaagcccagcgtgttcgtgatgaagaacggcaccaacgtggcctgcctcgtgaaagagttctaccccaaggacatcaggatcaacctggtgtccagcaagaagatcaccgagttcgaccccgccatcgtgatctcccccagcggcaagtacaacgccgtgaagctggggaagtacgaggacagcaacagcgtgacctgctccgtgcagcacgacaacaagaccgtgcacagcaccgactttgaagtgaaaaccgactccaccgaccacgtgaagcccaaagagacagagaacaccaagcagcccagcaagagctgccacaagcccaaggccatcgtgcacaccgagaaagtgaacatgatgagcctgaccgtgctgggcctgcggatgctgttcgccaaaaccgtggccgtgaacttcctgctgaccgccaagctgttcttcctcagggccaagcgatctggatctggagcaacaaacttctcactactcaaacaagcaggtgacgtggaggagaatcccgggcctactagtatggactggatttggcgcatccttttccttgtcggcgctgctaccggcgcgcattccttcgaagaagtgcagctggttgaatcaggtggcggcctggttcaacctggcggatctctgagactgagctgtgccgccagcggctacaccttcagcgactactttatgagctgggtccgacaggcccctggcaaaggacttgaatgggtcgccaccatcagcaatggcggcacctacacttactaccccgacagcgtgaagggcagattcaccatctccagagacaacagcaagaacaccctgtacctccagatgaactccctgagagccgaggacaccgccgtgtactactgcgccagattcgacggctacatcttcgactattggggccagggcaccctggtcacagtctcttctacgcgtgacaagcagctggacgccgacgtgtcccccaagcctaccatcttcctgccctctatcgccgagacaaagctccagaaggccggcacctacctgtgcctgctggaaaagttcttcccagatgtgattaagatccactggcaggaaaagaagtccaacaccatcctgggcagccaggaaggcaacaccatgaagaccaacgacacctacatgaagttcagctggctgaccgtgcccgagaagtccctggacaaagaacacagatgcatcgtgcggcacgaaaacaacaagaacggcgtggaccaggaaatcatcttcccacccatcaagaccgatgtgattacaatggaccccaaggacaactgctccaaggacgccaacgataccctgctgctccagctgaccaacaccagcgcctactacatgtacttgttgctgctgctgaagtccgtggtgtacttcgccatcatcacatgctgcctgctgcggagaaccgccttctgctgcaacggcgagaagtct

SEQ ID NO: 21754 - DNA, 2712 bp, Artificial Sequence
  Synthetic Polynucleotide
atggccttaccagtgaccgccttgctcctgccgctggccttgctgctccacgccgccaggccgctcgaggggaaaccaattcccaaccctcttctgggactggattcaaccggcagcggcgacaagcagctggacgccgacgtgtcccccaagcctaccatcttcctgccctctatcgccgagacaaagctccagaaggccggcacctacctgtgcctgctggaaaagttcttcccagatgtgattaagatccactggcaggaaaagaagtccaacaccatcctgggcagccaggaaggcaacaccatgaagaccaacgacacctacatgaagttcagctggctgaccgtgcccgagaagtccctggacaaagaacacagatgcatcgtgcggcacgaaaacaacaagaacggcgtggaccaggaaatcatcttcccacccatcaagaccgatgtgattacaatggaccccaaggacaactgctccaaggacgccaacgataccctgctgctccagctgaccaacaccagcgcctactacatgtacttgttgctgctgctgaagtccgtggtgtacttcgccatcatcacatgctgcctgctgcggagaaccgccttctgctgcaacggcgagaagtctagggccaagcgatctggatctggagcaacaaacttctcactactcaaacaagcaggtgacgtggaggagaatcccgggcctactagcatggccttaccagtgaccgccttgctcctgccgctggccttgctgctccacgccgccaggccggacatccagatgacacagagccctagcagcctgtctgccagcgtgggagacagagtgaccatcacctgtagagccagccaggacatcagcaactacctgaactggtatcagcagaagcccggcaaggcccctaagctgctgatctactacaccagcagactgcacagcggcgtgcccagcagattttctggctctggcagcggcaccgacttcaccctgacaatatctagcctccagcctgaggacttcgccacctactattgccagcagggcaacaccctgccttggacatttggacagggcaccaaggtggaaatcaagagaggcggaggcggaagtggaggcggaggatctggcggcggaggctctgaagtgcagctggttgaatcaggtggcggcctggttcaacctggcggatctctgagactgagctgtgccgccagcggctacaccttcagcgactactttatgagctgggtccgacaggcccctggcaaaggacttgaatgggtcgccaccatcagcaatggcggcacctacacttactaccccgacagcgtgaagggcagattcaccatctccagagacaacagcaagaacaccctgtacctccagatgaactccctgagagccgaggacaccgccgtgtactactgcgccagattcgacggctacatcttcgactattggggccagggcaccctggtcacagtctcttctacgcgtgagcagaaactgatctcggaagaggatgggagcggcagccagcctcacaccaagcccagcgtgttcgtgatgaagaacggcaccaacgtggcctgcctcgtgaaagagttctaccccaaggacatcaggatcaacctggtgtccagcaagaagatcaccgagttcgaccccgccatcgtgatctcccccagcggcaagtacaacgccgtgaagctggggaagtacgaggacagcaacagcgtgacctgctccgtgcagcacgacaacaagaccgtgcacagcaccgactttgaagtgaaaaccgactccaccgaccacgtgaagcccaaagagacagagaacaccaagcagcccagcaagagctgccacaagcccaaggccatcgtgcacaccgagaaagtgaacatgatgagcctgaccgtgctgggcctgcggatgctgttcgccaaaaccgtggccgtgaacttcctgctgaccgccaagctgttcttcctccgcgccaagagaagcggatctggcgtgaagcagaccctgaatttcgacctgctgaagctggctggcgacgtggaatccaacccaggcccttctagaggccatatgaccgagtacaagcccacggtgcgcctcgccacccgcgacgacgtccccagggccgtacgcaccctcgccgccgcgttcgccgactaccccgccacgcgccacaccgtcgatccggaccgccacatcgagcgggtcaccgagctgcaagaactcttcctcacgcgcgtcgggctcgacatcggcaaggtgtgggtcgcggacgacggcgccgcggtggcggtctggaccacgccggagagcgtcgaagcgggggcggtgttcgccgagatcggcccgcgcatggccgagttgagcggttcccggctggccgcgcagcaacagatggaaggcctcctggcgccgcaccggcccaaggagcccgcgtggttcctggccaccgtcggcgtctcgcccgaccaccagggcaagggtctgggcagcgccgtcgtgctccccggagtggaggcggccgagcgcgccggggtgcccgccttcctggagacctccgcgccccgcaacctccccttctacgagcggctcggcttcaccgtcaccgccgacgtcgaggtgcccgaaggaccgcgcacctggtgcatgacccgcaagcccggtgcctga

SEQ ID NO: 21755 - DNA, 3087 bp, Artificial Sequence
  Synthetic Polynucleotide
atggccttaccagtgaccgccttgctcctgccgctggccttgctgctccacgccgccaggccggacatccagatgacacagagccctagcagcctgtctgccagcgtgggagacagagtgaccatcacctgtagagccagccaggacatcagcaactacctgaactggtatcagcagaagcccggcaaggcccctaagctgctgatctactacaccagcagactgcacagcggcgtgcccagcagattttctggctctggcagcggcaccgacttcaccctgacaatatctagcctccagcctgaggacttcgccacctactattgccagcagggcaacaccctgccttggacatttggacagggcaccaaggtggaaatcaagagaggacagcctaaggccaatcctaccgtgacactgttccctccaagcagcgaagaactccaggccaacaaggccacacttgtgtgcctgatctccgacttctaccctggggctgtgacagtggcttggaaggccgatggatctcctgtgaaagccggcgtggaaaccaccaagccatccaagcagagcaacaacaaatacgccgccagctcctacctgagcctgacacctgagcagtggaagtcccacagatcctacagctgccaagtgacccacgaaggcagcaccgtggaaaagacagtggcccctacagagtgcagcggatcccagagcttcggcctgctggaccccaagctgtgctacctgctggatggcatcctgttcatctacggcgtgatcctgaccgccctgttcctgagagtgaagttcagcagaagcgccgacgcccctgcctaccagcagggacagaaccaactgtacaacgagctgaacctgggcagacgggaagagtacgacgtgctggacaagcggagaggcagggaccctgagatgggcggaaagccccagcggagaaagaacccccaggaaggactgtataacgaactccagaaagacaagatggccgaagcctacagcgagatcggcatgaagggcgagcggagaagaggcaagggccacgatggcctgtaccagggcctgagcaccgccaccaaggacacctatgacgccctgcacatgcaggccctgcctccaagaagggccaagcgatctggatctggagcaacaaacttctcactactcaaacaagcaggtgacgtggaggagaatcccgggcctactagtatggactggatttggcgcatccttttccttgtcggcgctgctaccggcgcgcattccttcgaagaagtgcagctggttgaatcaggtggcggcctggttcaacctggcggatctctgagactgagctgtgccgccagcggctacaccttcagcgactactttatgagctgggtccgacaggcccctggcaaaggacttgaatgggtcgccaccatcagcaatggcggcacctacacttactaccccgacagcgtgaagggcagattcaccatctccagagacaacagcaagaacaccctgtacctccagatgaactccctgagagccgaggacaccgccgtgtactactgcgccagattcgacggctacatcttcgactattggggccagggcaccctggtcacagtctcttctgcctctacaaagggaccctccgtgtttcctctggctcccagcagcaagtctacaagcggaggaacagccgctctgggctgcctggtcaaggattactttcccgagcctgtgaccgtgtcctggaatagcggagcactgacaagcggcgtgcacacctttccagccgtgctgcaaagcagcggcctgtactctctgagcagcgtggtcacagtgcctagctctagcctgggcacccagacctacatctgcaatgtgaaccacaagcctagcaacaccaaggtggacaagagagtggaacccaagagctgtggtacccagagttttgggttgttggaccctaaattgtgctatctgttggacggaatcctgttcatttacggagtgatcctgaccgcattgttcctgcgggttaagttttccagatccgcagacgcacccgcttaccaacaagggcagaaccaactctacaatgaacttaatttggggcggagggaagagtacgacgttctggacaaaaggaggggacgagatcccgagatgggcggaaagcctcagcgaaggaagaatccgcaagaggggctttataacgaactccagaaagataaaatggcagaagcctatagtgagattgggatgaagggagaaaggaggaggggtaaaggtcacgatgggttgtaccaaggattgagcacagccactaaagatacctatgatgcgctccacatgcaggccctgccgccaagacgcgccaagagaagcggatctggcgtgaagcagaccctgaatttcgacctgctgaagctggctggcgacgtggaatccaacccaggcccttctagaggccatatgaccgagtacaagcccacggtgcgcctcgccacccgcgacgacgtccccagggccgtacgcaccctcgccgccgcgttcgccgactaccccgccacgcgccacaccgtcgatccggaccgccacatcgagcgggtcaccgagctgcaagaactcttcctcacgcgcgtcgggctcgacatcggcaaggtgtgggtcgcggacgacggcgccgcggtggcggtctggaccacgccggagagcgtcgaagcgggggcggtgttcgccgagatcggcccgcgcatggccgagttgagcggttcccggctggccgcgcagcaacagatggaaggcctcctggcgccgcaccggcccaaggagcccgcgtggttcctggccaccgtcggcgtctcgcccgaccaccagggcaagggtctgggcagcgccgtcgtgctccccggagtggaggcggccgagcgcgccggggtgcccgccttcctggagacctccgcgccccgcaacctccccttctacgagcggctcggcttcaccgtcaccgccgacgtcgaggtgcccgaaggaccgcgcacctggtgcatgacccgcaagcccggtgcctga

SEQ ID NO: 21756 - DNA, 1932 bp, Artificial Sequence
  Synthetic Polynucleotide
atggccttaccagtgaccgccttgctcctgccgctggccttgctgctccacgccgccaggccggacatccagatgacacagagccctagcagcctgtctgccagcgtgggagacagagtgaccatcacctgtagagccagccaggacatcagcaactacctgaactggtatcagcagaagcccggcaaggcccctaagctgctgatctactacaccagcagactgcacagcggcgtgcccagcagattttctggctctggcagcggcaccgacttcaccctgacaatatctagcctccagcctgaggacttcgccacctactattgccagcagggcaacaccctgccttggacatttggacagggcaccaaggtggaaatcaagagactcgagggacagcctaaggccaatcctaccgtgacactgttccctccaagcagcgaagaactccaggccaacaaggccacacttgtgtgcctgatctccgacttctaccctggggctgtgacagtggcttggaaggccgatggatctcctgtgaaagccggcgtggaaaccaccaagccatccaagcagagcaacaacaaatacgccgccagctcctacctgagcctgacacctgagcagtggaagtcccacagatcctacagctgccaagtgacccacgaaggcagcaccgtggaaaagacagtggcccctacagagtgcagccccatcaagaccgatgtgattacaatggaccccaaggacaactgctccaaggacgccaacgataccctgctgctccagctgaccaacaccagcgcctactacatgtacttgttgctgctgctgaagtccgtggtgtacttcgccatcatcacatgctgcctgctgcggagaaccgccttctgctgcaacggcgagaagtctagggccaagcgatctggatctggagcaacaaacttctcactactcaaacaagcaggtgacgtggaggagaatcccgggcctactagtatggactggatttggcgcatccttttccttgtcggcgctgctaccggcgcgcattccttcgaagaagtgcagctggttgaatcaggtggcggcctggttcaacctggcggatctctgagactgagctgtgccgccagcggctacaccttcagcgactactttatgagctgggtccgacaggcccctggcaaaggacttgaatgggtcgccaccatcagcaatggcggcacctacacttactaccccgacagcgtgaagggcagattcaccatctccagagacaacagcaagaacaccctgtacctccagatgaactccctgagagccgaggacaccgccgtgtactactgcgccagattcgacggctacatcttcgactattggggccagggcaccctggtcacagtctcttctacgcgtgcctctacaaagggaccctccgtgtttcctctggctcccagcagcaagtctacaagcggaggaacagccgctctgggctgcctggtcaaggattactttcccgagcctgtgaccgtgtcctggaatagcggagcactgacaagcggcgtgcacacctttccagccgtgctgcaaagcagcggcctgtactctctgagcagcgtggtcacagtgcctagctctagcctgggcacccagacctacatctgcaatgtgaaccacaagcctagcaacaccaaggtggacaagagagtggaacccaagagctgtgaagtgaaaaccgactccaccgaccacgtgaagcccaaagagacagagaacaccaagcagcccagcaagagctgccacaagcccaaggccatcgtgcacaccgagaaagtgaacatgatgagcctgaccgtgctgggcctgcggatgctgttcgccaaaaccgtggccgtgaacttcctgctgaccgccaagctgttcttcctc

SEQ ID NO: 21757 - DNA, 1866 bp, Artificial Sequence
  Synthetic Polynucleotide
atggccttaccagtgaccgccttgctcctgccgctggccttgctgctccacgccgccaggccggacatccagatgacacagagccctagcagcctgtctgccagcgtgggagacagagtgaccatcacctgtagagccagccaggacatcagcaactacctgaactggtatcagcagaagcccggcaaggcccctaagctgctgatctactacaccagcagactgcacagcggcgtgcccagcagattttctggctctggcagcggcaccgacttcaccctgacaatatctagcctccagcctgaggacttcgccacctactattgccagcagggcaacaccctgccttggacatttggacagggcaccaaggtggaaatcaagagactcgagggacagcctaaggccaatcctaccgtgacactgttccctccaagcagcgaagaactccaggccaacaaggccacacttgtgtgcctgatctccgacttctaccctggggctgtgacagtggcttggaaggccgatggatctcctgtgaaagccggcgtggaaaccaccaagccatccaagcagagcaacaacaaatacgccgccagctcctacctgagcctgacacctgagcagtggaagtcccacagatcctacagctgccaagtgacccacgaaggcagcaccgtggaaaagacagtggcccctacagagtgcagcggcagagccgattgcggctttaccagcgagagctaccagcagggcgtgctgagcgccaccatcctgtacgagatcctgctgggcaaggccaccctgtacgccgtgctggtgtctgccctggtgctgatggctatggtcaagcggaaggacagccggggaagggccaagcgatctggatctggagcaacaaacttctcactactcaaacaagcaggtgacgtggaggagaatcccgggcctactagtatggactggatttggcgcatccttttccttgtcggcgctgctaccggcgcgcattccttcgaagaagtgcagctggttgaatcaggtggcggcctggttcaacctggcggatctctgagactgagctgtgccgccagcggctacaccttcagcgactactttatgagctgggtccgacaggcccctggcaaaggacttgaatgggtcgccaccatcagcaatggcggcacctacacttactaccccgacagcgtgaagggcagattcaccatctccagagacaacagcaagaacaccctgtacctccagatgaactccctgagagccgaggacaccgccgtgtactactgcgccagattcgacggctacatcttcgactattggggccagggcaccctggtcacagtctcttctacgcgtgcctctacaaagggaccctccgtgtttcctctggctcccagcagcaagtctacaagcggaggaacagccgctctgggctgcctggtcaaggattactttcccgagcctgtgaccgtgtcctggaatagcggagcactgacaagcggcgtgcacacctttccagccgtgctgcaaagcagcggcctgtactctctgagcagcgtggtcacagtgcctagctctagcctgggcacccagacctacatctgcaatgtgaaccacaagcctagcaacaccaaggtggacaagagagtggaacccaagagctgtatccccgaggacacattcttcccaagccccgagagcagctgcgacgtgaagctggtggaaaagagcttcgagacagacaccaacctgaacttccagaacctgagcgtgatcggcttcagaatcctgctgctgaaagtggccggctttaacctgctgatgaccctgcggctgtggtccagc

SEQ ID NO: 21758 - DNA, 1344 bp, Artificial Sequence
  Synthetic Polynucleotide
atggccttaccagtgaccgccttgctcctgccgctggccttgctgctccacgccgccaggccggacatccagatgacacagagccctagcagcctgtctgccagcgtgggagacagagtgaccatcacctgtagagccagccaggacatcagcaactacctgaactggtatcagcagaagcccggcaaggcccctaagctgctgatctactacaccagcagactgcacagcggcgtgcccagcagattttctggctctggcagcggcaccgacttcaccctgacaatatctagcctccagcctgaggacttcgccacctactattgccagcagggcaacaccctgccttggacatttggacagggcaccaaggtggaaatcaagagaggcggaggcggaagtggaggcggaggatctggcggcggaggctctgaagtgcagctggttgaatcaggtggcggcctggttcaacctggcggatctctgagactgagctgtgccgccagcggctacaccttcagcgactactttatgagctgggtccgacaggcccctggcaaaggacttgaatgggtcgccaccatcagcaatggcggcacctacacttactaccccgacagcgtgaagggcagattcaccatctccagagacaacagcaagaacaccctgtacctccagatgaactccctgagagccgaggacaccgccgtgtactactgcgccagattcgacggctacatcttcgactattggggccagggcaccctggtcacagtctcttctacgcgtgacggtaacgaggagatgggaggaatcactcaaaccccttacaaagtctcaatttcaggaacaactgttatccttacatgtccccagtatcctggcagcgagatcctttggcagcataacgacaagaatatagggggagatgaagacgataagaatatcggatctgacgaggatcacttgagcctgaaagagttctccgagcttgaacaaagcggatattatgtgtgctatccgcgcgggtcaaagccggaagacgctaacttttacctttatctccgagccagagtgtgcgaaaattgcatggaaatggacgttatgtccgttgctacaatagttatcgtagatatatgcatcacgggtggactgcttctgctggtttattattggtccaagaatagaaaggccaaagctaaacccgtgaccagaggcgctggcgcaggcggaaggcaaaggggacaaaacaaagaacggccaccaccagtgccaaatccagattatgagcctattcggaaaggacagagggacctgtactctggcctgaatcagagaagaatc

SEQ ID NO: 21759 - DNA, 1239 bp, Artificial Sequence
  Synthetic Polynucleotide
atggccttaccagtgaccgccttgctcctgccgctggccttgctgctccacgccgccaggccggacatccagatgacacagagccctagcagcctgtctgccagcgtgggagacagagtgaccatcacctgtagagccagccaggacatcagcaactacctgaactggtatcagcagaagcccggcaaggcccctaagctgctgatctactacaccagcagactgcacagcggcgtgcccagcagattttctggctctggcagcggcaccgacttcaccctgacaatatctagcctccagcctgaggacttcgccacctactattgccagcagggcaacaccctgccttggacatttggacagggcaccaaggtggaaatcaagagaggcggaggcggaagtggaggcggaggatctggcggcggaggctctgaagtgcagctggttgaatcaggtggcggcctggttcaacctggcggatctctgagactgagctgtgccgccagcggctacaccttcagcgactactttatgagctgggtccgacaggcccctggcaaaggacttgaatgggtcgccaccatcagcaatggcggcacctacacttactaccccgacagcgtgaagggcagattcaccatctccagagacaacagcaagaacaccctgtacctccagatgaactccctgagagccgaggacaccgccgtgtactactgcgccagattcgacggctacatcttcgactattggggccagggcaccctggtcacagtctcttctacgcgtttcaagatccccatcgaggaactggaagatcgggtgttcgtgaactgcaacacctctatcacctgggtggaaggcaccgtgggaacactgctgagcgacatcaccagactggacctcggcaagcggattctggaccctcggggcatctacagatgcaacggcaccgacatctacaaggacaaagaaagcaccgtgcaggtccactacagaatgtgccagtcctgcgtggaactggaccctgctacagtggccggcatcatcgtgaccgatgtgatcgctactctgctgctggctctgggagtgttctgcttcgccggacacgaaacaggcagactgtctggcgctgccgatacacaggccctgctgagaaacgaccaagtgtatcagcccctgcgcgacagagatgatgcccagtattctcacctcggcggcaactgggctagaaacaag

SEQ ID NO: 21760 - DNA, 1269 bp, Artificial Sequence
  Synthetic Polynucleotide
atggccttaccagtgaccgccttgctcctgccgctggccttgctgctccacgccgccaggccggacatccagatgacacagagccctagcagcctgtctgccagcgtgggagacagagtgaccatcacctgtagagccagccaggacatcagcaactacctgaactggtatcagcagaagcccggcaaggcccctaagctgctgatctactacaccagcagactgcacagcggcgtgcccagcagattttctggctctggcagcggcaccgacttcaccctgacaatatctagcctccagcctgaggacttcgccacctactattgccagcagggcaacaccctgccttggacatttggacagggcaccaaggtggaaatcaagagaggcggaggcggaagtggaggcggaggatctggcggcggaggctctgaagtgcagctggttgaatcaggtggcggcctggttcaacctggcggatctctgagactgagctgtgccgccagcggctacaccttcagcgactactttatgagctgggtccgacaggcccctggcaaaggacttgaatgggtcgccaccatcagcaatggcggcacctacacttactaccccgacagcgtgaagggcagattcaccatctccagagacaacagcaagaacaccctgtacctccagatgaactccctgagagccgaggacaccgccgtgtactactgcgccagattcgacggctacatcttcgactattggggccagggcaccctggtcacagtctcttctacgcgtcagagcatcaagggcaaccacctggtcaaggtgtacgactaccaagaggacggcagcgtgctgctgacatgtgatgccgaggccaagaacatcacctggtttaaggacggcaagatgatcggcttcctgaccgaggacaagaagaagtggaacctgggcagcaacgctaaggaccccagaggcatgtatcagtgcaagggcagccagaacaagagcaagcccctccaggtgtactaccggatgtgccagaactgcatcgagctgaacgccgctaccatcagcggctttctgttcgccgagatcgtgtccatcttcgtgctggccgtgggcgtgtactttatcgctggacaggatggcgtgcggcagagcagagcttccgataagcaaaccctgctgcctaacgaccagctgtaccagcctctgaaggacagagaggacgaccagtacagccacctccagggcaatcagctgagaagaaac

SEQ ID NO: 21761 - DNA, 2259 bp, Artificial Sequence
  Synthetic Polynucleotide
atggccttaccagtgaccgccttgctcctgccgctggccttgctgctccacgccgccaggccggaagtgcagctggttgaatctggcggaggactggttcagcctggcggatctctgagactgtcttgtgccgccagcggcttcagcttcagcgacttttggatgagctgggtccgacaggcccctggcaaaggacttgaatgggtcgccacaatcagccaggccggcagcgagaaggactacgtggactctgtgaagggcagattcaccatcagccgggacaacgccaagaagtccctgtacctccagatgaacagcctgagagccgaggacaccgccgtgtactattgtgcctctggcgtgtacagcttcgactacagaggccagggcaccctggtcacagtctcttctggtaccggcggaggcggatctggcggcggaggtagcggtggcggaggatctgaattcgacatccagatgacacagagccctagcagcctgtctgccagcgtgggagacagagtgaccatcacctgtagagccagccaggacatcagcaactacctgaactggtatcagcagaagcccggcaaggcccctaagctgctgatctactacaccagcagactgcacagcggcgtgcccagcagattttctggctctggcagcggcaccgacttcaccctgacaatatctagcctccagcctgaggacttcgccacctactattgccagcagggcaacaccctgccttggacatttggacagggcaccaaggtggaaatcaagagactcgaggacctgaagaacgtgttcccacctgaggtggccgtgttcgagcctagcgaggccgagatcagccacacccagaaagccaccctcgtgtgcctggctaccggcttctaccccgaccatgtggaactgtcttggtgggtcaacggcaaagaggtgcacagcggcgtgtgtaccgacccccagccactgaaagaacagcccgccctgaacgacagccggtactgcctgagcagcagactgagagtgtccgccaccttctggcagaacccccggaaccacttcagatgccaggtgcagttctacggcctgagcgagaacgacgagtggacccaggacagagccaagcccgtgacccagatcgtgtctgccgaagcctggggcagagccgattgcggctttaccagcgagagctaccagcagggcgtgctgagcgccaccatcctgtacgagatcctgctgggcaaggccaccctgtacgccgtgctggtgtctgccctggtgctgatggctatggtcaagcggaaggacagccggggaagggccaagcgatctggatctggagcaacaaacttctcactactcaaacaagcaggtgacgtggaggagaatcccgggcctactagtatggactggatttggcgcatccttttccttgtcggcgctgctaccggcgcgcattccttcgaagaagtgcagctggttgaatcaggtggcggcctggttcaacctggcggatctctgagactgagctgtgccgccagcggctacaccttcagcgactactttatgagctgggtccgacaggcccctggcaaaggacttgaatgggtcgccaccatcagcaatggcggcacctacacttactaccccgacagcgtgaagggcagattcaccatctccagagacaacagcaagaacaccctgtacctccagatgaactccctgagagccgaggacaccgccgtgtactactgcgccagattcgacggctacatcttcgactattggggccagggcaccctggtcacagtctcttctacgcgtatccagaaccctgatcctgccgtgtaccagctgcgggatagcaagagcagcgacaagagcgtgtgtctgttcaccgacttcgacagccagaccaacgtgtcccagagcaaggactccgacgtgtacatcaccgataagtgcgtgctggacatgcggagcatggacttcaagagcaactccgccgtggcctggtccaacaagtccgatttcgcctgcgccaacgccttcaacaacagcattatccccgaggacacattcttcccaagccccgagagcagctgcgacgtgaagctggtggaaaagagcttcgagacagacaccaacctgaacttccagaacctgagcgtgatcggcttcagaatcctgctgctgaaagtggccggctttaacctgctgatgaccctgcggctgtggtccagc

SEQ ID NO: 21762 - DNA, 2337 bp, Artificial Sequence
  Synthetic Polynucleotide
atggccttaccagtgaccgccttgctcctgccgctggccttgctgctccacgccgccaggccggaagtgcagctggttgaatctggcggaggactggttcagcctggcggatctctgagactgtcttgtgccgccagcggcttcagcttcagcgacttttggatgagctgggtccgacaggcccctggcaaaggacttgaatgggtcgccacaatcagccaggccggcagcgagaaggactacgtggactctgtgaagggcagattcaccatcagccgggacaacgccaagaagtccctgtacctccagatgaacagcctgagagccgaggacaccgccgtgtactattgtgcctctggcgtgtacagcttcgactacagaggccagggcaccctggtcacagtctcttctggtaccggcggaggcggatctggcggcggaggtagcggtggcggaggatctgaattcgacatccagatgacacagagccctagcagcctgtctgccagcgtgggagacagagtgaccatcacctgtagagccagccaggacatcagcaactacctgaactggtatcagcagaagcccggcaaggcccctaagctgctgatctactacaccagcagactgcacagcggcgtgcccagcagattttctggctctggcagcggcaccgacttcaccctgacaatatctagcctccagcctgaggacttcgccacctactattgccagcagggcaacaccctgccttggacatttggacagggcaccaaggtggaaatcaagagactcgagggacagcctaaggccaatcctaccgtgacactgttccctccaagcagcgaagaactccaggccaacaaggccacacttgtgtgcctgatctccgacttctaccctggggctgtgacagtggcttggaaggccgatggatctcctgtgaaagccggcgtggaaaccaccaagccatccaagcagagcaacaacaaatacgccgccagctcctacctgagcctgacacctgagcagtggaagtcccacagatcctacagctgccaagtgacccacgaaggcagcaccgtggaaaagacagtggcccctacagagtgcagccccatcaagaccgatgtgattacaatggaccccaaggacaactgctccaaggacgccaacgataccctgctgctccagctgaccaacaccagcgcctactacatgtacttgttgctgctgctgaagtccgtggtgtacttcgccatcatcacatgctgcctgctgcggagaaccgccttctgctgcaacggcgagaagtctagggccaagcgatctggatctggagcaacaaacttctcactactcaaacaagcaggtgacgtggaggagaatcccgggcctactagtatggactggatttggcgcatccttttccttgtcggcgctgctaccggcgcgcattccttcgaagaagtgcagctggttgaatcaggtggcggcctggttcaacctggcggatctctgagactgagctgtgccgccagcggctacaccttcagcgactactttatgagctgggtccgacaggcccctggcaaaggacttgaatgggtcgccaccatcagcaatggcggcacctacacttactaccccgacagcgtgaagggcagattcaccatctccagagacaacagcaagaacaccctgtacctccagatgaactccctgagagccgaggacaccgccgtgtactactgcgccagattcgacggctacatcttcgactattggggccagggcaccctggtcacagtctcttctacgcgtgcctctacaaagggaccctccgtgtttcctctggctcccagcagcaagtctacaagcggaggaacagccgctctgggctgcctggtcaaggattactttcccgagcctgtgaccgtgtcctggaatagcggagcactgacaagcggcgtgcacacctttccagccgtgctgcaaagcagcggcctgtactctctgagcagcgtggtcacagtgcctagctctagcctgggcacccagacctacatctgcaatgtgaaccacaagcctagcaacaccaaggtggacaagagagtggaacccaagagctgtgaagtgaaaaccgactccaccgaccacgtgaagcccaaagagacagagaacaccaagcagcccagcaagagctgccacaagcccaaggccatcgtgcacaccgagaaagtgaacatgatgagcctgaccgtgctgggcctgcggatgctgttcgccaaaaccgtggccgtgaacttcctgctgaccgccaagctgttcttcctc

SEQ ID NO: 21763 - DNA, 2280 bp, Artificial Sequence
  Synthetic Polynucleotide
atggccttaccagtgaccgccttgctcctgccgctggccttgctgctccacgccgccaggccggaagtgcagctggttgaatctggcggaggactggttcagcctggcggatctctgagactgtcttgtgccgccagcggcttcagcttcagcgacttttggatgagctgggtccgacaggcccctggcaaaggacttgaatgggtcgccacaatcagccaggccggcagcgagaaggactacgtggactctgtgaagggcagattcaccatcagccgggacaacgccaagaagtccctgtacctccagatgaacagcctgagagccgaggacaccgccgtgtactattgtgcctctggcgtgtacagcttcgactacagaggccagggcaccctggtcacagtctcttctggtaccggcggaggcggatctggcggcggaggtagcggtggcggaggatctgaattcgacatccagatgacacagagccctagcagcctgtctgccagcgtgggagacagagtgaccatcacctgtagagccagccaggacatcagcaactacctgaactggtatcagcagaagcccggcaaggcccctaagctgctgatctactacaccagcagactgcacagcggcgtgcccagcagattttctggctctggcagcggcaccgacttcaccctgacaatatctagcctccagcctgaggacttcgccacctactattgccagcagggcaacaccctgccttggacatttggacagggcaccaaggtggaaatcaagagactcgagggacagcctaaggccaatcctaccgtgacactgttccctccaagcagcgaagaactccaggccaacaaggccacacttgtgtgcctgatctccgacttctaccctggggctgtgacagtggcttggaaggccgatggatctcctgtgaaagccggcgtggaaaccaccaagccatccaagcagagcaacaacaaatacgccgccagctcctacctgagcctgacacctgagcagtggaagtcccacagatcctacagctgccaagtgacccacgaaggcagcaccgtggaaaagacagtggcccctacagagtgcagcggcagagccgattgcggctttaccagcgagagctaccagcagggcgtgctgagcgccaccatcctgtacgagatcctgctgggcaaggccaccctgtacgccgtgctggtgtctgccctggtgctgatggctatggtcaagcggaaggacagccggggacgcgccaagagaagcggatctggcgtgaagcagaccctgaatttcgacctgctgaagctggctggcgacgtggaatccaacccaggccctactagtatggactggatttggcgcatccttttccttgtcggcgctgctaccggcgcgcattccttcgaagaagtgcagctggttgaatcaggtggcggcctggttcaacctggcggatctctgagactgagctgtgccgccagcggctacaccttcagcgactactttatgagctgggtccgacaggcccctggcaaaggacttgaatgggtcgccaccatcagcaatggcggcacctacacttactaccccgacagcgtgaagggcagattcaccatctccagagacaacagcaagaacaccctgtacctccagatgaactccctgagagccgaggacaccgccgtgtactactgcgccagattcgacggctacatcttcgactattggggccagggcaccctggtcacagtctcttctacgcgtgcctctacaaagggaccctccgtgtttcctctggctcccagcagcaagtctacaagcggaggaacagccgctctgggctgcctggtcaaggattactttcccgagcctgtgaccgtgtcctggaatagcggagcactgacaagcggcgtgcacacctttccagccgtgctgcaaagcagcggcctgtactctctgagcagcgtggtcacagtgcctagctctagcctgggcacccagacctacatctgcaatgtgaaccacaagcctagcaacaccaaggtggacaagagagtggaacccaagagctgtatccccgaggacacattcttcccaagccccgagagcagctgcgacgtgaagctggtggaaaagagcttcgagacagacaccaacctgaacttccagaacctgagcgtgatcggcttcagaatcctgctgctgaaagtggccggctttaacctgctgatgaccctgcggctgtggtccagc

SEQ ID NO: 21764 - DNA, 2682 bp, Artificial Sequence
  Synthetic Polynucleotide
atggccttaccagtgaccgccttgctcctgccgctggccttgctgctccacgccgccaggccggaagtgcagctggttgaatctggcggaggactggttcagcctggcggatctctgagactgtcttgtgccgccagcggcttcagcttcagcgacttttggatgagctgggtccgacaggcccctggcaaaggacttgaatgggtcgccacaatcagccaggccggcagcgagaaggactacgtggactctgtgaagggcagattcaccatcagccgggacaacgccaagaagtccctgtacctccagatgaacagcctgagagccgaggacaccgccgtgtactattgtgcctctggcgtgtacagcttcgactacagaggccagggcaccctggtcacagtctcttctggtaccggcggaggcggatctggcggcggaggtagcggtggcggaggatctgaattcgacatccagatgacacagagccctagcagcctgtctgccagcgtgggagacagagtgaccatcacctgtagagccagccaggacatcagcaactacctgaactggtatcagcagaagcccggcaaggcccctaagctgctgatctactacaccagcagactgcacagcggcgtgcccagcagattttctggctctggcagcggcaccgacttcaccctgacaatatctagcctccagcctgaggacttcgccacctactattgccagcagggcaacaccctgccttggacatttggacagggcaccaaggtggaaatcaagagactcgagatccagaaccctgatcctgccgtgtaccagctgcgggatagcaagagcagcgacaagagcgtgtgtctgttcaccgacttcgacagccagaccaacgtgtcccagagcaaggactccgacgtgtacatcaccgataagtgcgtgctggacatgcggagcatggacttcaagagcaactccgccgtggcctggtccaacaagtccgatttcgcctgcgccaacgccttcaacaacagcattatccccgaggacacattcttcccaagccccgagagcagctgcgacgtgaagctggtggaaaagagcttcgagacagacaccaacctgaacttccagaacctgagcgtgatcggcttcagaatcctgctgctgaaagtggccggctttaacctgctgatgaccctgcggctgtggtccagccgcgccaagagaagcggatctggcgtgaagcagaccctgaatttcgacctgctgaagctggctggcgacgtggaatccaacccaggccctactagtatggactggatttggcgcatccttttccttgtcggcgctgctaccggcgcgcattccgggccccagctccagctgcaagagtctggacctggcctggtcaagcctagcgagacactgagcctgacctgtaccgtgtccggcgatagcatcagcagcggcgattactactggggctggatcagacagcctcctggcaaaggactggaatggatcggccacatctactacagcggcgtgacctactacaaccccagcctgaagtccagagtgaccatcagcgtggacaccagccggaaccagttctccctgaagctgtctagcgtgacagccgccgataccgccgtgtactactgcaccagagaggacagcagcaactggcggagtagaggccagggaacactggtcacagttagctctggatccggcggaggcggaagtggaggcggaggatctggcggcggaggctctttcgaagaagtgcagctggttgaatcaggtggcggcctggttcaacctggcggatctctgagactgagctgtgccgccagcggctacaccttcagcgactactttatgagctgggtccgacaggcccctggcaaaggacttgaatgggtcgccaccatcagcaatggcggcacctacacttactaccccgacagcgtgaagggcagattcaccatctccagagacaacagcaagaacaccctgtacctccagatgaactccctgagagccgaggacaccgccgtgtactactgcgccagattcgacggctacatcttcgactattggggccagggcaccctggtcacagtctcttctacgcgtgaggacctgaagaacgtgttcccacctgaggtggccgtgttcgagcctagcgaggccgagatcagccacacccagaaagccaccctcgtgtgcctggctaccggcttctaccccgaccatgtggaactgtcttggtgggtcaacggcaaagaggtgcacagcggcgtgtgtaccgacccccagccactgaaagaacagcccgccctgaacgacagccggtactgcctgagcagcagactgagagtgtccgccaccttctggcagaacccccggaaccacttcagatgccaggtgcagttctacggcctgagcgagaacgacgagtggacccaggacagagccaagcccgtgacccagatcgtgtctgccgaagcctggggcagagccgattgcggctttaccagcgagagctaccagcagggcgtgctgagcgccaccatcctgtacgagatcctgctgggcaaggccaccctgtacgccgtgctggtgtctgccctggtgctgatggctatggtcaagcggaaggacagccgggga

SEQ ID NO: 21765 - DNA, 2748 bp, Artificial Sequence
  Synthetic Polynucleotide
atggccttaccagtgaccgccttgctcctgccgctggccttgctgctccacgccgccaggccggaagtgcagctggttgaatctggcggaggactggttcagcctggcggatctctgagactgtcttgtgccgccagcggcttcagcttcagcgacttttggatgagctgggtccgacaggcccctggcaaaggacttgaatgggtcgccacaatcagccaggccggcagcgagaaggactacgtggactctgtgaagggcagattcaccatcagccgggacaacgccaagaagtccctgtacctccagatgaacagcctgagagccgaggacaccgccgtgtactattgtgcctctggcgtgtacagcttcgactacagaggccagggcaccctggtcacagtctcttctggtaccggcggaggcggatctggcggcggaggtagcggtggcggaggatctgaattcgacatccagatgacacagagccctagcagcctgtctgccagcgtgggagacagagtgaccatcacctgtagagccagccaggacatcagcaactacctgaactggtatcagcagaagcccggcaaggcccctaagctgctgatctactacaccagcagactgcacagcggcgtgcccagcagattttctggctctggcagcggcaccgacttcaccctgacaatatctagcctccagcctgaggacttcgccacctactattgccagcagggcaacaccctgccttggacatttggacagggcaccaaggtggaaatcaagagactcgagggacagcctaaggccaatcctaccgtgacactgttccctccaagcagcgaagaactccaggccaacaaggccacacttgtgtgcctgatctccgacttctaccctggggctgtgacagtggcttggaaggccgatggatctcctgtgaaagccggcgtggaaaccaccaagccatccaagcagagcaacaacaaatacgccgccagctcctacctgagcctgacacctgagcagtggaagtcccacagatcctacagctgccaagtgacccacgaaggcagcaccgtggaaaagacagtggcccctacagagtgcagccccatcaagaccgatgtgattacaatggaccccaaggacaactgctccaaggacgccaacgataccctgctgctccagctgaccaacaccagcgcctactacatgtacttgttgctgctgctgaagtccgtggtgtacttcgccatcatcacatgctgcctgctgcggagaaccgccttctgctgcaacggcgagaagtctagggccaagcgatctggatctggagcaacaaacttctcactactcaaacaagcaggtgacgtggaggagaatcccgggcctactagtatggactggatttggcgcatccttttccttgtcggcgctgctaccggcgcgcattccgggccccagctccagctgcaagagtctggacctggcctggtcaagcctagcgagacactgagcctgacctgtaccgtgtccggcgatagcatcagcagcggcgattactactggggctggatcagacagcctcctggcaaaggactggaatggatcggccacatctactacagcggcgtgacctactacaaccccagcctgaagtccagagtgaccatcagcgtggacaccagccggaaccagttctccctgaagctgtctagcgtgacagccgccgataccgccgtgtactactgcaccagagaggacagcagcaactggcggagtagaggccagggaacactggtcacagttagctctggatccggcggaggcggaagtggaggcggaggatctggcggcggaggctctttcgaagaagtgcagctggttgaatcaggtggcggcctggttcaacctggcggatctctgagactgagctgtgccgccagcggctacaccttcagcgactactttatgagctgggtccgacaggcccctggcaaaggacttgaatgggtcgccaccatcagcaatggcggcacctacacttactaccccgacagcgtgaagggcagattcaccatctccagagacaacagcaagaacaccctgtacctccagatgaactccctgagagccgaggacaccgccgtgtactactgcgccagattcgacggctacatcttcgactattggggccagggcaccctggtcacagtctcttctacgcgtgcctctacaaagggaccctccgtgtttcctctggctcccagcagcaagtctacaagcggaggaacagccgctctgggctgcctggtcaaggattactttcccgagcctgtgaccgtgtcctggaatagcggagcactgacaagcggcgtgcacacctttccagccgtgctgcaaagcagcggcctgtactctctgagcagcgtggtcacagtgcctagctctagcctgggcacccagacctacatctgcaatgtgaaccacaagcctagcaacaccaaggtggacaagagagtggaacccaagagctgtgaagtgaaaaccgactccaccgaccacgtgaagcccaaagagacagagaacaccaagcagcccagcaagagctgccacaagcccaaggccatcgtgcacaccgagaaagtgaacatgatgagcctgaccgtgctgggcctgcggatgctgttcgccaaaaccgtggccgtgaacttcctgctgaccgccaagctgttcttcctc

SEQ ID NO: 21766 - DNA, 2691 bp, Artificial Sequence
  Synthetic Polynucleotide
atggccttaccagtgaccgccttgctcctgccgctggccttgctgctccacgccgccaggccggaagtgcagctggttgaatctggcggaggactggttcagcctggcggatctctgagactgtcttgtgccgccagcggcttcagcttcagcgacttttggatgagctgggtccgacaggcccctggcaaaggacttgaatgggtcgccacaatcagccaggccggcagcgagaaggactacgtggactctgtgaagggcagattcaccatcagccgggacaacgccaagaagtccctgtacctccagatgaacagcctgagagccgaggacaccgccgtgtactattgtgcctctggcgtgtacagcttcgactacagaggccagggcaccctggtcacagtctcttctggtaccggcggaggcggatctggcggcggaggtagcggtggcggaggatctgaattcgacatccagatgacacagagccctagcagcctgtctgccagcgtgggagacagagtgaccatcacctgtagagccagccaggacatcagcaactacctgaactggtatcagcagaagcccggcaaggcccctaagctgctgatctactacaccagcagactgcacagcggcgtgcccagcagattttctggctctggcagcggcaccgacttcaccctgacaatatctagcctccagcctgaggacttcgccacctactattgccagcagggcaacaccctgccttggacatttggacagggcaccaaggtggaaatcaagagactcgagggacagcctaaggccaatcctaccgtgacactgttccctccaagcagcgaagaactccaggccaacaaggccacacttgtgtgcctgatctccgacttctaccctggggctgtgacagtggcttggaaggccgatggatctcctgtgaaagccggcgtggaaaccaccaagccatccaagcagagcaacaacaaatacgccgccagctcctacctgagcctgacacctgagcagtggaagtcccacagatcctacagctgccaagtgacccacgaaggcagcaccgtggaaaagacagtggcccctacagagtgcagcggcagagccgattgcggctttaccagcgagagctaccagcagggcgtgctgagcgccaccatcctgtacgagatcctgctgggcaaggccaccctgtacgccgtgctggtgtctgccctggtgctgatggctatggtcaagcggaaggacagccggggacgcgccaagagaagcggatctggcgtgaagcagaccctgaatttcgacctgctgaagctggctggcgacgtggaatccaacccaggccctactagtatggactggatttggcgcatccttttccttgtcggcgctgctaccggcgcgcattccgggccccagctccagctgcaagagtctggacctggcctggtcaagcctagcgagacactgagcctgacctgtaccgtgtccggcgatagcatcagcagcggcgattactactggggctggatcagacagcctcctggcaaaggactggaatggatcggccacatctactacagcggcgtgacctactacaaccccagcctgaagtccagagtgaccatcagcgtggacaccagccggaaccagttctccctgaagctgtctagcgtgacagccgccgataccgccgtgtactactgcaccagagaggacagcagcaactggcggagtagaggccagggaacactggtcacagttagctctggatccggcggaggcggaagtggaggcggaggatctggcggcggaggctctttcgaagaagtgcagctggttgaatcaggtggcggcctggttcaacctggcggatctctgagactgagctgtgccgccagcggctacaccttcagcgactactttatgagctgggtccgacaggcccctggcaaaggacttgaatgggtcgccaccatcagcaatggcggcacctacacttactaccccgacagcgtgaagggcagattcaccatctccagagacaacagcaagaacaccctgtacctccagatgaactccctgagagccgaggacaccgccgtgtactactgcgccagattcgacggctacatcttcgactattggggccagggcaccctggtcacagtctcttctacgcgtgcctctacaaagggaccctccgtgtttcctctggctcccagcagcaagtctacaagcggaggaacagccgctctgggctgcctggtcaaggattactttcccgagcctgtgaccgtgtcctggaatagcggagcactgacaagcggcgtgcacacctttccagccgtgctgcaaagcagcggcctgtactctctgagcagcgtggtcacagtgcctagctctagcctgggcacccagacctacatctgcaatgtgaaccacaagcctagcaacaccaaggtggacaagagagtggaacccaagagctgtatccccgaggacacattcttcccaagccccgagagcagctgcgacgtgaagctggtggaaaagagcttcgagacagacaccaacctgaacttccagaacctgagcgtgatcggcttcagaatcctgctgctgaaagtggccggctttaacctgctgatgaccctgcggctgtggtccagc

SEQ ID NO: 21767 - DNA, 1446 bp, Artificial Sequence
  Synthetic Polynucleotide
atggccttaccagtgaccgccttgctcctgccgctggccttgctgctccacgccgccaggccggaagtgcaactggtggaatcaggcggcggactggtgcagcctggcggatctctgagactgagctgtgccgccagcggcttcgacttcagccggtactggatgagctgggtgcgccaggcccctggcaaaggactggaatggatcggcgagatcaaccccgacagcagcaccatcaactacacccccagcctgaaggacaagttcatcatcagccgggacaacgccaagaacagcctgtacctccagatgaactccctgcgggccgaggacaccgccgtgtactattgcgccagacccgacggcaactactggtacttcgacgtgtggggccagggaaccctcgtgaccgtgtcatctggcggaggcggaagtggaggcggaggatctggcggcggaggctctatcacatgcaaggccagccaggacgtgggaatcgccgtggcctggtatcagcagaaacccggcaaggtgcccaagctgctgatctactgggccagcaccagacacaccggcgtgcccgatagattttccggcagcggctccggcaccgacttcaccctgacaatcagctccctccagcccgaggacgtggcaacctactactgccagcagtacagcagctacccctacaccttcggccagggcaccaaggtggaaatcaagagaacgcgtgagcagaaactgatctcggaagaggatctggcgaagcccaccacgacgccagcgccgcgaccaccaacaccggcgcccaccatcgcgtcgcagcccctgtccctgcgcccagaggcgtgccggccagcggcggggggcgcagtgcacacgagggggctggacttcgcctgtgacatctacatctgggcgcccttggccgggacttgtggggtccttctcctgtcactggttatcaccctttactgcaaacggggcagaaagaaactcctgtatatattcaaacaaccatttatgagaccagtacaaactactcaagaggaagatggctgtagctgccgatttccagaagaagaagaaggaggatgtgaactgagagtgaagttcagcaggagcgcagacgcccccgcgtaccagcagggccagaaccagctctataacgagctgaatctaggacgaagagaggagtacgatgttttggacaagagacgtggccgggaccctgagatggggggaaagccgagaaggaagaaccctcaggaaggcctgtacaatgaactgcagaaagataagatggcggaggcctacagtgagattgggatgaaaggcgagcgccggaggggcaaggggcacgatggcctttaccagggtctcagtacagccaccaaggacacctacgacgcccttcacatgcaggccctgccccctcgctga

SEQ ID NO: 21768 - DNA, 2505 bp, Artificial Sequence
  Synthetic Polynucleotide
atggccttaccagtgaccgccttgctcctgccgctggccttgctgctccacgccgccaggccgatcacatgcaaggccagccaggacgtgggaatcgccgtggcctggtatcagcagaaacccggcaaggtgcccaagctgctgatctactgggccagcaccagacacaccggcgtgcccgatagattttccggcagcggctccggcaccgacttcaccctgacaatcagctccctccagcccgaggacgtggcaacctactactgccagcagtacagcagctacccctacaccttcggccagggcaccaaggtggaaatcaagagactcgagatccagaaccctgatcctgccgtgtaccagctgcgggatagcaagagcagcgacaagagcgtgtgtctgttcaccgacttcgacagccagaccaacgtgtcccagagcaaggactccgacgtgtacatcaccgataagtgcgtgctggacatgcggagcatggacttcaagagcaactccgccgtggcctggtccaacaagtccgatttcgcctgcgccaacgccttcaacaacagcattatccccgaggacacattcttcccaagcagcgacgtgccctgcgacgtgaagctggtggaaaagagcttcgagacagacaccaacctgaacttccagaacctgagcgtgatcggcttcagaatcctgctgctgaaagtggccggctttaacctgctgatgaccctgcggctgtggtccagccgcgccaagagaagcggatctggcgtgaagcagaccctgaatttcgacctgctgaagctggctggcgacgtggaatccaacccaggccctactagtatggactggatttggcgcatccttttccttgtcggcgctgctaccggcgcgcattccttcgaagaagtgcaactggtggaatcaggcggcggactggtgcagcctggcggatctctgagactgagctgtgccgccagcggcttcgacttcagccggtactggatgagctgggtgcgccaggcccctggcaaaggactggaatggatcggcgagatcaaccccgacagcagcaccatcaactacacccccagcctgaaggacaagttcatcatcagccgggacaacgccaagaacagcctgtacctccagatgaactccctgcgggccgaggacaccgccgtgtactattgcgccagacccgacggcaactactggtacttcgacgtgtggggccagggaaccctcgtgaccgtgtcatctacgcgtgaggacctgaagaacgtgttcccacctgaggtggccgtgttcgagcctagcaaggccgagatcgcccacacccagaaagccaccctcgtgtgcctggctaccggcttctaccccgaccatgtggaactgtcttggtgggtcaacggcaaagaggtgcacagcggcgtgtgtaccgacccccagccactgaaagaacagcccgccctgaacgacagccggtactgcctgagcagcagactgagagtgtccgccaccttctggcagaacccccggaaccacttcagatgccaggtgcagttctacggcctgagcgagaacgacgagtggacccaggacagagccaagcccgtgacccagatcgtgtctgccgaagcctggggcagagccgattgcggcatcaccagcgccagctaccaccagggcgtgctgagcgccaccatcctgtacgagatcctgctgggcaaggccaccctgtacgccgtgctggtgtctgccctggtgctgatggctatggtcaagcggaaggacagccggggaagggccaagcgatctggatctggagcaacaaacttctcactactcaaacaagcaggtgacgtggaggagaatcccgggccttctagaggccatatgaccgagtacaagcccacggtgcgcctcgccacccgcgacgacgtccccagggccgtacgcaccctcgccgccgcgttcgccgactaccccgccacgcgccacaccgtcgatccggaccgccacatcgagcgggtcaccgagctgcaagaactcttcctcacgcgcgtcgggctcgacatcggcaaggtgtgggtcgcggacgacggcgccgcggtggcggtctggaccacgccggagagcgtcgaagcgggggcggtgttcgccgagatcggcccgcgcatggccgagttgagcggttcccggctggccgcgcagcaacagatggaaggcctcctggcgccgcaccggcccaaggagcccgcgtggttcctggccaccgtcggcgtctcgcccgaccaccagggcaagggtctgggcagcgccgtcgtgctccccggagtggaggcggccgagcgcgccggggtgcccgccttcctggagacctccgcgccccgcaacctccccttctacgagcggctcggcttcaccgtcaccgccgacgtcgaggtgcccgaaggaccgcgcacctggtgcatgacccgcaagcccggtgcctga

SEQ ID NO: 21769 - DNA, 2502 bp, Artificial Sequence
  Synthetic Polynucleotide
atggccttaccagtgaccgccttgctcctgccgctggccttgctgctccacgccgccaggccgatcacatgcaaggccagccaggacgtgggaatcgccgtggcctggtatcagcagaaacccggcaaggtgcccaagctgctgatctactgggccagcaccagacacaccggcgtgcccgatagattttccggcagcggctccggcaccgacttcaccctgacaatcagctccctccagcccgaggacgtggcaacctactactgccagcagtacagcagctacccctacaccttcggccagggcaccaaggtggaaatcaagagactcgaggacctgaagaacgtgttcccacctgaggtggccgtgttcgagcctagcaaggccgagatcgcccacacccagaaagccaccctcgtgtgcctggctaccggcttctaccccgaccatgtggaactgtcttggtgggtcaacggcaaagaggtgcacagcggcgtgtgtaccgacccccagccactgaaagaacagcccgccctgaacgacagccggtactgcctgagcagcagactgagagtgtccgccaccttctggcagaacccccggaaccacttcagatgccaggtgcagttctacggcctgagcgagaacgacgagtggacccaggacagagccaagcccgtgacccagatcgtgtctgccgaagcctggggcagagccgattgcggcatcaccagcgccagctaccaccagggcgtgctgagcgccaccatcctgtacgagatcctgctgggcaaggccaccctgtacgccgtgctggtgtctgccctggtgctgatggctatggtcaagcggaaggacagccggggaagggccaagcgatctggatctggagcaacaaacttctcactactcaaacaagcaggtgacgtggaggagaatcccgggcctactagtatggactggatttggcgcatccttttccttgtcggcgctgctaccggcgcgcattccttcgaagaagtgcaactggtggaatcaggcggcggactggtgcagcctggcggatctctgagactgagctgtgccgccagcggcttcgacttcagccggtactggatgagctgggtgcgccaggcccctggcaaaggactggaatggatcggcgagatcaaccccgacagcagcaccatcaactacacccccagcctgaaggacaagttcatcatcagccgggacaacgccaagaacagcctgtacctccagatgaactccctgcgggccgaggacaccgccgtgtactattgcgccagacccgacggcaactactggtacttcgacgtgtggggccagggaaccctcgtgaccgtgtcatctacgcgtatccagaaccctgatcctgccgtgtaccagctgcgggatagcaagagcagcgacaagagcgtgtgtctgttcaccgacttcgacagccagaccaacgtgtcccagagcaaggactccgacgtgtacatcaccgataagtgcgtgctggacatgcggagcatggacttcaagagcaactccgccgtggcctggtccaacaagtccgatttcgcctgcgccaacgccttcaacaacagcattatccccgaggacacattcttcccaagcagcgacgtgccctgcgacgtgaagctggtggaaaagagcttcgagacagacaccaacctgaacttccagaacctgagcgtgatcggcttcagaatcctgctgctgaaagtggccggctttaacctgctgatgaccctgcggctgtggtccagccgcgccaagagaagcggatctggcgtgaagcagaccctgaatttcgacctgctgaagctggctggcgacgtggaatccaacccaggcccttctagaggccatatgaccgagtacaagcccacggtgcgcctcgccacccgcgacgacgtccccagggccgtacgcaccctcgccgccgcgttcgccgactaccccgccacgcgccacaccgtcgatccggaccgccacatcgagcgggtcaccgagctgcaagaactcttcctcacgcgcgtcgggctcgacatcggcaaggtgtgggtcgcggacgacggcgccgcggtggcggtctggaccacgccggagagcgtcgaagcgggggcggtgttcgccgagatcggcccgcgcatggccgagttgagcggttcccggctggccgcgcagcaacagatggaaggcctcctggcgccgcaccggcccaaggagcccgcgtggttcctggccaccgtcggcgtctcgcccgaccaccagggcaagggtctgggcagcgccgtcgtgctccccggagtggaggcggccgagcgcgccggggtgcccgccttcctggagacctccgcgccccgcaacctccccttctacgagcggctcggcttcaccgtcaccgccgacgtcgaggtgcccgaaggaccgcgcacctggtgcatgacccgcaagcccggtgcctga

SEQ ID NO: 21770 - DNA, 1800 bp, Artificial Sequence
  Synthetic Polynucleotide
atggccttaccagtgaccgccttgctcctgccgctggccttgctgctccacgccgccaggccgatcacatgcaaggccagccaggacgtgggaatcgccgtggcctggtatcagcagaaacccggcaaggtgcccaagctgctgatctactgggccagcaccagacacaccggcgtgcccgatagattttccggcagcggctccggcaccgacttcaccctgacaatcagctccctccagcccgaggacgtggcaacctactactgccagcagtacagcagctacccctacaccttcggccagggcaccaaggtggaaatcaagagactcgaggacctgaagaacgtgttcccacctgaggtggccgtgttcgagcctagcgaggccgagatcagccacacccagaaagccaccctcgtgtgcctggctaccggcttctaccccgaccatgtggaactgtcttggtgggtcaacggcaaagaggtgcacagcggcgtgtgtaccgacccccagccactgaaagaacagcccgccctgaacgacagccggtactgcctgagcagcagactgagagtgtccgccaccttctggcagaacccccggaaccacttcagatgccaggtgcagttctacggcctgagcgagaacgacgagtggacccaggacagagccaagcccgtgacccagatcgtgtctgccgaagcctggggcagagccgattgcggctttaccagcgagagctaccagcagggcgtgctgagcgccaccatcctgtacgagatcctgctgggcaaggccaccctgtacgccgtgctggtgtctgccctggtgctgatggctatggtcaagcggaaggacagccggggaagggccaagcgatctggatctggagcaacaaacttctcactactcaaacaagcaggtgacgtggaggagaatcccgggcctactagtatggactggatttggcgcatccttttccttgtcggcgctgctaccggcgcgcattccttcgaagaagtgcaactggtggaatcaggcggcggactggtgcagcctggcggatctctgagactgagctgtgccgccagcggcttcgacttcagccggtactggatgagctgggtgcgccaggcccctggcaaaggactggaatggatcggcgagatcaaccccgacagcagcaccatcaactacacccccagcctgaaggacaagttcatcatcagccgggacaacgccaagaacagcctgtacctccagatgaactccctgcgggccgaggacaccgccgtgtactattgcgccagacccgacggcaactactggtacttcgacgtgtggggccagggaaccctcgtgaccgtgtcatctacgcgtatccagaaccctgatcctgccgtgtaccagctgcgggatagcaagagcagcgacaagagcgtgtgtctgttcaccgacttcgacagccagaccaacgtgtcccagagcaaggactccgacgtgtacatcaccgataagtgcgtgctggacatgcggagcatggacttcaagagcaactccgccgtggcctggtccaacaagtccgatttcgcctgcgccaacgccttcaacaacagcattatccccgaggacacattcttcccaagccccgagagcagctgcgacgtgaagctggtggaaaagagcttcgagacagacaccaacctgaacttccagaacctgagcgtgatcggcttcagaatcctgctgctgaaagtggccggctttaacctgctgatgaccctgcggctgtggtccagc

SEQ ID NO: 21771 - DNA, 1812 bp, Artificial Sequence
  Synthetic Polynucleotide
atggccttaccagtgaccgccttgctcctgccgctggccttgctgctccacgccgccaggccgatcacatgcaaggccagccaggacgtgggaatcgccgtggcctggtatcagcagaaacccggcaaggtgcccaagctgctgatctactgggccagcaccagacacaccggcgtgcccgatagattttccggcagcggctccggcaccgacttcaccctgacaatcagctccctccagcccgaggacgtggcaacctactactgccagcagtacagcagctacccctacaccttcggccagggcaccaaggtggaaatcaagagactcgagatccagaaccctgatcctgccgtgtaccagctgcgggatagcaagagcagcgacaagagcgtgtgtctgttcaccgacttcgacagccagaccaacgtgtcccagagcaaggactccgacgtgtacatcaccgataagtgcgtgctggacatgcggagcatggacttcaagagcaactccgccgtggcctggtccaacaagtccgatttcgcctgcgccaacgccttcaacaacagcattatccccgaggacacattcttcccaagccccgagagcagctgcgacgtgaagctggtggaaaagagcttcgagacagacaccaacctgaacttccagaacctgagcgtgatcggcttcagaatcctgctgctgaaagtggccggctttaacctgctgatgaccctgcggctgtggtccagccgcgccaagagaagcggatctggcgtgaagcagaccctgaatttcgacctgctgaagctggctggcgacgtggaatccaacccaggccctactagtatggactggatttggcgcatccttttccttgtcggcgctgctaccggcgcgcattccttcgaagaagtgcaactggtggaatcaggcggcggactggtgcagcctggcggatctctgagactgagctgtgccgccagcggcttcgacttcagccggtactggatgagctgggtgcgccaggcccctggcaaaggactggaatggatcggcgagatcaaccccgacagcagcaccatcaactacacccccagcctgaaggacaagttcatcatcagccgggacaacgccaagaacagcctgtacctccagatgaactccctgcgggccgaggacaccgccgtgtactattgcgccagacccgacggcaactactggtacttcgacgtgtggggccagggaaccctcgtgaccgtgtcatctacgcgtgaggacctgaagaacgtgttcccacctgaggtggccgtgttcgagcctagcgaggccgagatcagccacacccagaaagccaccctcgtgtgcctggctaccggcttctaccccgaccatgtggaactgtcttggtgggtcaacggcaaagaggtgcacagcggcgtgtgtaccgacccccagccactgaaagaacagcccgccctgaacgacagccggtactgcctgagcagcagactgagagtgtccgccaccttctggcagaacccccggaaccacttcagatgccaggtgcagttctacggcctgagcgagaacgacgagtggacccaggacagagccaagcccgtgacccagatcgtgtctgccgaagcctggggcagagccgattgcggctttaccagcgagagctaccagcagggcgtgctgagcgccaccatcctgtacgagatcctgctgggcaaggccaccctgtacgccgtgctggtgtctgccctggtgctgatggctatggtcaagcggaaggacagccgggga

SEQ ID NO: 21772 - DNA, 2637 bp, Artificial Sequence
  Synthetic Polynucleotide
atggccttaccagtgaccgccttgctcctgccgctggccttgctgctccacgccgccaggccgctcgaggggaaaccaattcccaaccctcttctgggactggattcaaccggcagcggcgaggacctgaagaacgtgttcccacctgaggtggccgtgttcgagcctagcaaggccgagatcgcccacacccagaaagccaccctcgtgtgcctggctaccggcttctaccccgaccatgtggaactgtcttggtgggtcaacggcaaagaggtgcacagcggcgtgtgtaccgacccccagccactgaaagaacagcccgccctgaacgacagccggtactgcctgagcagcagactgagagtgtccgccaccttctggcagaacccccggaaccacttcagatgccaggtgcagttctacggcctgagcgagaacgacgagtggacccaggacagagccaagcccgtgacccagatcgtgtctgccgaagcctggggcagagccgattgcggcatcaccagcgccagctaccaccagggcgtgctgagcgccaccatcctgtacgagatcctgctgggcaaggccaccctgtacgccgtgctggtgtctgccctggtgctgatggctatggtcaagcggaaggacagccggggaagggccaagcgatctggatctggagcaacaaacttctcactactcaaacaagcaggtgacgtggaggagaatcccgggcctactagcatggccttaccagtgaccgccttgctcctgccgctggccttgctgctccacgccgccaggccgatcacatgcaaggccagccaggacgtgggaatcgccgtggcctggtatcagcagaaacccggcaaggtgcccaagctgctgatctactgggccagcaccagacacaccggcgtgcccgatagattttccggcagcggctccggcaccgacttcaccctgacaatcagctccctccagcccgaggacgtggcaacctactactgccagcagtacagcagctacccctacaccttcggccagggcaccaaggtggaaatcaagagaggcggaggcggaagtggaggcggaggatctggcggcggaggctctgaagtgcaactggtggaatcaggcggcggactggtgcagcctggcggatctctgagactgagctgtgccgccagcggcttcgacttcagccggtactggatgagctgggtgcgccaggcccctggcaaaggactggaatggatcggcgagatcaaccccgacagcagcaccatcaactacacccccagcctgaaggacaagttcatcatcagccgggacaacgccaagaacagcctgtacctccagatgaactccctgcgggccgaggacaccgccgtgtactattgcgccagacccgacggcaactactggtacttcgacgtgtggggccagggaaccctcgtgaccgtgtcatctacgcgtgagcagaaactgatctcggaagaggatgggagcggcatccagaaccctgatcctgccgtgtaccagctgcgggatagcaagagcagcgacaagagcgtgtgtctgttcaccgacttcgacagccagaccaacgtgtcccagagcaaggactccgacgtgtacatcaccgataagtgcgtgctggacatgcggagcatggacttcaagagcaactccgccgtggcctggtccaacaagtccgatttcgcctgcgccaacgccttcaacaacagcattatccccgaggacacattcttcccaagcagcgacgtgccctgcgacgtgaagctggtggaaaagagcttcgagacagacaccaacctgaacttccagaacctgagcgtgatcggcttcagaatcctgctgctgaaagtggccggctttaacctgctgatgaccctgcggctgtggtccagccgcgccaagagaagcggatctggcgtgaagcagaccctgaatttcgacctgctgaagctggctggcgacgtggaatccaacccaggcccttctagaggccatatgaccgagtacaagcccacggtgcgcctcgccacccgcgacgacgtccccagggccgtacgcaccctcgccgccgcgttcgccgactaccccgccacgcgccacaccgtcgatccggaccgccacatcgagcgggtcaccgagctgcaagaactcttcctcacgcgcgtcgggctcgacatcggcaaggtgtgggtcgcggacgacggcgccgcggtggcggtctggaccacgccggagagcgtcgaagcgggggcggtgttcgccgagatcggcccgcgcatggccgagttgagcggttcccggctggccgcgcagcaacagatggaaggcctcctggcgccgcaccggcccaaggagcccgcgtggttcctggccaccgtcggcgtctcgcccgaccaccagggcaagggtctgggcagcgccgtcgtgctccccggagtggaggcggccgagcgcgccggggtgcccgccttcctggagacctccgcgccccgcaacctccccttctacgagcggctcggcttcaccgtcaccgccgacgtcgaggtgcccgaaggaccgcgcacctggtgcatgacccgcaagcccggtgcctga

SEQ ID NO: 21773 - DNA, 2613 bp, Artificial Sequence
  Synthetic Polynucleotide
atggccttaccagtgaccgccttgctcctgccgctggccttgctgctccacgccgccaggccgatcacatgcaaggccagccaggacgtgggaatcgccgtggcctggtatcagcagaaacccggcaaggtgcccaagctgctgatctactgggccagcaccagacacaccggcgtgcccgatagattttccggcagcggctccggcaccgacttcaccctgacaatcagctccctccagcccgaggacgtggcaacctactactgccagcagtacagcagctacccctacaccttcggccagggcaccaaggtggaaatcaagagactcgaggggaaaccaattcccaaccctcttctgggactggattcaaccggcagcggcgacaagcagctggacgccgacgtgtcccccaagcctaccatcttcctgccctctatcgccgagacaaagctccagaaggccggcacctacctgtgcctgctggaaaagttcttcccagatgtgattaagatccactggcaggaaaagaagtccaacaccatcctgggcagccaggaaggcaacaccatgaagaccaacgacacctacatgaagttcagctggctgaccgtgcccgagaagtccctggacaaagaacacagatgcatcgtgcggcacgaaaacaacaagaacggcgtggaccaggaaatcatcttcccacccatcaagaccgatgtgattacaatggaccccaaggacaactgctccaaggacgccaacgataccctgctgctccagctgaccaacaccagcgcctactacatgtacttgttgctgctgctgaagtccgtggtgtacttcgccatcatcacatgctgcctgctgcggagaaccgccttctgctgcaacggcgagaagtctagggccaagcgatctggatctggagcaacaaacttctcactactcaaacaagcaggtgacgtggaggagaatcccgggcctactagtatggactggatttggcgcatccttttccttgtcggcgctgctaccggcgcgcattccttcgaagaagtgcaactggtggaatcaggcggcggactggtgcagcctggcggatctctgagactgagctgtgccgccagcggcttcgacttcagccggtactggatgagctgggtgcgccaggcccctggcaaaggactggaatggatcggcgagatcaaccccgacagcagcaccatcaactacacccccagcctgaaggacaagttcatcatcagccgggacaacgccaagaacagcctgtacctccagatgaactccctgcgggccgaggacaccgccgtgtactattgcgccagacccgacggcaactactggtacttcgacgtgtggggccagggaaccctcgtgaccgtgtcatctacgcgtgagcagaaactgatctcggaagaggatgggagcggcagccagcctcacaccaagcccagcgtgttcgtgatgaagaacggcaccaacgtggcctgcctcgtgaaagagttctaccccaaggacatcaggatcaacctggtgtccagcaagaagatcaccgagttcgaccccgccatcgtgatctcccccagcggcaagtacaacgccgtgaagctggggaagtacgaggacagcaacagcgtgacctgctccgtgcagcacgacaacaagaccgtgcacagcaccgactttgaagtgaaaaccgactccaccgaccacgtgaagcccaaagagacagagaacaccaagcagcccagcaagagctgccacaagcccaaggccatcgtgcacaccgagaaagtgaacatgatgagcctgaccgtgctgggcctgcggatgctgttcgccaaaaccgtggccgtgaacttcctgctgaccgccaagctgttcttcctccgcgccaagagaagcggatctggcgtgaagcagaccctgaatttcgacctgctgaagctggctggcgacgtggaatccaacccaggcccttctagaggccatatgaccgagtacaagcccacggtgcgcctcgccacccgcgacgacgtccccagggccgtacgcaccctcgccgccgcgttcgccgactaccccgccacgcgccacaccgtcgatccggaccgccacatcgagcgggtcaccgagctgcaagaactcttcctcacgcgcgtcgggctcgacatcggcaaggtgtgggtcgcggacgacggcgccgcggtggcggtctggaccacgccggagagcgtcgaagcgggggcggtgttcgccgagatcggcccgcgcatggccgagttgagcggttcccggctggccgcgcagcaacagatggaaggcctcctggcgccgcaccggcccaaggagcccgcgtggttcctggccaccgtcggcgtctcgcccgaccaccagggcaagggtctgggcagcgccgtcgtgctccccggagtggaggcggccgagcgcgccggggtgcccgccttcctggagacctccgcgccccgcaacctccccttctacgagcggctcggcttcaccgtcaccgccgacgtcgaggtgcccgaaggaccgcgcacctggtgcatgacccgcaagcccggtgcctga

SEQ ID NO: 21774 - DNA, 1824 bp, Artificial Sequence
  Synthetic Polynucleotide
atggccttaccagtgaccgccttgctcctgccgctggccttgctgctccacgccgccaggccgatcacatgcaaggccagccaggacgtgggaatcgccgtggcctggtatcagcagaaacccggcaaggtgcccaagctgctgatctactgggccagcaccagacacaccggcgtgcccgatagattttccggcagcggctccggcaccgacttcaccctgacaatcagctccctccagcccgaggacgtggcaacctactactgccagcagtacagcagctacccctacaccttcggccagggcaccaaggtggaaatcaagagactcgagagccagcctcacaccaagcccagcgtgttcgtgatgaagaacggcaccaacgtggcctgcctcgtgaaagagttctaccccaaggacatcaggatcaacctggtgtccagcaagaagatcaccgagttcgaccccgccatcgtgatctcccccagcggcaagtacaacgccgtgaagctggggaagtacgaggacagcaacagcgtgacctgctccgtgcagcacgacaacaagaccgtgcacagcaccgactttgaagtgaaaaccgactccaccgaccacgtgaagcccaaagagacagagaacaccaagcagcccagcaagagctgccacaagcccaaggccatcgtgcacaccgagaaagtgaacatgatgagcctgaccgtgctgggcctgcggatgctgttcgccaaaaccgtggccgtgaacttcctgctgaccgccaagctgttcttcctcagggccaagcgatctggatctggagcaacaaacttctcactactcaaacaagcaggtgacgtggaggagaatcccgggcctactagtatggactggatttggcgcatccttttccttgtcggcgctgctaccggcgcgcattccttcgaagaagtgcaactggtggaatcaggcggcggactggtgcagcctggcggatctctgagactgagctgtgccgccagcggcttcgacttcagccggtactggatgagctgggtgcgccaggcccctggcaaaggactggaatggatcggcgagatcaaccccgacagcagcaccatcaactacacccccagcctgaaggacaagttcatcatcagccgggacaacgccaagaacagcctgtacctccagatgaactccctgcgggccgaggacaccgccgtgtactattgcgccagacccgacggcaactactggtacttcgacgtgtggggccagggaaccctcgtgaccgtgtcatctacgcgtgacaagcagctggacgccgacgtgtcccccaagcctaccatcttcctgccctctatcgccgagacaaagctccagaaggccggcacctacctgtgcctgctggaaaagttcttcccagatgtgattaagatccactggcaggaaaagaagtccaacaccatcctgggcagccaggaaggcaacaccatgaagaccaacgacacctacatgaagttcagctggctgaccgtgcccgagaagtccctggacaaagaacacagatgcatcgtgcggcacgaaaacaacaagaacggcgtggaccaggaaatcatcttcccacccatcaagaccgatgtgattacaatggaccccaaggacaactgctccaaggacgccaacgataccctgctgctccagctgaccaacaccagcgcctactacatgtacttgttgctgctgctgaagtccgtggtgtacttcgccatcatcacatgctgcctgctgcggagaaccgccttctgctgcaacggcgagaagtct

SEQ ID NO: 21775 - DNA, 2658 bp, Artificial Sequence
  Synthetic Polynucleotide
atggccttaccagtgaccgccttgctcctgccgctggccttgctgctccacgccgccaggccgctcgaggggaaaccaattcccaaccctcttctgggactggattcaaccggcagcggcgacaagcagctggacgccgacgtgtcccccaagcctaccatcttcctgccctctatcgccgagacaaagctccagaaggccggcacctacctgtgcctgctggaaaagttcttcccagatgtgattaagatccactggcaggaaaagaagtccaacaccatcctgggcagccaggaaggcaacaccatgaagaccaacgacacctacatgaagttcagctggctgaccgtgcccgagaagtccctggacaaagaacacagatgcatcgtgcggcacgaaaacaacaagaacggcgtggaccaggaaatcatcttcccacccatcaagaccgatgtgattacaatggaccccaaggacaactgctccaaggacgccaacgataccctgctgctccagctgaccaacaccagcgcctactacatgtacttgttgctgctgctgaagtccgtggtgtacttcgccatcatcacatgctgcctgctgcggagaaccgccttctgctgcaacggcgagaagtctagggccaagcgatctggatctggagcaacaaacttctcactactcaaacaagcaggtgacgtggaggagaatcccgggcctactagcatggccttaccagtgaccgccttgctcctgccgctggccttgctgctccacgccgccaggccgatcacatgcaaggccagccaggacgtgggaatcgccgtggcctggtatcagcagaaacccggcaaggtgcccaagctgctgatctactgggccagcaccagacacaccggcgtgcccgatagattttccggcagcggctccggcaccgacttcaccctgacaatcagctccctccagcccgaggacgtggcaacctactactgccagcagtacagcagctacccctacaccttcggccagggcaccaaggtggaaatcaagagaggcggaggcggaagtggaggcggaggatctggcggcggaggctctgaagtgcaactggtggaatcaggcggcggactggtgcagcctggcggatctctgagactgagctgtgccgccagcggcttcgacttcagccggtactggatgagctgggtgcgccaggcccctggcaaaggactggaatggatcggcgagatcaaccccgacagcagcaccatcaactacacccccagcctgaaggacaagttcatcatcagccgggacaacgccaagaacagcctgtacctccagatgaactccctgcgggccgaggacaccgccgtgtactattgcgccagacccgacggcaactactggtacttcgacgtgtggggccagggaaccctcgtgaccgtgtcatctacgcgtgagcagaaactgatctcggaagaggatgggagcggcagccagcctcacaccaagcccagcgtgttcgtgatgaagaacggcaccaacgtggcctgcctcgtgaaagagttctaccccaaggacatcaggatcaacctggtgtccagcaagaagatcaccgagttcgaccccgccatcgtgatctcccccagcggcaagtacaacgccgtgaagctggggaagtacgaggacagcaacagcgtgacctgctccgtgcagcacgacaacaagaccgtgcacagcaccgactttgaagtgaaaaccgactccaccgaccacgtgaagcccaaagagacagagaacaccaagcagcccagcaagagctgccacaagcccaaggccatcgtgcacaccgagaaagtgaacatgatgagcctgaccgtgctgggcctgcggatgctgttcgccaaaaccgtggccgtgaacttcctgctgaccgccaagctgttcttcctccgcgccaagagaagcggatctggcgtgaagcagaccctgaatttcgacctgctgaagctggctggcgacgtggaatccaacccaggcccttctagaggccatatgaccgagtacaagcccacggtgcgcctcgccacccgcgacgacgtccccagggccgtacgcaccctcgccgccgcgttcgccgactaccccgccacgcgccacaccgtcgatccggaccgccacatcgagcgggtcaccgagctgcaagaactcttcctcacgcgcgtcgggctcgacatcggcaaggtgtgggtcgcggacgacggcgccgcggtggcggtctggaccacgccggagagcgtcgaagcgggggcggtgttcgccgagatcggcccgcgcatggccgagttgagcggttcccggctggccgcgcagcaacagatggaaggcctcctggcgccgcaccggcccaaggagcccgcgtggttcctggccaccgtcggcgtctcgcccgaccaccagggcaagggtctgggcagcgccgtcgtgctccccggagtggaggcggccgagcgcgccggggtgcccgccttcctggagacctccgcgccccgcaacctccccttctacgagcggctcggcttcaccgtcaccgccgacgtcgaggtgcccgaaggaccgcgcacctggtgcatgacccgcaagcccggtgcctga

SEQ ID NO: 21776 - DNA, 3033 bp, Artificial Sequence
  Synthetic Polynucleotide
atggccttaccagtgaccgccttgctcctgccgctggccttgctgctccacgccgccaggccgatcacatgcaaggccagccaggacgtgggaatcgccgtggcctggtatcagcagaaacccggcaaggtgcccaagctgctgatctactgggccagcaccagacacaccggcgtgcccgatagattttccggcagcggctccggcaccgacttcaccctgacaatcagctccctccagcccgaggacgtggcaacctactactgccagcagtacagcagctacccctacaccttcggccagggcaccaaggtggaaatcaagagaggacagcctaaggccaatcctaccgtgacactgttccctccaagcagcgaagaactccaggccaacaaggccacacttgtgtgcctgatctccgacttctaccctggggctgtgacagtggcttggaaggccgatggatctcctgtgaaagccggcgtggaaaccaccaagccatccaagcagagcaacaacaaatacgccgccagctcctacctgagcctgacacctgagcagtggaagtcccacagatcctacagctgccaagtgacccacgaaggcagcaccgtggaaaagacagtggcccctacagagtgcagcggatcccagagcttcggcctgctggaccccaagctgtgctacctgctggatggcatcctgttcatctacggcgtgatcctgaccgccctgttcctgagagtgaagttcagcagaagcgccgacgcccctgcctaccagcagggacagaaccaactgtacaacgagctgaacctgggcagacgggaagagtacgacgtgctggacaagcggagaggcagggaccctgagatgggcggaaagccccagcggagaaagaacccccaggaaggactgtataacgaactccagaaagacaagatggccgaagcctacagcgagatcggcatgaagggcgagcggagaagaggcaagggccacgatggcctgtaccagggcctgagcaccgccaccaaggacacctatgacgccctgcacatgcaggccctgcctccaagaagggccaagcgatctggatctggagcaacaaacttctcactactcaaacaagcaggtgacgtggaggagaatcccgggcctactagtatggactggatttggcgcatccttttccttgtcggcgctgctaccggcgcgcattccttcgaagaagtgcaactggtggaatcaggcggcggactggtgcagcctggcggatctctgagactgagctgtgccgccagcggcttcgacttcagccggtactggatgagctgggtgcgccaggcccctggcaaaggactggaatggatcggcgagatcaaccccgacagcagcaccatcaactacacccccagcctgaaggacaagttcatcatcagccgggacaacgccaagaacagcctgtacctccagatgaactccctgcgggccgaggacaccgccgtgtactattgcgccagacccgacggcaactactggtacttcgacgtgtggggccagggaaccctcgtgaccgtgtcatctgcctctacaaagggaccctccgtgtttcctctggctcccagcagcaagtctacaagcggaggaacagccgctctgggctgcctggtcaaggattactttcccgagcctgtgaccgtgtcctggaatagcggagcactgacaagcggcgtgcacacctttccagccgtgctgcaaagcagcggcctgtactctctgagcagcgtggtcacagtgcctagctctagcctgggcacccagacctacatctgcaatgtgaaccacaagcctagcaacaccaaggtggacaagagagtggaacccaagagctgtggtacccagagttttgggttgttggaccctaaattgtgctatctgttggacggaatcctgttcatttacggagtgatcctgaccgcattgttcctgcgggttaagttttccagatccgcagacgcacccgcttaccaacaagggcagaaccaactctacaatgaacttaatttggggcggagggaagagtacgacgttctggacaaaaggaggggacgagatcccgagatgggcggaaagcctcagcgaaggaagaatccgcaagaggggctttataacgaactccagaaagataaaatggcagaagcctatagtgagattgggatgaagggagaaaggaggaggggtaaaggtcacgatgggttgtaccaaggattgagcacagccactaaagatacctatgatgcgctccacatgcaggccctgccgccaagacgcgccaagagaagcggatctggcgtgaagcagaccctgaatttcgacctgctgaagctggctggcgacgtggaatccaacccaggcccttctagaggccatatgaccgagtacaagcccacggtgcgcctcgccacccgcgacgacgtccccagggccgtacgcaccctcgccgccgcgttcgccgactaccccgccacgcgccacaccgtcgatccggaccgccacatcgagcgggtcaccgagctgcaagaactcttcctcacgcgcgtcgggctcgacatcggcaaggtgtgggtcgcggacgacggcgccgcggtggcggtctggaccacgccggagagcgtcgaagcgggggcggtgttcgccgagatcggcccgcgcatggccgagttgagcggttcccggctggccgcgcagcaacagatggaaggcctcctggcgccgcaccggcccaaggagcccgcgtggttcctggccaccgtcggcgtctcgcccgaccaccagggcaagggtctgggcagcgccgtcgtgctccccggagtggaggcggccgagcgcgccggggtgcccgccttcctggagacctccgcgccccgcaacctccccttctacgagcggctcggcttcaccgtcaccgccgacgtcgaggtgcccgaaggaccgcgcacctggtgcatgacccgcaagcccggtgcctga

SEQ ID NO: 21777 - DNA, 1878 bp, Artificial Sequence
  Synthetic Polynucleotide
atggccttaccagtgaccgccttgctcctgccgctggccttgctgctccacgccgccaggccgatcacatgcaaggccagccaggacgtgggaatcgccgtggcctggtatcagcagaaacccggcaaggtgcccaagctgctgatctactgggccagcaccagacacaccggcgtgcccgatagattttccggcagcggctccggcaccgacttcaccctgacaatcagctccctccagcccgaggacgtggcaacctactactgccagcagtacagcagctacccctacaccttcggccagggcaccaaggtggaaatcaagagactcgagggacagcctaaggccaatcctaccgtgacactgttccctccaagcagcgaagaactccaggccaacaaggccacacttgtgtgcctgatctccgacttctaccctggggctgtgacagtggcttggaaggccgatggatctcctgtgaaagccggcgtggaaaccaccaagccatccaagcagagcaacaacaaatacgccgccagctcctacctgagcctgacacctgagcagtggaagtcccacagatcctacagctgccaagtgacccacgaaggcagcaccgtggaaaagacagtggcccctacagagtgcagccccatcaagaccgatgtgattacaatggaccccaaggacaactgctccaaggacgccaacgataccctgctgctccagctgaccaacaccagcgcctactacatgtacttgttgctgctgctgaagtccgtggtgtacttcgccatcatcacatgctgcctgctgcggagaaccgccttctgctgcaacggcgagaagtctagggccaagcgatctggatctggagcaacaaacttctcactactcaaacaagcaggtgacgtggaggagaatcccgggcctactagtatggactggatttggcgcatccttttccttgtcggcgctgctaccggcgcgcattccttcgaagaagtgcaactggtggaatcaggcggcggactggtgcagcctggcggatctctgagactgagctgtgccgccagcggcttcgacttcagccggtactggatgagctgggtgcgccaggcccctggcaaaggactggaatggatcggcgagatcaaccccgacagcagcaccatcaactacacccccagcctgaaggacaagttcatcatcagccgggacaacgccaagaacagcctgtacctccagatgaactccctgcgggccgaggacaccgccgtgtactattgcgccagacccgacggcaactactggtacttcgacgtgtggggccagggaaccctcgtgaccgtgtcatctacgcgtgcctctacaaagggaccctccgtgtttcctctggctcccagcagcaagtctacaagcggaggaacagccgctctgggctgcctggtcaaggattactttcccgagcctgtgaccgtgtcctggaatagcggagcactgacaagcggcgtgcacacctttccagccgtgctgcaaagcagcggcctgtactctctgagcagcgtggtcacagtgcctagctctagcctgggcacccagacctacatctgcaatgtgaaccacaagcctagcaacaccaaggtggacaagagagtggaacccaagagctgtgaagtgaaaaccgactccaccgaccacgtgaagcccaaagagacagagaacaccaagcagcccagcaagagctgccacaagcccaaggccatcgtgcacaccgagaaagtgaacatgatgagcctgaccgtgctgggcctgcggatgctgttcgccaaaaccgtggccgtgaacttcctgctgaccgccaagctgttcttcctc

SEQ ID NO: 21778 - DNA, 1812 bp, Artificial Sequence
  Synthetic Polynucleotide
atggccttaccagtgaccgccttgctcctgccgctggccttgctgctccacgccgccaggccgatcacatgcaaggccagccaggacgtgggaatcgccgtggcctggtatcagcagaaacccggcaaggtgcccaagctgctgatctactgggccagcaccagacacaccggcgtgcccgatagattttccggcagcggctccggcaccgacttcaccctgacaatcagctccctccagcccgaggacgtggcaacctactactgccagcagtacagcagctacccctacaccttcggccagggcaccaaggtggaaatcaagagactcgagggacagcctaaggccaatcctaccgtgacactgttccctccaagcagcgaagaactccaggccaacaaggccacacttgtgtgcctgatctccgacttctaccctggggctgtgacagtggcttggaaggccgatggatctcctgtgaaagccggcgtggaaaccaccaagccatccaagcagagcaacaacaaatacgccgccagctcctacctgagcctgacacctgagcagtggaagtcccacagatcctacagctgccaagtgacccacgaaggcagcaccgtggaaaagacagtggcccctacagagtgcagcggcagagccgattgcggctttaccagcgagagctaccagcagggcgtgctgagcgccaccatcctgtacgagatcctgctgggcaaggccaccctgtacgccgtgctggtgtctgccctggtgctgatggctatggtcaagcggaaggacagccggggaagggccaagcgatctggatctggagcaacaaacttctcactactcaaacaagcaggtgacgtggaggagaatcccgggcctactagtatggactggatttggcgcatccttttccttgtcggcgctgctaccggcgcgcattccttcgaagaagtgcaactggtggaatcaggcggcggactggtgcagcctggcggatctctgagactgagctgtgccgccagcggcttcgacttcagccggtactggatgagctgggtgcgccaggcccctggcaaaggactggaatggatcggcgagatcaaccccgacagcagcaccatcaactacacccccagcctgaaggacaagttcatcatcagccgggacaacgccaagaacagcctgtacctccagatgaactccctgcgggccgaggacaccgccgtgtactattgcgccagacccgacggcaactactggtacttcgacgtgtggggccagggaaccctcgtgaccgtgtcatctacgcgtgcctctacaaagggaccctccgtgtttcctctggctcccagcagcaagtctacaagcggaggaacagccgctctgggctgcctggtcaaggattactttcccgagcctgtgaccgtgtcctggaatagcggagcactgacaagcggcgtgcacacctttccagccgtgctgcaaagcagcggcctgtactctctgagcagcgtggtcacagtgcctagctctagcctgggcacccagacctacatctgcaatgtgaaccacaagcctagcaacaccaaggtggacaagagagtggaacccaagagctgtatccccgaggacacattcttcccaagccccgagagcagctgcgacgtgaagctggtggaaaagagcttcgagacagacaccaacctgaacttccagaacctgagcgtgatcggcttcagaatcctgctgctgaaagtggccggctttaacctgctgatgaccctgcggctgtggtccagc

SEQ ID NO: 21779 - DNA, 1290 bp, Artificial Sequence
  Synthetic Polynucleotide
atggccttaccagtgaccgccttgctcctgccgctggccttgctgctccacgccgccaggccgatcacatgcaaggccagccaggacgtgggaatcgccgtggcctggtatcagcagaaacccggcaaggtgcccaagctgctgatctactgggccagcaccagacacaccggcgtgcccgatagattttccggcagcggctccggcaccgacttcaccctgacaatcagctccctccagcccgaggacgtggcaacctactactgccagcagtacagcagctacccctacaccttcggccagggcaccaaggtggaaatcaagagaggcggaggcggaagtggaggcggaggatctggcggcggaggctctgaagtgcaactggtggaatcaggcggcggactggtgcagcctggcggatctctgagactgagctgtgccgccagcggcttcgacttcagccggtactggatgagctgggtgcgccaggcccctggcaaaggactggaatggatcggcgagatcaaccccgacagcagcaccatcaactacacccccagcctgaaggacaagttcatcatcagccgggacaacgccaagaacagcctgtacctccagatgaactccctgcgggccgaggacaccgccgtgtactattgcgccagacccgacggcaactactggtacttcgacgtgtggggccagggaaccctcgtgaccgtgtcatctacgcgtgacggtaacgaggagatgggaggaatcactcaaaccccttacaaagtctcaatttcaggaacaactgttatccttacatgtccccagtatcctggcagcgagatcctttggcagcataacgacaagaatatagggggagatgaagacgataagaatatcggatctgacgaggatcacttgagcctgaaagagttctccgagcttgaacaaagcggatattatgtgtgctatccgcgcgggtcaaagccggaagacgctaacttttacctttatctccgagccagagtgtgcgaaaattgcatggaaatggacgttatgtccgttgctacaatagttatcgtagatatatgcatcacgggtggactgcttctgctggtttattattggtccaagaatagaaaggccaaagctaaacccgtgaccagaggcgctggcgcaggcggaaggcaaaggggacaaaacaaagaacggccaccaccagtgccaaatccagattatgagcctattcggaaaggacagagggacctgtactctggcctgaatcagagaagaatc

SEQ ID NO: 21780 - DNA, 1185 bp, Artificial Sequence
  Synthetic Polynucleotide
atggccttaccagtgaccgccttgctcctgccgctggccttgctgctccacgccgccaggccgatcacatgcaaggccagccaggacgtgggaatcgccgtggcctggtatcagcagaaacccggcaaggtgcccaagctgctgatctactgggccagcaccagacacaccggcgtgcccgatagattttccggcagcggctccggcaccgacttcaccctgacaatcagctccctccagcccgaggacgtggcaacctactactgccagcagtacagcagctacccctacaccttcggccagggcaccaaggtggaaatcaagagaggcggaggcggaagtggaggcggaggatctggcggcggaggctctgaagtgcaactggtggaatcaggcggcggactggtgcagcctggcggatctctgagactgagctgtgccgccagcggcttcgacttcagccggtactggatgagctgggtgcgccaggcccctggcaaaggactggaatggatcggcgagatcaaccccgacagcagcaccatcaactacacccccagcctgaaggacaagttcatcatcagccgggacaacgccaagaacagcctgtacctccagatgaactccctgcgggccgaggacaccgccgtgtactattgcgccagacccgacggcaactactggtacttcgacgtgtggggccagggaaccctcgtgaccgtgtcatctacgcgtttcaagatccccatcgaggaactggaagatcgggtgttcgtgaactgcaacacctctatcacctgggtggaaggcaccgtgggaacactgctgagcgacatcaccagactggacctcggcaagcggattctggaccctcggggcatctacagatgcaacggcaccgacatctacaaggacaaagaaagcaccgtgcaggtccactacagaatgtgccagtcctgcgtggaactggaccctgctacagtggccggcatcatcgtgaccgatgtgatcgctactctgctgctggctctgggagtgttctgcttcgccggacacgaaacaggcagactgtctggcgctgccgatacacaggccctgctgagaaacgaccaagtgtatcagcccctgcgcgacagagatgatgcccagtattctcacctcggcggcaactgggctagaaacaag

SEQ ID NO: 21781 - DNA, 1215 bp, Artificial Sequence
  Synthetic Polynucleotide
atggccttaccagtgaccgccttgctcctgccgctggccttgctgctccacgccgccaggccgatcacatgcaaggccagccaggacgtgggaatcgccgtggcctggtatcagcagaaacccggcaaggtgcccaagctgctgatctactgggccagcaccagacacaccggcgtgcccgatagattttccggcagcggctccggcaccgacttcaccctgacaatcagctccctccagcccgaggacgtggcaacctactactgccagcagtacagcagctacccctacaccttcggccagggcaccaaggtggaaatcaagagaggcggaggcggaagtggaggcggaggatctggcggcggaggctctgaagtgcaactggtggaatcaggcggcggactggtgcagcctggcggatctctgagactgagctgtgccgccagcggcttcgacttcagccggtactggatgagctgggtgcgccaggcccctggcaaaggactggaatggatcggcgagatcaaccccgacagcagcaccatcaactacacccccagcctgaaggacaagttcatcatcagccgggacaacgccaagaacagcctgtacctccagatgaactccctgcgggccgaggacaccgccgtgtactattgcgccagacccgacggcaactactggtacttcgacgtgtggggccagggaaccctcgtgaccgtgtcatctacgcgtcagagcatcaagggcaaccacctggtcaaggtgtacgactaccaagaggacggcagcgtgctgctgacatgtgatgccgaggccaagaacatcacctggtttaaggacggcaagatgatcggcttcctgaccgaggacaagaagaagtggaacctgggcagcaacgctaaggaccccagaggcatgtatcagtgcaagggcagccagaacaagagcaagcccctccaggtgtactaccggatgtgccagaactgcatcgagctgaacgccgctaccatcagcggctttctgttcgccgagatcgtgtccatcttcgtgctggccgtgggcgtgtactttatcgctggacaggatggcgtgcggcagagcagagcttccgataagcaaaccctgctgcctaacgaccagctgtaccagcctctgaaggacagagaggacgaccagtacagccacctccagggcaatcagctgagaagaaac

SEQ ID NO: 21782 - DNA, 2205 bp, Artificial Sequence
  Synthetic Polynucleotide
atggccttaccagtgaccgccttgctcctgccgctggccttgctgctccacgccgccaggccggaagtgcagctggttgaatctggcggaggactggttcagcctggcggatctctgagactgtcttgtgccgccagcggcttcagcttcagcgacttttggatgagctgggtccgacaggcccctggcaaaggacttgaatgggtcgccacaatcagccaggccggcagcgagaaggactacgtggactctgtgaagggcagattcaccatcagccgggacaacgccaagaagtccctgtacctccagatgaacagcctgagagccgaggacaccgccgtgtactattgtgcctctggcgtgtacagcttcgactacagaggccagggcaccctggtcacagtctcttctggtaccggcggaggcggatctggcggcggaggtagcggtggcggaggatctgaattcatcacatgcaaggccagccaggacgtgggaatcgccgtggcctggtatcagcagaaacccggcaaggtgcccaagctgctgatctactgggccagcaccagacacaccggcgtgcccgatagattttccggcagcggctccggcaccgacttcaccctgacaatcagctccctccagcccgaggacgtggcaacctactactgccagcagtacagcagctacccctacaccttcggccagggcaccaaggtggaaatcaagagactcgaggacctgaagaacgtgttcccacctgaggtggccgtgttcgagcctagcgaggccgagatcagccacacccagaaagccaccctcgtgtgcctggctaccggcttctaccccgaccatgtggaactgtcttggtgggtcaacggcaaagaggtgcacagcggcgtgtgtaccgacccccagccactgaaagaacagcccgccctgaacgacagccggtactgcctgagcagcagactgagagtgtccgccaccttctggcagaacccccggaaccacttcagatgccaggtgcagttctacggcctgagcgagaacgacgagtggacccaggacagagccaagcccgtgacccagatcgtgtctgccgaagcctggggcagagccgattgcggctttaccagcgagagctaccagcagggcgtgctgagcgccaccatcctgtacgagatcctgctgggcaaggccaccctgtacgccgtgctggtgtctgccctggtgctgatggctatggtcaagcggaaggacagccggggaagggccaagcgatctggatctggagcaacaaacttctcactactcaaacaagcaggtgacgtggaggagaatcccgggcctactagtatggactggatttggcgcatccttttccttgtcggcgctgctaccggcgcgcattccttcgaagaagtgcaactggtggaatcaggcggcggactggtgcagcctggcggatctctgagactgagctgtgccgccagcggcttcgacttcagccggtactggatgagctgggtgcgccaggcccctggcaaaggactggaatggatcggcgagatcaaccccgacagcagcaccatcaactacacccccagcctgaaggacaagttcatcatcagccgggacaacgccaagaacagcctgtacctccagatgaactccctgcgggccgaggacaccgccgtgtactattgcgccagacccgacggcaactactggtacttcgacgtgtggggccagggaaccctcgtgaccgtgtcatctacgcgtatccagaaccctgatcctgccgtgtaccagctgcgggatagcaagagcagcgacaagagcgtgtgtctgttcaccgacttcgacagccagaccaacgtgtcccagagcaaggactccgacgtgtacatcaccgataagtgcgtgctggacatgcggagcatggacttcaagagcaactccgccgtggcctggtccaacaagtccgatttcgcctgcgccaacgccttcaacaacagcattatccccgaggacacattcttcccaagccccgagagcagctgcgacgtgaagctggtggaaaagagcttcgagacagacaccaacctgaacttccagaacctgagcgtgatcggcttcagaatcctgctgctgaaagtggccggctttaacctgctgatgaccctgcggctgtggtccagc

SEQ ID NO: 21783 - DNA, 2283 bp, Artificial Sequence
  Synthetic Polynucleotide
atggccttaccagtgaccgccttgctcctgccgctggccttgctgctccacgccgccaggccggaagtgcagctggttgaatctggcggaggactggttcagcctggcggatctctgagactgtcttgtgccgccagcggcttcagcttcagcgacttttggatgagctgggtccgacaggcccctggcaaaggacttgaatgggtcgccacaatcagccaggccggcagcgagaaggactacgtggactctgtgaagggcagattcaccatcagccgggacaacgccaagaagtccctgtacctccagatgaacagcctgagagccgaggacaccgccgtgtactattgtgcctctggcgtgtacagcttcgactacagaggccagggcaccctggtcacagtctcttctggtaccggcggaggcggatctggcggcggaggtagcggtggcggaggatctgaattcatcacatgcaaggccagccaggacgtgggaatcgccgtggcctggtatcagcagaaacccggcaaggtgcccaagctgctgatctactgggccagcaccagacacaccggcgtgcccgatagattttccggcagcggctccggcaccgacttcaccctgacaatcagctccctccagcccgaggacgtggcaacctactactgccagcagtacagcagctacccctacaccttcggccagggcaccaaggtggaaatcaagagactcgagggacagcctaaggccaatcctaccgtgacactgttccctccaagcagcgaagaactccaggccaacaaggccacacttgtgtgcctgatctccgacttctaccctggggctgtgacagtggcttggaaggccgatggatctcctgtgaaagccggcgtggaaaccaccaagccatccaagcagagcaacaacaaatacgccgccagctcctacctgagcctgacacctgagcagtggaagtcccacagatcctacagctgccaagtgacccacgaaggcagcaccgtggaaaagacagtggcccctacagagtgcagccccatcaagaccgatgtgattacaatggaccccaaggacaactgctccaaggacgccaacgataccctgctgctccagctgaccaacaccagcgcctactacatgtacttgttgctgctgctgaagtccgtggtgtacttcgccatcatcacatgctgcctgctgcggagaaccgccttctgctgcaacggcgagaagtctagggccaagcgatctggatctggagcaacaaacttctcactactcaaacaagcaggtgacgtggaggagaatcccgggcctactagtatggactggatttggcgcatccttttccttgtcggcgctgctaccggcgcgcattccttcgaagaagtgcaactggtggaatcaggcggcggactggtgcagcctggcggatctctgagactgagctgtgccgccagcggcttcgacttcagccggtactggatgagctgggtgcgccaggcccctggcaaaggactggaatggatcggcgagatcaaccccgacagcagcaccatcaactacacccccagcctgaaggacaagttcatcatcagccgggacaacgccaagaacagcctgtacctccagatgaactccctgcgggccgaggacaccgccgtgtactattgcgccagacccgacggcaactactggtacttcgacgtgtggggccagggaaccctcgtgaccgtgtcatctacgcgtgcctctacaaagggaccctccgtgtttcctctggctcccagcagcaagtctacaagcggaggaacagccgctctgggctgcctggtcaaggattactttcccgagcctgtgaccgtgtcctggaatagcggagcactgacaagcggcgtgcacacctttccagccgtgctgcaaagcagcggcctgtactctctgagcagcgtggtcacagtgcctagctctagcctgggcacccagacctacatctgcaatgtgaaccacaagcctagcaacaccaaggtggacaagagagtggaacccaagagctgtgaagtgaaaaccgactccaccgaccacgtgaagcccaaagagacagagaacaccaagcagcccagcaagagctgccacaagcccaaggccatcgtgcacaccgagaaagtgaacatgatgagcctgaccgtgctgggcctgcggatgctgttcgccaaaaccgtggccgtgaacttcctgctgaccgccaagctgttcttcctc

SEQ ID NO: 21784 - DNA, 2226 bp, Artificial Sequence
  Synthetic Polynucleotide
atggccttaccagtgaccgccttgctcctgccgctggccttgctgctccacgccgccaggccggaagtgcagctggttgaatctggcggaggactggttcagcctggcggatctctgagactgtcttgtgccgccagcggcttcagcttcagcgacttttggatgagctgggtccgacaggcccctggcaaaggacttgaatgggtcgccacaatcagccaggccggcagcgagaaggactacgtggactctgtgaagggcagattcaccatcagccgggacaacgccaagaagtccctgtacctccagatgaacagcctgagagccgaggacaccgccgtgtactattgtgcctctggcgtgtacagcttcgactacagaggccagggcaccctggtcacagtctcttctggtaccggcggaggcggatctggcggcggaggtagcggtggcggaggatctgaattcatcacatgcaaggccagccaggacgtgggaatcgccgtggcctggtatcagcagaaacccggcaaggtgcccaagctgctgatctactgggccagcaccagacacaccggcgtgcccgatagattttccggcagcggctccggcaccgacttcaccctgacaatcagctccctccagcccgaggacgtggcaacctactactgccagcagtacagcagctacccctacaccttcggccagggcaccaaggtggaaatcaagagactcgagggacagcctaaggccaatcctaccgtgacactgttccctccaagcagcgaagaactccaggccaacaaggccacacttgtgtgcctgatctccgacttctaccctggggctgtgacagtggcttggaaggccgatggatctcctgtgaaagccggcgtggaaaccaccaagccatccaagcagagcaacaacaaatacgccgccagctcctacctgagcctgacacctgagcagtggaagtcccacagatcctacagctgccaagtgacccacgaaggcagcaccgtggaaaagacagtggcccctacagagtgcagcggcagagccgattgcggctttaccagcgagagctaccagcagggcgtgctgagcgccaccatcctgtacgagatcctgctgggcaaggccaccctgtacgccgtgctggtgtctgccctggtgctgatggctatggtcaagcggaaggacagccggggacgcgccaagagaagcggatctggcgtgaagcagaccctgaatttcgacctgctgaagctggctggcgacgtggaatccaacccaggccctactagtatggactggatttggcgcatccttttccttgtcggcgctgctaccggcgcgcattccttcgaagaagtgcaactggtggaatcaggcggcggactggtgcagcctggcggatctctgagactgagctgtgccgccagcggcttcgacttcagccggtactggatgagctgggtgcgccaggcccctggcaaaggactggaatggatcggcgagatcaaccccgacagcagcaccatcaactacacccccagcctgaaggacaagttcatcatcagccgggacaacgccaagaacagcctgtacctccagatgaactccctgcgggccgaggacaccgccgtgtactattgcgccagacccgacggcaactactggtacttcgacgtgtggggccagggaaccctcgtgaccgtgtcatctacgcgtgcctctacaaagggaccctccgtgtttcctctggctcccagcagcaagtctacaagcggaggaacagccgctctgggctgcctggtcaaggattactttcccgagcctgtgaccgtgtcctggaatagcggagcactgacaagcggcgtgcacacctttccagccgtgctgcaaagcagcggcctgtactctctgagcagcgtggtcacagtgcctagctctagcctgggcacccagacctacatctgcaatgtgaaccacaagcctagcaacaccaaggtggacaagagagtggaacccaagagctgtatccccgaggacacattcttcccaagccccgagagcagctgcgacgtgaagctggtggaaaagagcttcgagacagacaccaacctgaacttccagaacctgagcgtgatcggcttcagaatcctgctgctgaaagtggccggctttaacctgctgatgaccctgcggctgtggtccagc

SEQ ID NO: 21785 - DNA, 2628 bp, Artificial Sequence
  Synthetic Polynucleotide
atggccttaccagtgaccgccttgctcctgccgctggccttgctgctccacgccgccaggccggaagtgcagctggttgaatctggcggaggactggttcagcctggcggatctctgagactgtcttgtgccgccagcggcttcagcttcagcgacttttggatgagctgggtccgacaggcccctggcaaaggacttgaatgggtcgccacaatcagccaggccggcagcgagaaggactacgtggactctgtgaagggcagattcaccatcagccgggacaacgccaagaagtccctgtacctccagatgaacagcctgagagccgaggacaccgccgtgtactattgtgcctctggcgtgtacagcttcgactacagaggccagggcaccctggtcacagtctcttctggtaccggcggaggcggatctggcggcggaggtagcggtggcggaggatctgaattcatcacatgcaaggccagccaggacgtgggaatcgccgtggcctggtatcagcagaaacccggcaaggtgcccaagctgctgatctactgggccagcaccagacacaccggcgtgcccgatagattttccggcagcggctccggcaccgacttcaccctgacaatcagctccctccagcccgaggacgtggcaacctactactgccagcagtacagcagctacccctacaccttcggccagggcaccaaggtggaaatcaagagactcgagatccagaaccctgatcctgccgtgtaccagctgcgggatagcaagagcagcgacaagagcgtgtgtctgttcaccgacttcgacagccagaccaacgtgtcccagagcaaggactccgacgtgtacatcaccgataagtgcgtgctggacatgcggagcatggacttcaagagcaactccgccgtggcctggtccaacaagtccgatttcgcctgcgccaacgccttcaacaacagcattatccccgaggacacattcttcccaagccccgagagcagctgcgacgtgaagctggtggaaaagagcttcgagacagacaccaacctgaacttccagaacctgagcgtgatcggcttcagaatcctgctgctgaaagtggccggctttaacctgctgatgaccctgcggctgtggtccagccgcgccaagagaagcggatctggcgtgaagcagaccctgaatttcgacctgctgaagctggctggcgacgtggaatccaacccaggccctactagtatggactggatttggcgcatccttttccttgtcggcgctgctaccggcgcgcattccgggccccagctccagctgcaagagtctggacctggcctggtcaagcctagcgagacactgagcctgacctgtaccgtgtccggcgatagcatcagcagcggcgattactactggggctggatcagacagcctcctggcaaaggactggaatggatcggccacatctactacagcggcgtgacctactacaaccccagcctgaagtccagagtgaccatcagcgtggacaccagccggaaccagttctccctgaagctgtctagcgtgacagccgccgataccgccgtgtactactgcaccagagaggacagcagcaactggcggagtagaggccagggaacactggtcacagttagctctggatccggcggaggcggaagtggaggcggaggatctggcggcggaggctctttcgaagaagtgcaactggtggaatcaggcggcggactggtgcagcctggcggatctctgagactgagctgtgccgccagcggcttcgacttcagccggtactggatgagctgggtgcgccaggcccctggcaaaggactggaatggatcggcgagatcaaccccgacagcagcaccatcaactacacccccagcctgaaggacaagttcatcatcagccgggacaacgccaagaacagcctgtacctccagatgaactccctgcgggccgaggacaccgccgtgtactattgcgccagacccgacggcaactactggtacttcgacgtgtggggccagggaaccctcgtgaccgtgtcatctacgcgtgaggacctgaagaacgtgttcccacctgaggtggccgtgttcgagcctagcgaggccgagatcagccacacccagaaagccaccctcgtgtgcctggctaccggcttctaccccgaccatgtggaactgtcttggtgggtcaacggcaaagaggtgcacagcggcgtgtgtaccgacccccagccactgaaagaacagcccgccctgaacgacagccggtactgcctgagcagcagactgagagtgtccgccaccttctggcagaacccccggaaccacttcagatgccaggtgcagttctacggcctgagcgagaacgacgagtggacccaggacagagccaagcccgtgacccagatcgtgtctgccgaagcctggggcagagccgattgcggctttaccagcgagagctaccagcagggcgtgctgagcgccaccatcctgtacgagatcctgctgggcaaggccaccctgtacgccgtgctggtgtctgccctggtgctgatggctatggtcaagcggaaggacagccgggga

SEQ ID NO: 21786 - DNA, 2694 bp, Artificial Sequence
  Synthetic Polynucleotide
atggccttaccagtgaccgccttgctcctgccgctggccttgctgctccacgccgccaggccggaagtgcagctggttgaatctggcggaggactggttcagcctggcggatctctgagactgtcttgtgccgccagcggcttcagcttcagcgacttttggatgagctgggtccgacaggcccctggcaaaggacttgaatgggtcgccacaatcagccaggccggcagcgagaaggactacgtggactctgtgaagggcagattcaccatcagccgggacaacgccaagaagtccctgtacctccagatgaacagcctgagagccgaggacaccgccgtgtactattgtgcctctggcgtgtacagcttcgactacagaggccagggcaccctggtcacagtctcttctggtaccggcggaggcggatctggcggcggaggtagcggtggcggaggatctgaattcatcacatgcaaggccagccaggacgtgggaatcgccgtggcctggtatcagcagaaacccggcaaggtgcccaagctgctgatctactgggccagcaccagacacaccggcgtgcccgatagattttccggcagcggctccggcaccgacttcaccctgacaatcagctccctccagcccgaggacgtggcaacctactactgccagcagtacagcagctacccctacaccttcggccagggcaccaaggtggaaatcaagagactcgagggacagcctaaggccaatcctaccgtgacactgttccctccaagcagcgaagaactccaggccaacaaggccacacttgtgtgcctgatctccgacttctaccctggggctgtgacagtggcttggaaggccgatggatctcctgtgaaagccggcgtggaaaccaccaagccatccaagcagagcaacaacaaatacgccgccagctcctacctgagcctgacacctgagcagtggaagtcccacagatcctacagctgccaagtgacccacgaaggcagcaccgtggaaaagacagtggcccctacagagtgcagccccatcaagaccgatgtgattacaatggaccccaaggacaactgctccaaggacgccaacgataccctgctgctccagctgaccaacaccagcgcctactacatgtacttgttgctgctgctgaagtccgtggtgtacttcgccatcatcacatgctgcctgctgcggagaaccgccttctgctgcaacggcgagaagtctagggccaagcgatctggatctggagcaacaaacttctcactactcaaacaagcaggtgacgtggaggagaatcccgggcctactagtatggactggatttggcgcatccttttccttgtcggcgctgctaccggcgcgcattccgggccccagctccagctgcaagagtctggacctggcctggtcaagcctagcgagacactgagcctgacctgtaccgtgtccggcgatagcatcagcagcggcgattactactggggctggatcagacagcctcctggcaaaggactggaatggatcggccacatctactacagcggcgtgacctactacaaccccagcctgaagtccagagtgaccatcagcgtggacaccagccggaaccagttctccctgaagctgtctagcgtgacagccgccgataccgccgtgtactactgcaccagagaggacagcagcaactggcggagtagaggccagggaacactggtcacagttagctctggatccggcggaggcggaagtggaggcggaggatctggcggcggaggctctttcgaagaagtgcaactggtggaatcaggcggcggactggtgcagcctggcggatctctgagactgagctgtgccgccagcggcttcgacttcagccggtactggatgagctgggtgcgccaggcccctggcaaaggactggaatggatcggcgagatcaaccccgacagcagcaccatcaactacacccccagcctgaaggacaagttcatcatcagccgggacaacgccaagaacagcctgtacctccagatgaactccctgcgggccgaggacaccgccgtgtactattgcgccagacccgacggcaactactggtacttcgacgtgtggggccagggaaccctcgtgaccgtgtcatctacgcgtgcctctacaaagggaccctccgtgtttcctctggctcccagcagcaagtctacaagcggaggaacagccgctctgggctgcctggtcaaggattactttcccgagcctgtgaccgtgtcctggaatagcggagcactgacaagcggcgtgcacacctttccagccgtgctgcaaagcagcggcctgtactctctgagcagcgtggtcacagtgcctagctctagcctgggcacccagacctacatctgcaatgtgaaccacaagcctagcaacaccaaggtggacaagagagtggaacccaagagctgtgaagtgaaaaccgactccaccgaccacgtgaagcccaaagagacagagaacaccaagcagcccagcaagagctgccacaagcccaaggccatcgtgcacaccgagaaagtgaacatgatgagcctgaccgtgctgggcctgcggatgctgttcgccaaaaccgtggccgtgaacttcctgctgaccgccaagctgttcttcctc

SEQ ID NO: 21787 - DNA, 2637 bp, Artificial Sequence
  Synthetic Polynucleotide
atggccttaccagtgaccgccttgctcctgccgctggccttgctgctccacgccgccaggccggaagtgcagctggttgaatctggcggaggactggttcagcctggcggatctctgagactgtcttgtgccgccagcggcttcagcttcagcgacttttggatgagctgggtccgacaggcccctggcaaaggacttgaatgggtcgccacaatcagccaggccggcagcgagaaggactacgtggactctgtgaagggcagattcaccatcagccgggacaacgccaagaagtccctgtacctccagatgaacagcctgagagccgaggacaccgccgtgtactattgtgcctctggcgtgtacagcttcgactacagaggccagggcaccctggtcacagtctcttctggtaccggcggaggcggatctggcggcggaggtagcggtggcggaggatctgaattcatcacatgcaaggccagccaggacgtgggaatcgccgtggcctggtatcagcagaaacccggcaaggtgcccaagctgctgatctactgggccagcaccagacacaccggcgtgcccgatagattttccggcagcggctccggcaccgacttcaccctgacaatcagctccctccagcccgaggacgtggcaacctactactgccagcagtacagcagctacccctacaccttcggccagggcaccaaggtggaaatcaagagactcgagggacagcctaaggccaatcctaccgtgacactgttccctccaagcagcgaagaactccaggccaacaaggccacacttgtgtgcctgatctccgacttctaccctggggctgtgacagtggcttggaaggccgatggatctcctgtgaaagccggcgtggaaaccaccaagccatccaagcagagcaacaacaaatacgccgccagctcctacctgagcctgacacctgagcagtggaagtcccacagatcctacagctgccaagtgacccacgaaggcagcaccgtggaaaagacagtggcccctacagagtgcagcggcagagccgattgcggctttaccagcgagagctaccagcagggcgtgctgagcgccaccatcctgtacgagatcctgctgggcaaggccaccctgtacgccgtgctggtgtctgccctggtgctgatggctatggtcaagcggaaggacagccggggacgcgccaagagaagcggatctggcgtgaagcagaccctgaatttcgacctgctgaagctggctggcgacgtggaatccaacccaggccctactagtatggactggatttggcgcatccttttccttgtcggcgctgctaccggcgcgcattccgggccccagctccagctgcaagagtctggacctggcctggtcaagcctagcgagacactgagcctgacctgtaccgtgtccggcgatagcatcagcagcggcgattactactggggctggatcagacagcctcctggcaaaggactggaatggatcggccacatctactacagcggcgtgacctactacaaccccagcctgaagtccagagtgaccatcagcgtggacaccagccggaaccagttctccctgaagctgtctagcgtgacagccgccgataccgccgtgtactactgcaccagagaggacagcagcaactggcggagtagaggccagggaacactggtcacagttagctctggatccggcggaggcggaagtggaggcggaggatctggcggcggaggctctttcgaagaagtgcaactggtggaatcaggcggcggactggtgcagcctggcggatctctgagactgagctgtgccgccagcggcttcgacttcagccggtactggatgagctgggtgcgccaggcccctggcaaaggactggaatggatcggcgagatcaaccccgacagcagcaccatcaactacacccccagcctgaaggacaagttcatcatcagccgggacaacgccaagaacagcctgtacctccagatgaactccctgcgggccgaggacaccgccgtgtactattgcgccagacccgacggcaactactggtacttcgacgtgtggggccagggaaccctcgtgaccgtgtcatctacgcgtgcctctacaaagggaccctccgtgtttcctctggctcccagcagcaagtctacaagcggaggaacagccgctctgggctgcctggtcaaggattactttcccgagcctgtgaccgtgtcctggaatagcggagcactgacaagcggcgtgcacacctttccagccgtgctgcaaagcagcggcctgtactctctgagcagcgtggtcacagtgcctagctctagcctgggcacccagacctacatctgcaatgtgaaccacaagcctagcaacaccaaggtggacaagagagtggaacccaagagctgtatccccgaggacacattcttcccaagccccgagagcagctgcgacgtgaagctggtggaaaagagcttcgagacagacaccaacctgaacttccagaacctgagcgtgatcggcttcagaatcctgctgctgaaagtggccggctttaacctgctgatgaccctgcggctgtggtccagc

SEQ ID NO: 21788 - DNA, 2550 bp, Artificial Sequence
  Synthetic Polynucleotide
atggccttaccagtgaccgccttgctcctgccgctggccttgctgctccacgccgccaggccgcaggccgtggttacacaagagcctagcctgacagtgtcccctggcggaacagtgacactgacatgtggcagctctacaggcgccgtgaccaccagcaattacgcctcttgggtgcaagagaagcccgaccacctgttcagaggactgatcggcggcaccaacaatagagcacctggcgtgccagccagattcagcggatcactgctcggaggaaaggccgctctgacaatctctggtgcccagcctgaggacgaggccatctacttttgcgtgctgtggtacagcgaccactgggttttcggcggaggcaccaagctgacagttgatctcgagatccagaaccctgatcctgccgtgtaccagctgcgggatagcaagagcagcgacaagagcgtgtgtctgttcaccgacttcgacagccagaccaacgtgtcccagagcaaggactccgacgtgtacatcaccgataagtgcgtgctggacatgcggagcatggacttcaagagcaactccgccgtggcctggtccaacaagtccgatttcgcctgcgccaacgccttcaacaacagcattatccccgaggacacattcttcccaagcagcgacgtgccctgcgacgtgaagctggtggaaaagagcttcgagacagacaccaacctgaacttccagaacctgagcgtgatcggcttcagaatcctgctgctgaaagtggccggctttaacctgctgatgaccctgcggctgtggtccagccgcgccaagagaagcggatctggcgtgaagcagaccctgaatttcgacctgctgaagctggctggcgacgtggaatccaacccaggccctactagtatggactggatttggcgcatccttttccttgtcggcgctgctaccggcgcgcattccttcgaacaagttcagctccagcaatctggccctggcctggtcaagcctagcgagacactgagcatcacctgtaccgtgtccggcttcctgctgaccgattacggcgtgaactgggtccgacagcctcctggcaaaggactggaatggctgggagtgatctggggcgacggcatcaccgactacaacccaagcctgaagtcccggctgaccgtgtccaaggacaccagcaagaatcaggtgtccctgaagatgagcagcctgaccgatgccgacacagcccggtactactgtgtgaccggcctgttcgattattggggccagggcacaaccctgactgtgtctagtacgcgtgaggacctgaagaacgtgttcccacctgaggtggccgtgttcgagcctagcaaggccgagatcgcccacacccagaaagccaccctcgtgtgcctggctaccggcttctaccccgaccatgtggaactgtcttggtgggtcaacggcaaagaggtgcacagcggcgtgtgtaccgacccccagccactgaaagaacagcccgccctgaacgacagccggtactgcctgagcagcagactgagagtgtccgccaccttctggcagaacccccggaaccacttcagatgccaggtgcagttctacggcctgagcgagaacgacgagtggacccaggacagagccaagcccgtgacccagatcgtgtctgccgaagcctggggcagagccgattgcggcatcaccagcgccagctaccaccagggcgtgctgagcgccaccatcctgtacgagatcctgctgggcaaggccaccctgtacgccgtgctggtgtctgccctggtgctgatggctatggtcaagcggaaggacagccggggaagggccaagcgatctggatctggagcaacaaacttctcactactcaaacaagcaggtgacgtggaggagaatcccgggccttctagaggccatatgaccgagtacaagcccacggtgcgcctcgccacccgcgacgacgtccccagggccgtacgcaccctcgccgccgcgttcgccgactaccccgccacgcgccacaccgtcgatccggaccgccacatcgagcgggtcaccgagctgcaagaactcttcctcacgcgcgtcgggctcgacatcggcaaggtgtgggtcgcggacgacggcgccgcggtggcggtctggaccacgccggagagcgtcgaagcgggggcggtgttcgccgagatcggcccgcgcatggccgagttgagcggttcccggctggccgcgcagcaacagatggaaggcctcctggcgccgcaccggcccaaggagcccgcgtggttcctggccaccgtcggcgtctcgcccgaccaccagggcaagggtctgggcagcgccgtcgtgctccccggagtggaggcggccgagcgcgccggggtgcccgccttcctggagacctccgcgccccgcaacctccccttctacgagcggctcggcttcaccgtcaccgccgacgtcgaggtgcccgaaggaccgcgcacctggtgcatgacccgcaagcccggtgcctga

SEQ ID NO: 21789 - DNA, 2547 bp, Artificial Sequence
  Synthetic Polynucleotide
atggccttaccagtgaccgccttgctcctgccgctggccttgctgctccacgccgccaggccgcaggccgtggttacacaagagcctagcctgacagtgtcccctggcggaacagtgacactgacatgtggcagctctacaggcgccgtgaccaccagcaattacgcctcttgggtgcaagagaagcccgaccacctgttcagaggactgatcggcggcaccaacaatagagcacctggcgtgccagccagattcagcggatcactgctcggaggaaaggccgctctgacaatctctggtgcccagcctgaggacgaggccatctacttttgcgtgctgtggtacagcgaccactgggttttcggcggaggcaccaagctgacagttgatctcgaggacctgaagaacgtgttcccacctgaggtggccgtgttcgagcctagcaaggccgagatcgcccacacccagaaagccaccctcgtgtgcctggctaccggcttctaccccgaccatgtggaactgtcttggtgggtcaacggcaaagaggtgcacagcggcgtgtgtaccgacccccagccactgaaagaacagcccgccctgaacgacagccggtactgcctgagcagcagactgagagtgtccgccaccttctggcagaacccccggaaccacttcagatgccaggtgcagttctacggcctgagcgagaacgacgagtggacccaggacagagccaagcccgtgacccagatcgtgtctgccgaagcctggggcagagccgattgcggcatcaccagcgccagctaccaccagggcgtgctgagcgccaccatcctgtacgagatcctgctgggcaaggccaccctgtacgccgtgctggtgtctgccctggtgctgatggctatggtcaagcggaaggacagccggggaagggccaagcgatctggatctggagcaacaaacttctcactactcaaacaagcaggtgacgtggaggagaatcccgggcctactagtatggactggatttggcgcatccttttccttgtcggcgctgctaccggcgcgcattccttcgaacaagttcagctccagcaatctggccctggcctggtcaagcctagcgagacactgagcatcacctgtaccgtgtccggcttcctgctgaccgattacggcgtgaactgggtccgacagcctcctggcaaaggactggaatggctgggagtgatctggggcgacggcatcaccgactacaacccaagcctgaagtcccggctgaccgtgtccaaggacaccagcaagaatcaggtgtccctgaagatgagcagcctgaccgatgccgacacagcccggtactactgtgtgaccggcctgttcgattattggggccagggcacaaccctgactgtgtctagtacgcgtatccagaaccctgatcctgccgtgtaccagctgcgggatagcaagagcagcgacaagagcgtgtgtctgttcaccgacttcgacagccagaccaacgtgtcccagagcaaggactccgacgtgtacatcaccgataagtgcgtgctggacatgcggagcatggacttcaagagcaactccgccgtggcctggtccaacaagtccgatttcgcctgcgccaacgccttcaacaacagcattatccccgaggacacattcttcccaagcagcgacgtgccctgcgacgtgaagctggtggaaaagagcttcgagacagacaccaacctgaacttccagaacctgagcgtgatcggcttcagaatcctgctgctgaaagtggccggctttaacctgctgatgaccctgcggctgtggtccagccgcgccaagagaagcggatctggcgtgaagcagaccctgaatttcgacctgctgaagctggctggcgacgtggaatccaacccaggcccttctagaggccatatgaccgagtacaagcccacggtgcgcctcgccacccgcgacgacgtccccagggccgtacgcaccctcgccgccgcgttcgccgactaccccgccacgcgccacaccgtcgatccggaccgccacatcgagcgggtcaccgagctgcaagaactcttcctcacgcgcgtcgggctcgacatcggcaaggtgtgggtcgcggacgacggcgccgcggtggcggtctggaccacgccggagagcgtcgaagcgggggcggtgttcgccgagatcggcccgcgcatggccgagttgagcggttcccggctggccgcgcagcaacagatggaaggcctcctggcgccgcaccggcccaaggagcccgcgtggttcctggccaccgtcggcgtctcgcccgaccaccagggcaagggtctgggcagcgccgtcgtgctccccggagtggaggcggccgagcgcgccggggtgcccgccttcctggagacctccgcgccccgcaacctccccttctacgagcggctcggcttcaccgtcaccgccgacgtcgaggtgcccgaaggaccgcgcacctggtgcatgacccgcaagcccggtgcctga

SEQ ID NO: 21790 - DNA, 1845 bp, Artificial Sequence
  Synthetic Polynucleotide
atggccttaccagtgaccgccttgctcctgccgctggccttgctgctccacgccgccaggccgcaggccgtggttacacaagagcctagcctgacagtgtcccctggcggaacagtgacactgacatgtggcagctctacaggcgccgtgaccaccagcaattacgcctcttgggtgcaagagaagcccgaccacctgttcagaggactgatcggcggcaccaacaatagagcacctggcgtgccagccagattcagcggatcactgctcggaggaaaggccgctctgacaatctctggtgcccagcctgaggacgaggccatctacttttgcgtgctgtggtacagcgaccactgggttttcggcggaggcaccaagctgacagttgatctcgaggacctgaagaacgtgttcccacctgaggtggccgtgttcgagcctagcgaggccgagatcagccacacccagaaagccaccctcgtgtgcctggctaccggcttctaccccgaccatgtggaactgtcttggtgggtcaacggcaaagaggtgcacagcggcgtgtgtaccgacccccagccactgaaagaacagcccgccctgaacgacagccggtactgcctgagcagcagactgagagtgtccgccaccttctggcagaacccccggaaccacttcagatgccaggtgcagttctacggcctgagcgagaacgacgagtggacccaggacagagccaagcccgtgacccagatcgtgtctgccgaagcctggggcagagccgattgcggctttaccagcgagagctaccagcagggcgtgctgagcgccaccatcctgtacgagatcctgctgggcaaggccaccctgtacgccgtgctggtgtctgccctggtgctgatggctatggtcaagcggaaggacagccggggaagggccaagcgatctggatctggagcaacaaacttctcactactcaaacaagcaggtgacgtggaggagaatcccgggcctactagtatggactggatttggcgcatccttttccttgtcggcgctgctaccggcgcgcattccttcgaacaagttcagctccagcaatctggccctggcctggtcaagcctagcgagacactgagcatcacctgtaccgtgtccggcttcctgctgaccgattacggcgtgaactgggtccgacagcctcctggcaaaggactggaatggctgggagtgatctggggcgacggcatcaccgactacaacccaagcctgaagtcccggctgaccgtgtccaaggacaccagcaagaatcaggtgtccctgaagatgagcagcctgaccgatgccgacacagcccggtactactgtgtgaccggcctgttcgattattggggccagggcacaaccctgactgtgtctagtacgcgtatccagaaccctgatcctgccgtgtaccagctgcgggatagcaagagcagcgacaagagcgtgtgtctgttcaccgacttcgacagccagaccaacgtgtcccagagcaaggactccgacgtgtacatcaccgataagtgcgtgctggacatgcggagcatggacttcaagagcaactccgccgtggcctggtccaacaagtccgatttcgcctgcgccaacgccttcaacaacagcattatccccgaggacacattcttcccaagccccgagagcagctgcgacgtgaagctggtggaaaagagcttcgagacagacaccaacctgaacttccagaacctgagcgtgatcggcttcagaatcctgctgctgaaagtggccggctttaacctgctgatgaccctgcggctgtggtccagc

SEQ ID NO: 21791 - DNA, 1857 bp, Artificial Sequence
  Synthetic Polynucleotide
atggccttaccagtgaccgccttgctcctgccgctggccttgctgctccacgccgccaggccgcaggccgtggttacacaagagcctagcctgacagtgtcccctggcggaacagtgacactgacatgtggcagctctacaggcgccgtgaccaccagcaattacgcctcttgggtgcaagagaagcccgaccacctgttcagaggactgatcggcggcaccaacaatagagcacctggcgtgccagccagattcagcggatcactgctcggaggaaaggccgctctgacaatctctggtgcccagcctgaggacgaggccatctacttttgcgtgctgtggtacagcgaccactgggttttcggcggaggcaccaagctgacagttgatctcgagatccagaaccctgatcctgccgtgtaccagctgcgggatagcaagagcagcgacaagagcgtgtgtctgttcaccgacttcgacagccagaccaacgtgtcccagagcaaggactccgacgtgtacatcaccgataagtgcgtgctggacatgcggagcatggacttcaagagcaactccgccgtggcctggtccaacaagtccgatttcgcctgcgccaacgccttcaacaacagcattatccccgaggacacattcttcccaagccccgagagcagctgcgacgtgaagctggtggaaaagagcttcgagacagacaccaacctgaacttccagaacctgagcgtgatcggcttcagaatcctgctgctgaaagtggccggctttaacctgctgatgaccctgcggctgtggtccagccgcgccaagagaagcggatctggcgtgaagcagaccctgaatttcgacctgctgaagctggctggcgacgtggaatccaacccaggccctactagtatggactggatttggcgcatccttttccttgtcggcgctgctaccggcgcgcattccttcgaacaagttcagctccagcaatctggccctggcctggtcaagcctagcgagacactgagcatcacctgtaccgtgtccggcttcctgctgaccgattacggcgtgaactgggtccgacagcctcctggcaaaggactggaatggctgggagtgatctggggcgacggcatcaccgactacaacccaagcctgaagtcccggctgaccgtgtccaaggacaccagcaagaatcaggtgtccctgaagatgagcagcctgaccgatgccgacacagcccggtactactgtgtgaccggcctgttcgattattggggccagggcacaaccctgactgtgtctagtacgcgtgaggacctgaagaacgtgttcccacctgaggtggccgtgttcgagcctagcgaggccgagatcagccacacccagaaagccaccctcgtgtgcctggctaccggcttctaccccgaccatgtggaactgtcttggtgggtcaacggcaaagaggtgcacagcggcgtgtgtaccgacccccagccactgaaagaacagcccgccctgaacgacagccggtactgcctgagcagcagactgagagtgtccgccaccttctggcagaacccccggaaccacttcagatgccaggtgcagttctacggcctgagcgagaacgacgagtggacccaggacagagccaagcccgtgacccagatcgtgtctgccgaagcctggggcagagccgattgcggctttaccagcgagagctaccagcagggcgtgctgagcgccaccatcctgtacgagatcctgctgggcaaggccaccctgtacgccgtgctggtgtctgccctggtgctgatggctatggtcaagcggaaggacagccgggga

SEQ ID NO: 21792-21806 - skipped (15 entries)

SEQ ID NO: 21807 - DNA, 1866 bp, Artificial Sequence
  Synthetic Polynucleotide
atggccttaccagtgaccgccttgctcctgccgctggccttgctgctccacgccgccaggccggacatccagatgacacagagccctagcagcctgtctgccagcgtgggagacagagtgaccatcacatgcaaggccagcgaccacatcaacaactggctggcctggtatcagcagaagcctggacaggcccctaagctgctgatctacggcgctaccacactggaaacaggcgtgcccagcagattttctggcagcggctctggcaccgactacaccctgacaatatccagcctccagcctgaggacttcgccacctactactgtcagcagagctggaacaccccttggacattcggccagggcaccaagctggaaatcaagagactcgaggacctgaaaaacgtgttcccacccgaggtcgctgtgtttgagccatcagaagcagagatctcccacacccaaaaggccacactggtatgcctggccacaggcttctaccccgaccacgtggagctgagctggtgggtgaatgggaaggaggtgcacagtggggtcagcacagacccgcagcccctcaaggagcagcccgccctcaatgactccagatactgcctgagcagccgcctgagggtctcggccaccttctggcagaacccccgcaaccacttccgctgtcaagtccagttctacgggctctcggagaatgacgagtggacccaggatagggccaaacccgtcacccagatcgtcagcgccgaggcctggggtagagcagactgtggcttcacctccgagtcttaccagcaaggggtcctgtctgccaccatcctctatgagatcttgctagggaaggccaccttgtatgccgtgctggtcagtgccctcgtgctgatggccatggtcaagagaaaggattccagaggcagggccaagcgatctggatctggagcaacaaacttctcactactcaaacaagcaggtgacgtggaggagaatcccgggcctactagtatggactggatttggcgcatccttttccttgtcggcgctgctaccggcgcccattccttcgaacaagttcagcttcaacagcctggcgctgagctggtcaaacctggcgcttctgtgaagatgagctgcaaagccagcggctacgccttcagcagctactggatcaactggatgaagcagaaacccggccagggactcgaatggatcggccaaatctatcccggcgacggcgacaccaactacaacggcaagttcaagggcagagccacactgaccgccgatacctctagcagcacagcctacatgcagctgagcagcctgaccagcgaagatagcgccgtgtacttctgtgcccggtccatcacaacagtcgtgggctgcgctatggactattggggccagggaacaagcgtgaccgtgtctagtacgcgtatccagaaccctgaccctgccgtgtaccagctgagagactctaaatccagtgacaagtctgtctgcctattcaccgattttgattctcaaacaaatgtgtcacaaagtaaggattctgatgtgtatatcacagacaaaactgtgctagacatgaggtctatggacttcaagagcaacagtgctgtggcctggagcaacaaatctgactttgcatgtgcaaacgccttcaacaacagcattattccagaagacaccttcttccccagcccagaaagttcctgtgatgtcaagctggtcgagaaaagctttgaaacagatacgaacctaaactttcaaaacctgtcagtgattgggttccgaatcctcctcctgaaagtggccgggtttaatctgctcatgacgctgcggctgtggtccagc

SEQ ID NO: 21808 - DNA, 2277 bp, Artificial Sequence
  Synthetic Polynucleotide
atggccttaccagtgaccgccttgctcctgccgctggccttgctgctccacgccgccaggccggacatccagatgacacagagccctagcagcctgtctgccagcgtgggagacagagtgaccatcacatgcaaggccagcgaccacatcaacaactggctggcctggtatcagcagaagcctggacaggcccctaagctgctgatctacggcgctaccacactggaaacaggcgtgcccagcagattttctggcagcggctctggcaccgactacaccctgacaatatccagcctccagcctgaggacttcgccacctactactgtcagcagagctggaacaccccttggacattcggccagggcaccaagctggaaatcaagagactcgaggacctgaaaaacgtgttcccacccgaggtcgctgtgtttgagccatcagaagcagagatctcccacacccaaaaggccacactggtatgcctggccacaggcttctaccccgaccacgtggagctgagctggtgggtgaatgggaaggaggtgcacagtggggtcagcacagacccgcagcccctcaaggagcagcccgccctcaatgactccagatactgcctgagcagccgcctgagggtctcggccaccttctggcagaacccccgcaaccacttccgctgtcaagtccagttctacgggctctcggagaatgacgagtggacccaggatagggccaaacccgtcacccagatcgtcagcgccgaggcctggggtagagcagactgtggcttcacctccgagtcttaccagcaaggggtcctgtctgccaccatcctctatgagatcttgctagggaaggccaccttgtatgccgtgctggtcagtgccctcgtgctgatggccatggtcaagagaaaggattccagaggcagggccaagcgatctggatctggagcaacaaacttctcactactcaaacaagcaggtgacgtggaggagaatcccgggcctactagtatggactggatttggcgcatccttttccttgtcggcgctgctaccggcgcccattccgggccccaggttcagctgcaagagtctggcggaggacttgctcaagctggcggaagcctgagactgtcttgtgccgcctctggcagaaccttcagcatgggctggtttagacaggcccctggcaaagagagagagttcgtcgccgccatcacatacagcggcggcagcccttactacgcctcttctgtcagaggccggttcaccatcagccgggacaacgccaagaacaccgtgtacctccagatgaacagcctgaagccagaggacaccgccgtgtactactgtgccgccaatccaacctacggcagcgactggaatgccgagaattggggccagggcacccaagtgacagtgtctagtggatccggcggcggaggatctggcggaggcggatctgggggcggaggctctttcgaacaagttcagcttcaacagcctggcgctgagctggtcaaacctggcgcttctgtgaagatgagctgcaaagccagcggctacgccttcagcagctactggatcaactggatgaagcagaaacccggccagggactcgaatggatcggccaaatctatcccggcgacggcgacaccaactacaacggcaagttcaagggcagagccacactgaccgccgatacctctagcagcacagcctacatgcagctgagcagcctgaccagcgaagatagcgccgtgtacttctgtgcccggtccatcacaacagtcgtgggctgcgctatggactattggggccagggaacaagcgtgaccgtgtctagtacgcgtatccagaaccctgaccctgccgtgtaccagctgagagactctaaatccagtgacaagtctgtctgcctattcaccgattttgattctcaaacaaatgtgtcacaaagtaaggattctgatgtgtatatcacagacaaaactgtgctagacatgaggtctatggacttcaagagcaacagtgctgtggcctggagcaacaaatctgactttgcatgtgcaaacgccttcaacaacagcattattccagaagacaccttcttccccagcccagaaagttcctgtgatgtcaagctggtcgagaaaagctttgaaacagatacgaacctaaactttcaaaacctgtcagtgattgggttccgaatcctcctcctgaaagtggccgggtttaatctgctcatgacgctgcggctgtggtccagc

SEQ ID NO: 21809 - DNA, 2688 bp, Artificial Sequence
  Synthetic Polynucleotide
atggccttaccagtgaccgccttgctcctgccgctggccttgctgctccacgccgccaggccgcagctccagctgcaagagtctggacctggcctggtcaagcctagcgagacactgagcctgacctgtaccgtgtccggcgatagcatcagcagcggcgattactactggggctggatcagacagcctcctggcaaaggactggaatggatcggccacatctactacagcggcgtgacctactacaaccccagcctgaagtccagagtgaccatcagcgtggacaccagccggaaccagttctccctgaagctgtctagcgtgacagccgccgataccgccgtgtactactgcaccagagaggacagcagcaactggcggagtagaggccagggaacactggtcacagttagctctggtaccggcggaggcggatctggcggcggaggtagcggtggcggaggatctgaattcgacatccagatgacacagagccctagcagcctgtctgccagcgtgggagacagagtgaccatcacatgcaaggccagcgaccacatcaacaactggctggcctggtatcagcagaagcctggacaggcccctaagctgctgatctacggcgctaccacactggaaacaggcgtgcccagcagattttctggcagcggctctggcaccgactacaccctgacaatatccagcctccagcctgaggacttcgccacctactactgtcagcagagctggaacaccccttggacattcggccagggcaccaagctggaaatcaagagactcgaggacctgaaaaacgtgttcccacccgaggtcgctgtgtttgagccatcagaagcagagatctcccacacccaaaaggccacactggtatgcctggccacaggcttctaccccgaccacgtggagctgagctggtgggtgaatgggaaggaggtgcacagtggggtcagcacagacccgcagcccctcaaggagcagcccgccctcaatgactccagatactgcctgagcagccgcctgagggtctcggccaccttctggcagaacccccgcaaccacttccgctgtcaagtccagttctacgggctctcggagaatgacgagtggacccaggatagggccaaacccgtcacccagatcgtcagcgccgaggcctggggtagagcagactgtggcttcacctccgagtcttaccagcaaggggtcctgtctgccaccatcctctatgagatcttgctagggaaggccaccttgtatgccgtgctggtcagtgccctcgtgctgatggccatggtcaagagaaaggattccagaggcagggccaagcgatctggatctggagcaacaaacttctcactactcaaacaagcaggtgacgtggaggagaatcccgggcctactagtatggactggatttggcgcatccttttccttgtcggcgctgctaccggcgcccattccgggccccaggttcagctgcaagagtctggcggaggacttgctcaagctggcggaagcctgagactgtcttgtgccgcctctggcagaaccttcagcatgggctggtttagacaggcccctggcaaagagagagagttcgtcgccgccatcacatacagcggcggcagcccttactacgcctcttctgtcagaggccggttcaccatcagccgggacaacgccaagaacaccgtgtacctccagatgaacagcctgaagccagaggacaccgccgtgtactactgtgccgccaatccaacctacggcagcgactggaatgccgagaattggggccagggcacccaagtgacagtgtctagtggatccggcggcggaggatctggcggaggcggatctgggggcggaggctctttcgaacaagttcagcttcaacagcctggcgctgagctggtcaaacctggcgcttctgtgaagatgagctgcaaagccagcggctacgccttcagcagctactggatcaactggatgaagcagaaacccggccagggactcgaatggatcggccaaatctatcccggcgacggcgacaccaactacaacggcaagttcaagggcagagccacactgaccgccgatacctctagcagcacagcctacatgcagctgagcagcctgaccagcgaagatagcgccgtgtacttctgtgcccggtccatcacaacagtcgtgggctgcgctatggactattggggccagggaacaagcgtgaccgtgtctagtacgcgtatccagaaccctgaccctgccgtgtaccagctgagagactctaaatccagtgacaagtctgtctgcctattcaccgattttgattctcaaacaaatgtgtcacaaagtaaggattctgatgtgtatatcacagacaaaactgtgctagacatgaggtctatggacttcaagagcaacagtgctgtggcctggagcaacaaatctgactttgcatgtgcaaacgccttcaacaacagcattattccagaagacaccttcttccccagcccagaaagttcctgtgatgtcaagctggtcgagaaaagctttgaaacagatacgaacctaaactttcaaaacctgtcagtgattgggttccgaatcctcctcctgaaagtggccgggtttaatctgctcatgacgctgcggctgtggtccagc

SEQ ID NO: 21810 - DNA, 2649 bp, Artificial Sequence
  Synthetic Polynucleotide
atggccttaccagtgaccgccttgctcctgccgctggccttgctgctccacgccgccaggccggacatccagatgacacagactacatcctcactgtctgcctctctgggagacagagtcaccatcagttgcagggcaagtcaggacattagtaagtacctgaactggtatcagcagaaaccagatggaactgttaaactcctgatctaccatacatcaagattacactcaggagtcccatcaaggttcagtggcagtgggtctggaacagattattctctcaccattagcaacctggagcaagaagatattgccacttacttttgccaacagggtaatacgcttccgtacacgttcggaggggggaccaagctggagatcacactcgaggggaaaccaattcccaaccctcttctgggactggattcaaccggcagcggcgaggacctgaaaaacgtgttcccacccgaggtcgctgtgtttgagccatcagaagcagagatctcccacacccaaaaggccacactggtatgcctggccacaggcttctaccccgaccacgtggagctgagctggtgggtgaatgggaaggaggtgcacagtggggtcagcacagacccgcagcccctcaaggagcagcccgccctcaatgactccagatactgcctgagcagccgcctgagggtctcggccaccttctggcagaacccccgcaaccacttccgctgtcaagtccagttctacgggctctcggagaatgacgagtggacccaggatagggccaaacccgtcacccagatcgtcagcgccgaggcctggggtagagcagactgtggcttcacctccgagtcttaccagcaaggggtcctgtctgccaccatcctctatgagatcttgctagggaaggccaccttgtatgccgtgctggtcagtgccctcgtgctgatggccatggtcaagagaaaggattccagaggcagggccaagcgatctggatctggagcaacaaacttctcactactcaaacaagcaggtgacgtggaggagaatcccgggcctactagtatggactggatttggcgcatccttttccttgtcggcgctgctaccggcgcgcattccttcgaagtgaaactgcaggagtcaggacctggcctggtggcgccctcacagagcctgtccgtcacatgcactgtctcaggggtctcattacccgactatggtgtaagctggattcgccagcctccacgaaagggtctggagtggctgggagtaatatggggtagtgaaaccacatactataattcagctctcaaatccagactgaccatcatcaaggacaactccaagagccaagttttcttaaaaatgaacagtctgcaaactgatgacacagccatttactactgtgccaaacattattactacggtggtagctatgctatggactactggggccaaggaacctcagtcaccgtctcctcaacgcgtgagcagaaactgatctcggaagaggatgggagcggcatccagaaccctgaccctgccgtgtaccagctgagagactctaaatccagtgacaagtctgtctgcctattcaccgattttgattctcaaacaaatgtgtcacaaagtaaggattctgatgtgtatatcacagacaaaactgtgctagacatgaggtctatggacttcaagagcaacagtgctgtggcctggagcaacaaatctgactttgcatgtgcaaacgccttcaacaacagcattattccagaagacaccttcttccccagcccagaaagttcctgtgatgtcaagctggtcgagaaaagctttgaaacagatacgaacctaaactttcaaaacctgtcagtgattgggttccgaatcctcctcctgaaagtggccgggtttaatctgctcatgacgctgcggctgtggtccagccgcgccaagagaagcggatctggcgtgaagcagaccctgaatttcgacctgctgaagctggctggcgacgtggaatccaacccaggcccttctagaggccatatgaccgagtacaagcccacggtgcgcctcgccacccgcgacgacgtccccagggccgtacgcaccctcgccgccgcgttcgccgactaccccgccacgcgccacaccgtcgatccggaccgccacatcgagcgggtcaccgagctgcaagaactcttcctcacgcgcgtcgggctcgacatcggcaaggtgtgggtcgcggacgacggcgccgcggtggcggtctggaccacgccggagagcgtcgaagcgggggcggtgttcgccgagatcggcccgcgcatggccgagttgagcggttcccggctggccgcgcagcaacagatggaaggcctcctggcgccgcaccggcccaaggagcccgcgtggttcctggccaccgtcggcgtctcgcccgaccaccagggcaagggtctgggcagcgccgtcgtgctccccggagtggaggcggccgagcgcgccggggtgcccgccttcctggagacctccgcgccccgcaacctccccttctacgagcggctcggcttcaccgtcaccgccgacgtcgaggtgcccgaaggaccgcgcacctggtgcatgacccgcaagcccggtgcctga

SEQ ID NO: 21811 - DNA, 2601 bp, Artificial Sequence
  Synthetic Polynucleotide
atggccttaccagtgaccgccttgctcctgccgctggccttgctgctccacgccgccaggccggacatccagatgacacagactacatcctcactgtctgcctctctgggagacagagtcaccatcagttgcagggcaagtcaggacattagtaagtacctgaactggtatcagcagaaaccagatggaactgttaaactcctgatctaccatacatcaagattacactcaggagtcccatcaaggttcagtggcagtgggtctggaacagattattctctcaccattagcaacctggagcaagaagatattgccacttacttttgccaacagggtaatacgcttccgtacacgttcggaggggggaccaagctggagatcacactcgaggggagcggcagccagcctcacaccaagcccagcgtgttcgtgatgaagaacggcaccaacgtggcctgcctcgtgaaagagttctaccccaaggacatcaggatcaacctggtgtccagcaagaagatcaccgagttcgaccccgccatcgtgatctcccccagcggcaagtacaacgccgtgaagctggggaagtacgaggacagcaacagcgtgacctgctccgtgcagcacgacaacaagaccgtgcacagcaccgactttgaagtgaaaaccgactccaccgaccacgtgaagcccaaagagacagagaacaccaagcagcccagcaagagctgccacaagcccaaggccatcgtgcacaccgagaaagtgaacatgatgagcctgaccgtgctgggcctgcggatgctgttcgccaaaaccgtggccgtgaacttcctgctgaccgccaagctgttcttcctccgcgccaagagaagcggatctggcgtgaagcagaccctgaatttcgacctgctgaagctggctggcgacgtggaatccaacccaggccctactagtatggactggatttggcgcatccttttccttgtcggcgctgctaccggcgcgcattccttcgaagtgaaactgcaggagtcaggacctggcctggtggcgccctcacagagcctgtccgtcacatgcactgtctcaggggtctcattacccgactatggtgtaagctggattcgccagcctccacgaaagggtctggagtggctgggagtaatatggggtagtgaaaccacatactataattcagctctcaaatccagactgaccatcatcaaggacaactccaagagccaagttttcttaaaaatgaacagtctgcaaactgatgacacagccatttactactgtgccaaacattattactacggtggtagctatgctatggactactggggccaaggaacctcagtcaccgtctcctcaacgcgtggcagcggcgacaagcagctggacgccgacgtgtcccccaagcctaccatcttcctgccctctatcgccgagacaaagctccagaaggccggcacctacctgtgcctgctggaaaagttcttcccagatgtgattaagatccactggcaggaaaagaagtccaacaccatcctgggcagccaggaaggcaacaccatgaagaccaacgacacctacatgaagttcagctggctgaccgtgcccgagaagtccctggacaaagaacacagatgcatcgtgcggcacgaaaacaacaagaacggcgtggaccaggaaatcatcttcccacccatcaagaccgatgtgattacaatggaccccaaggacaactgctccaaggacgccaacgataccctgctgctccagctgaccaacaccagcgcctactacatgtacttgttgctgctgctgaagtccgtggtgtacttcgccatcatcacatgctgcctgctgcggagaaccgccttctgctgcaacggcgagaagtctagggccaagcgatctggatctggagcaacaaacttctcactactcaaacaagcaggtgacgtggaggagaatcccgggccttctagaggccatatgaccgagtacaagcccacggtgcgcctcgccacccgcgacgacgtccccagggccgtacgcaccctcgccgccgcgttcgccgactaccccgccacgcgccacaccgtcgatccggaccgccacatcgagcgggtcaccgagctgcaagaactcttcctcacgcgcgtcgggctcgacatcggcaaggtgtgggtcgcggacgacggcgccgcggtggcggtctggaccacgccggagagcgtcgaagcgggggcggtgttcgccgagatcggcccgcgcatggccgagttgagcggttcccggctggccgcgcagcaacagatggaaggcctcctggcgccgcaccggcccaaggagcccgcgtggttcctggccaccgtcggcgtctcgcccgaccaccagggcaagggtctgggcagcgccgtcgtgctccccggagtggaggcggccgagcgcgccggggtgcccgccttcctggagacctccgcgccccgcaacctccccttctacgagcggctcggcttcaccgtcaccgccgacgtcgaggtgcccgaaggaccgcgcacctggtgcatgacccgcaagcccggtgcctga

SEQ ID NO: 21812 - skipped

SEQ ID NO: 21813 - DNA, 2553 bp, Artificial Sequence
  Synthetic Polynucleotide
atggccttaccagtgaccgccttgctcctgccgctggccttgctgctccacgccgccaggccggacatccagatgacacagagccctagcagcctgtctgccagcgtgggagacagagtgaccatcacatgcaaggccagcgaccacatcaacaactggctggcctggtatcagcagaagcctggacaggcccctaagctgctgatctacggcgctaccacactggaaacaggcgtgcccagcagattttctggcagcggctctggcaccgactacaccctgacaatatccagcctccagcctgaggacttcgccacctactactgtcagcagagctggaacaccccttggacattcggccagggcaccaagctggaaatcaagagactcgagttcccacctgaggtggccgtgttcgagcctagcgaggccgagatcagccacacccagaaagccaccctcgtgtgcctggctaccggcttctaccccgaccatgtggaactgtcttggtgggtcaacggcaaagaggtgcacagcggcgtgtgtaccgacccccagccactgaaagaacagcccgccctgaacgacagccggtactgcctgagcagcagactgagagtgtccgccaccttctggcagaacccccggaaccacttcagatgccaggtgcagttctacggcctgagcgagaacgacgagtggacccaggacagagccaagcccgtgacccagatcgtgtctgccgaagcctggggcagagccgattgcggctttaccagcgagagctaccagcagggcgtgctgagcgccaccatcctgtacgagatcctgctgggcaaggccaccctgtacgccgtgctggtgtctgccctggtgctgatggctatggtcaagcggaaggacagccggggaagggccaagcgatctggatctggagcaacaaacttctcactactcaaacaagcaggtgacgtggaggagaatcccgggcctactagtatggactggatttggcgcatccttttccttgtcggcgctgctaccggcgcgcattccttcgaacaagttcagcttcaacagcctggcgctgagctggtcaaacctggcgcttctgtgaagatgagctgcaaagccagcggctacgccttcagcagctactggatcaactggatgaagcagaaacccggccagggactcgaatggatcggccaaatctatcccggcgacggcgacaccaactacaacggcaagttcaagggcagagccacactgaccgccgatacctctagcagcacagcctacatgcagctgagcagcctgaccagcgaagatagcgccgtgtacttctgtgcccggtccatcacaacagtcgtgggctgcgctatggactattggggccagggaacaagcgtgaccgtgtctagtacgcgtatccagaaccctgatcctgccgtgtaccagctgcgggatagcaagagcagcgacaagagcgtgtgtctgttcaccgacttcgacagccagaccaacgtgtcccagagcaaggactccgacgtgtacatcaccgataagtgcgtgctggacatgcggagcatggacttcaagagcaactccgccgtggcctggtccaacaagtccgatttcgcctgcgccaacgccttcaacaacagcattatccccgaggacacattcttcccaagccccgagagcagctgcgacgtgaagctggtggaaaagagcttcgagacagacaccaacctgaacttccagaacctgagcgtgatcggcttcagaatcctgctgctgaaagtggccggctttaacctgctgatgaccctgcggctgtggtccagccgcgccaagagaagcggatctggcgtgaagcagaccctgaatttcgacctgctgaagctggctggcgacgtggaatccaacccaggcccttctagagcccatatgaccgagtacaagcccacggtgcgcctcgccacccgcgacgacgtccccagggccgtacgcaccctcgccgccgcgttcgccgactaccccgccacgcgccacaccgtcgatccggaccgccacatcgagcgggtcaccgagctgcaagaactcttcctcacgcgcgtcgggctcgacatcggcaaggtgtgggtcgcggacgacggcgccgcggtggcggtctggaccacgccggagagcgtcgaagcgggggcggtgttcgccgagatcggcccgcgcatggccgagttgagcggttcccggctggccgcgcagcaacagatggaaggcctcctggcgccgcaccggcccaaggagcccgcgtggttcctggccaccgtcggcgtctcgcccgaccaccagggcaagggtctgggcagcgccgtcgtgctccccggagtggaggcggccgagcgcgccggggtgcccgccttcctggagacctccgcgccccgcaacctccccttctacgagcggctcggcttcaccgtcaccgccgacgtcgaggtgcccgaaggaccgcgcacctggtgcatgacccgcaagcccggtgcctga

SEQ ID NO: 21814 - DNA, 2562 bp, Artificial Sequence
  Synthetic Polynucleotide
atggccttaccagtgaccgccttgctcctgccgctggccttgctgctccacgccgccaggccggacatccagatgacacagagccctagcagcctgtctgccagcgtgggagacagagtgaccatcacatgcaaggccagcgaccacatcaacaactggctggcctggtatcagcagaagcctggacaggcccctaagctgctgatctacggcgctaccacactggaaacaggcgtgcccagcagattttctggcagcggctctggcaccgactacaccctgacaatatccagcctccagcctgaggacttcgccacctactactgtcagcagagctggaacaccccttggacattcggccagggcaccaagctggaaatcaagagactcgagaagaacgtgttcccacctgaggtggccgtgttcgagcctagcgaggccgagatcagccacacccagaaagccaccctcgtgtgcctggctaccggcttctaccccgaccatgtggaactgtcttggtgggtcaacggcaaagaggtgcacagcggcgtgtgtaccgacccccagccactgaaagaacagcccgccctgaacgacagccggtactgcctgagcagcagactgagagtgtccgccaccttctggcagaacccccggaaccacttcagatgccaggtgcagttctacggcctgagcgagaacgacgagtggacccaggacagagccaagcccgtgacccagatcgtgtctgccgaagcctggggcagagccgattgcggctttaccagcgagagctaccagcagggcgtgctgagcgccaccatcctgtacgagatcctgctgggcaaggccaccctgtacgccgtgctggtgtctgccctggtgctgatggctatggtcaagcggaaggacagccggggaagggccaagcgatctggatctggagcaacaaacttctcactactcaaacaagcaggtgacgtggaggagaatcccgggcctactagtatggactggatttggcgcatccttttccttgtcggcgctgctaccggcgcgcattccttcgaacaagttcagcttcaacagcctggcgctgagctggtcaaacctggcgcttctgtgaagatgagctgcaaagccagcggctacgccttcagcagctactggatcaactggatgaagcagaaacccggccagggactcgaatggatcggccaaatctatcccggcgacggcgacaccaactacaacggcaagttcaagggcagagccacactgaccgccgatacctctagcagcacagcctacatgcagctgagcagcctgaccagcgaagatagcgccgtgtacttctgtgcccggtccatcacaacagtcgtgggctgcgctatggactattggggccagggaacaagcgtgaccgtgtctagtacgcgtatccagaaccctgatcctgccgtgtaccagctgcgggatagcaagagcagcgacaagagcgtgtgtctgttcaccgacttcgacagccagaccaacgtgtcccagagcaaggactccgacgtgtacatcaccgataagtgcgtgctggacatgcggagcatggacttcaagagcaactccgccgtggcctggtccaacaagtccgatttcgcctgcgccaacgccttcaacaacagcattatccccgaggacacattcttcccaagccccgagagcagctgcgacgtgaagctggtggaaaagagcttcgagacagacaccaacctgaacttccagaacctgagcgtgatcggcttcagaatcctgctgctgaaagtggccggctttaacctgctgatgaccctgcggctgtggtccagccgcgccaagagaagcggatctggcgtgaagcagaccctgaatttcgacctgctgaagctggctggcgacgtggaatccaacccaggcccttctagagcccatatgaccgagtacaagcccacggtgcgcctcgccacccgcgacgacgtccccagggccgtacgcaccctcgccgccgcgttcgccgactaccccgccacgcgccacaccgtcgatccggaccgccacatcgagcgggtcaccgagctgcaagaactcttcctcacgcgcgtcgggctcgacatcggcaaggtgtgggtcgcggacgacggcgccgcggtggcggtctggaccacgccggagagcgtcgaagcgggggcggtgttcgccgagatcggcccgcgcatggccgagttgagcggttcccggctggccgcgcagcaacagatggaaggcctcctggcgccgcaccggcccaaggagcccgcgtggttcctggccaccgtcggcgtctcgcccgaccaccagggcaagggtctgggcagcgccgtcgtgctccccggagtggaggcggccgagcgcgccggggtgcccgccttcctggagacctccgcgccccgcaacctccccttctacgagcggctcggcttcaccgtcaccgccgacgtcgaggtgcccgaaggaccgcgcacctggtgcatgacccgcaagcccggtgcctga

SEQ ID NO: 21815 - DNA, 2517 bp, Artificial Sequence
  Synthetic Polynucleotide
atggccttaccagtgaccgccttgctcctgccgctggccttgctgctccacgccgccaggccggacatccagatgacacagagccctagcagcctgtctgccagcgtgggagacagagtgaccatcacatgcaaggccagcgaccacatcaacaactggctggcctggtatcagcagaagcctggacaggcccctaagctgctgatctacggcgctaccacactggaaacaggcgtgcccagcagattttctggcagcggctctggcaccgactacaccctgacaatatccagcctccagcctgaggacttcgccacctactactgtcagcagagctggaacaccccttggacattcggccagggcaccaagctggaaatcaagagactcgaggccgagatcagccacacccagaaagccaccctcgtgtgcctggctaccggcttctaccccgaccatgtggaactgtcttggtgggtcaacggcaaagaggtgcacagcggcgtgtgtaccgacccccagccactgaaagaacagcccgccctgaacgacagccggtactgcctgagcagcagactgagagtgtccgccaccttctggcagaacccccggaaccacttcagatgccaggtgcagttctacggcctgagcgagaacgacgagtggacccaggacagagccaagcccgtgacccagatcgtgtctgccgaagcctggggcagagccgattgcggctttaccagcgagagctaccagcagggcgtgctgagcgccaccatcctgtacgagatcctgctgggcaaggccaccctgtacgccgtgctggtgtctgccctggtgctgatggctatggtcaagcggaaggacagccggggaagggccaagcgatctggatctggagcaacaaacttctcactactcaaacaagcaggtgacgtggaggagaatcccgggcctactagtatggactggatttggcgcatccttttccttgtcggcgctgctaccggcgcgcattccttcgaacaagttcagcttcaacagcctggcgctgagctggtcaaacctggcgcttctgtgaagatgagctgcaaagccagcggctacgccttcagcagctactggatcaactggatgaagcagaaacccggccagggactcgaatggatcggccaaatctatcccggcgacggcgacaccaactacaacggcaagttcaagggcagagccacactgaccgccgatacctctagcagcacagcctacatgcagctgagcagcctgaccagcgaagatagcgccgtgtacttctgtgcccggtccatcacaacagtcgtgggctgcgctatggactattggggccagggaacaagcgtgaccgtgtctagtacgcgtatccagaaccctgatcctgccgtgtaccagctgcgggatagcaagagcagcgacaagagcgtgtgtctgttcaccgacttcgacagccagaccaacgtgtcccagagcaaggactccgacgtgtacatcaccgataagtgcgtgctggacatgcggagcatggacttcaagagcaactccgccgtggcctggtccaacaagtccgatttcgcctgcgccaacgccttcaacaacagcattatccccgaggacacattcttcccaagccccgagagcagctgcgacgtgaagctggtggaaaagagcttcgagacagacaccaacctgaacttccagaacctgagcgtgatcggcttcagaatcctgctgctgaaagtggccggctttaacctgctgatgaccctgcggctgtggtccagccgcgccaagagaagcggatctggcgtgaagcagaccctgaatttcgacctgctgaagctggctggcgacgtggaatccaacccaggcccttctagagcccatatgaccgagtacaagcccacggtgcgcctcgccacccgcgacgacgtccccagggccgtacgcaccctcgccgccgcgttcgccgactaccccgccacgcgccacaccgtcgatccggaccgccacatcgagcgggtcaccgagctgcaagaactcttcctcacgcgcgtcgggctcgacatcggcaaggtgtgggtcgcggacgacggcgccgcggtggcggtctggaccacgccggagagcgtcgaagcgggggcggtgttcgccgagatcggcccgcgcatggccgagttgagcggttcccggctggccgcgcagcaacagatggaaggcctcctggcgccgcaccggcccaaggagcccgcgtggttcctggccaccgtcggcgtctcgcccgaccaccagggcaagggtctgggcagcgccgtcgtgctccccggagtggaggcggccgagcgcgccggggtgcccgccttcctggagacctccgcgccccgcaacctccccttctacgagcggctcggcttcaccgtcaccgccgacgtcgaggtgcccgaaggaccgcgcacctggtgcatgacccgcaagcccggtgcctga

SEQ ID NO: 21816 - DNA, 2559 bp, Artificial Sequence
  Synthetic Polynucleotide
atggccttaccagtgaccgccttgctcctgccgctggccttgctgctccacgccgccaggccggacatccagatgacacagagccctagcagcctgtctgccagcgtgggagacagagtgaccatcacatgcaaggccagcgaccacatcaacaactggctggcctggtatcagcagaagcctggacaggcccctaagctgctgatctacggcgctaccacactggaaacaggcgtgcccagcagattttctggcagcggctctggcaccgactacaccctgacaatatccagcctccagcctgaggacttcgccacctactactgtcagcagagctggaacaccccttggacattcggccagggcaccaagctggaaatcaagagactcgagaacgtgttcccacctgaggtggccgtgttcgagcctagcgaggccgagatcagccacacccagaaagccaccctcgtgtgcctggctaccggcttctaccccgaccatgtggaactgtcttggtgggtcaacggcaaagaggtgcacagcggcgtgtgtaccgacccccagccactgaaagaacagcccgccctgaacgacagccggtactgcctgagcagcagactgagagtgtccgccaccttctggcagaacccccggaaccacttcagatgccaggtgcagttctacggcctgagcgagaacgacgagtggacccaggacagagccaagcccgtgacccagatcgtgtctgccgaagcctggggcagagccgattgcggctttaccagcgagagctaccagcagggcgtgctgagcgccaccatcctgtacgagatcctgctgggcaaggccaccctgtacgccgtgctggtgtctgccctggtgctgatggctatggtcaagcggaaggacagccggggaagggccaagcgatctggatctggagcaacaaacttctcactactcaaacaagcaggtgacgtggaggagaatcccgggcctactagtatggactggatttggcgcatccttttccttgtcggcgctgctaccggcgcgcattccttcgaacaagttcagcttcaacagcctggcgctgagctggtcaaacctggcgcttctgtgaagatgagctgcaaagccagcggctacgccttcagcagctactggatcaactggatgaagcagaaacccggccagggactcgaatggatcggccaaatctatcccggcgacggcgacaccaactacaacggcaagttcaagggcagagccacactgaccgccgatacctctagcagcacagcctacatgcagctgagcagcctgaccagcgaagatagcgccgtgtacttctgtgcccggtccatcacaacagtcgtgggctgcgctatggactattggggccagggaacaagcgtgaccgtgtctagtacgcgtatccagaaccctgatcctgccgtgtaccagctgcgggatagcaagagcagcgacaagagcgtgtgtctgttcaccgacttcgacagccagaccaacgtgtcccagagcaaggactccgacgtgtacatcaccgataagtgcgtgctggacatgcggagcatggacttcaagagcaactccgccgtggcctggtccaacaagtccgatttcgcctgcgccaacgccttcaacaacagcattatccccgaggacacattcttcccaagccccgagagcagctgcgacgtgaagctggtggaaaagagcttcgagacagacaccaacctgaacttccagaacctgagcgtgatcggcttcagaatcctgctgctgaaagtggccggctttaacctgctgatgaccctgcggctgtggtccagccgcgccaagagaagcggatctggcgtgaagcagaccctgaatttcgacctgctgaagctggctggcgacgtggaatccaacccaggcccttctagagcccatatgaccgagtacaagcccacggtgcgcctcgccacccgcgacgacgtccccagggccgtacgcaccctcgccgccgcgttcgccgactaccccgccacgcgccacaccgtcgatccggaccgccacatcgagcgggtcaccgagctgcaagaactcttcctcacgcgcgtcgggctcgacatcggcaaggtgtgggtcgcggacgacggcgccgcggtggcggtctggaccacgccggagagcgtcgaagcgggggcggtgttcgccgagatcggcccgcgcatggccgagttgagcggttcccggctggccgcgcagcaacagatggaaggcctcctggcgccgcaccggcccaaggagcccgcgtggttcctggccaccgtcggcgtctcgcccgaccaccagggcaagggtctgggcagcgccgtcgtgctccccggagtggaggcggccgagcgcgccggggtgcccgccttcctggagacctccgcgccccgcaacctccccttctacgagcggctcggcttcaccgtcaccgccgacgtcgaggtgcccgaaggaccgcgcacctggtgcatgacccgcaagcccggtgcctga

SEQ ID NO: 21817 - DNA, 2541 bp, Artificial Sequence
  Synthetic Polynucleotide
atggccttaccagtgaccgccttgctcctgccgctggccttgctgctccacgccgccaggccggacatccagatgacacagagccctagcagcctgtctgccagcgtgggagacagagtgaccatcacatgcaaggccagcgaccacatcaacaactggctggcctggtatcagcagaagcctggacaggcccctaagctgctgatctacggcgctaccacactggaaacaggcgtgcccagcagattttctggcagcggctctggcaccgactacaccctgacaatatccagcctccagcctgaggacttcgccacctactactgtcagcagagctggaacaccccttggacattcggccagggcaccaagctggaaatcaagagactcgaggtggccgtgttcgagcctagcgaggccgagatcagccacacccagaaagccaccctcgtgtgcctggctaccggcttctaccccgaccatgtggaactgtcttggtgggtcaacggcaaagaggtgcacagcggcgtgtgtaccgacccccagccactgaaagaacagcccgccctgaacgacagccggtactgcctgagcagcagactgagagtgtccgccaccttctggcagaacccccggaaccacttcagatgccaggtgcagttctacggcctgagcgagaacgacgagtggacccaggacagagccaagcccgtgacccagatcgtgtctgccgaagcctggggcagagccgattgcggctttaccagcgagagctaccagcagggcgtgctgagcgccaccatcctgtacgagatcctgctgggcaaggccaccctgtacgccgtgctggtgtctgccctggtgctgatggctatggtcaagcggaaggacagccggggaagggccaagcgatctggatctggagcaacaaacttctcactactcaaacaagcaggtgacgtggaggagaatcccgggcctactagtatggactggatttggcgcatccttttccttgtcggcgctgctaccggcgcgcattccttcgaacaagttcagcttcaacagcctggcgctgagctggtcaaacctggcgcttctgtgaagatgagctgcaaagccagcggctacgccttcagcagctactggatcaactggatgaagcagaaacccggccagggactcgaatggatcggccaaatctatcccggcgacggcgacaccaactacaacggcaagttcaagggcagagccacactgaccgccgatacctctagcagcacagcctacatgcagctgagcagcctgaccagcgaagatagcgccgtgtacttctgtgcccggtccatcacaacagtcgtgggctgcgctatggactattggggccagggaacaagcgtgaccgtgtctagtacgcgtatccagaaccctgatcctgccgtgtaccagctgcgggatagcaagagcagcgacaagagcgtgtgtctgttcaccgacttcgacagccagaccaacgtgtcccagagcaaggactccgacgtgtacatcaccgataagtgcgtgctggacatgcggagcatggacttcaagagcaactccgccgtggcctggtccaacaagtccgatttcgcctgcgccaacgccttcaacaacagcattatccccgaggacacattcttcccaagccccgagagcagctgcgacgtgaagctggtggaaaagagcttcgagacagacaccaacctgaacttccagaacctgagcgtgatcggcttcagaatcctgctgctgaaagtggccggctttaacctgctgatgaccctgcggctgtggtccagccgcgccaagagaagcggatctggcgtgaagcagaccctgaatttcgacctgctgaagctggctggcgacgtggaatccaacccaggcccttctagagcccatatgaccgagtacaagcccacggtgcgcctcgccacccgcgacgacgtccccagggccgtacgcaccctcgccgccgcgttcgccgactaccccgccacgcgccacaccgtcgatccggaccgccacatcgagcgggtcaccgagctgcaagaactcttcctcacgcgcgtcgggctcgacatcggcaaggtgtgggtcgcggacgacggcgccgcggtggcggtctggaccacgccggagagcgtcgaagcgggggcggtgttcgccgagatcggcccgcgcatggccgagttgagcggttcccggctggccgcgcagcaacagatggaaggcctcctggcgccgcaccggcccaaggagcccgcgtggttcctggccaccgtcggcgtctcgcccgaccaccagggcaagggtctgggcagcgccgtcgtgctccccggagtggaggcggccgagcgcgccggggtgcccgccttcctggagacctccgcgccccgcaacctccccttctacgagcggctcggcttcaccgtcaccgccgacgtcgaggtgcccgaaggaccgcgcacctggtgcatgacccgcaagcccggtgcctga

SEQ ID NO: 21818 - DNA, 2526 bp, Artificial Sequence
  Synthetic Polynucleotide
atggccttaccagtgaccgccttgctcctgccgctggccttgctgctccacgccgccaggccggacatccagatgacacagagccctagcagcctgtctgccagcgtgggagacagagtgaccatcacatgcaaggccagcgaccacatcaacaactggctggcctggtatcagcagaagcctggacaggcccctaagctgctgatctacggcgctaccacactggaaacaggcgtgcccagcagattttctggcagcggctctggcaccgactacaccctgacaatatccagcctccagcctgaggacttcgccacctactactgtcagcagagctggaacaccccttggacattcggccagggcaccaagctggaaatcaagagactcgagcctagcgaggccgagatcagccacacccagaaagccaccctcgtgtgcctggctaccggcttctaccccgaccatgtggaactgtcttggtgggtcaacggcaaagaggtgcacagcggcgtgtgtaccgacccccagccactgaaagaacagcccgccctgaacgacagccggtactgcctgagcagcagactgagagtgtccgccaccttctggcagaacccccggaaccacttcagatgccaggtgcagttctacggcctgagcgagaacgacgagtggacccaggacagagccaagcccgtgacccagatcgtgtctgccgaagcctggggcagagccgattgcggctttaccagcgagagctaccagcagggcgtgctgagcgccaccatcctgtacgagatcctgctgggcaaggccaccctgtacgccgtgctggtgtctgccctggtgctgatggctatggtcaagcggaaggacagccggggaagggccaagcgatctggatctggagcaacaaacttctcactactcaaacaagcaggtgacgtggaggagaatcccgggcctactagtatggactggatttggcgcatccttttccttgtcggcgctgctaccggcgcgcattccttcgaacaagttcagcttcaacagcctggcgctgagctggtcaaacctggcgcttctgtgaagatgagctgcaaagccagcggctacgccttcagcagctactggatcaactggatgaagcagaaacccggccagggactcgaatggatcggccaaatctatcccggcgacggcgacaccaactacaacggcaagttcaagggcagagccacactgaccgccgatacctctagcagcacagcctacatgcagctgagcagcctgaccagcgaagatagcgccgtgtacttctgtgcccggtccatcacaacagtcgtgggctgcgctatggactattggggccagggaacaagcgtgaccgtgtctagtacgcgtatccagaaccctgatcctgccgtgtaccagctgcgggatagcaagagcagcgacaagagcgtgtgtctgttcaccgacttcgacagccagaccaacgtgtcccagagcaaggactccgacgtgtacatcaccgataagtgcgtgctggacatgcggagcatggacttcaagagcaactccgccgtggcctggtccaacaagtccgatttcgcctgcgccaacgccttcaacaacagcattatccccgaggacacattcttcccaagccccgagagcagctgcgacgtgaagctggtggaaaagagcttcgagacagacaccaacctgaacttccagaacctgagcgtgatcggcttcagaatcctgctgctgaaagtggccggctttaacctgctgatgaccctgcggctgtggtccagccgcgccaagagaagcggatctggcgtgaagcagaccctgaatttcgacctgctgaagctggctggcgacgtggaatccaacccaggcccttctagagcccatatgaccgagtacaagcccacggtgcgcctcgccacccgcgacgacgtccccagggccgtacgcaccctcgccgccgcgttcgccgactaccccgccacgcgccacaccgtcgatccggaccgccacatcgagcgggtcaccgagctgcaagaactcttcctcacgcgcgtcgggctcgacatcggcaaggtgtgggtcgcggacgacggcgccgcggtggcggtctggaccacgccggagagcgtcgaagcgggggcggtgttcgccgagatcggcccgcgcatggccgagttgagcggttcccggctggccgcgcagcaacagatggaaggcctcctggcgccgcaccggcccaaggagcccgcgtggttcctggccaccgtcggcgtctcgcccgaccaccagggcaagggtctgggcagcgccgtcgtgctccccggagtggaggcggccgagcgcgccggggtgcccgccttcctggagacctccgcgccccgcaacctccccttctacgagcggctcggcttcaccgtcaccgccgacgtcgaggtgcccgaaggaccgcgcacctggtgcatgacccgcaagcccggtgcctga

SEQ ID NO: 21819 - DNA, 2517 bp, Artificial Sequence
  Synthetic Polynucleotide
atggccttaccagtgaccgccttgctcctgccgctggccttgctgctccacgccgccaggccggacatccagatgacacagagccctagcagcctgtctgccagcgtgggagacagagtgaccatcacatgcaaggccagcgaccacatcaacaactggctggcctggtatcagcagaagcctggacaggcccctaagctgctgatctacggcgctaccacactggaaacaggcgtgcccagcagattttctggcagcggctctggcaccgactacaccctgacaatatccagcctccagcctgaggacttcgccacctactactgtcagcagagctggaacaccccttggacattcggccagggcaccaagctggaaatcaagagactcgaggacctgaagaacgtgttcccacctgaggtggccgtgttcgagcctagcgaggccgagatcagccacacccagaaagccaccctcgtgtgcctggctaccggcttctaccccgaccatgtggaactgtcttggtgggtcaacggcaaagaggtgcacagcggcgtgtgtaccgacccccagccactgaaagaacagcccgccctgaacgacagccggtactgcctgagcagcagactgagagtgtccgccaccttctggcagaacccccggaaccacttcagatgccaggtgcagttctacggcctgagcgagaacgacgagtggacccaggacagagccaagcccgtgacccagatcgtgtctgccgaagcctggggcagagccgattgcggctttaccagcgagagctaccagcagggcgtgctgagcgccaccatcctgtacgagatcctgctgggcaaggccaccctgtacgccgtgctggtgtctgccctggtgctgatggctatggtcaagcggaaggacagccggggaagggccaagcgatctggatctggagcaacaaacttctcactactcaaacaagcaggtgacgtggaggagaatcccgggcctactagtatggactggatttggcgcatccttttccttgtcggcgctgctaccggcgcgcattccttcgaacaagttcagcttcaacagcctggcgctgagctggtcaaacctggcgcttctgtgaagatgagctgcaaagccagcggctacgccttcagcagctactggatcaactggatgaagcagaaacccggccagggactcgaatggatcggccaaatctatcccggcgacggcgacaccaactacaacggcaagttcaagggcagagccacactgaccgccgatacctctagcagcacagcctacatgcagctgagcagcctgaccagcgaagatagcgccgtgtacttctgtgcccggtccatcacaacagtcgtgggctgcgctatggactattggggccagggaacaagcgtgaccgtgtctagtacgcgtgacaagagcgtgtgtctgttcaccgacttcgacagccagaccaacgtgtcccagagcaaggactccgacgtgtacatcaccgataagtgcgtgctggacatgcggagcatggacttcaagagcaactccgccgtggcctggtccaacaagtccgatttcgcctgcgccaacgccttcaacaacagcattatccccgaggacacattcttcccaagccccgagagcagctgcgacgtgaagctggtggaaaagagcttcgagacagacaccaacctgaacttccagaacctgagcgtgatcggcttcagaatcctgctgctgaaagtggccggctttaacctgctgatgaccctgcggctgtggtccagccgcgccaagagaagcggatctggcgtgaagcagaccctgaatttcgacctgctgaagctggctggcgacgtggaatccaacccaggcccttctagaggccatatgaccgagtacaagcccacggtgcgcctcgccacccgcgacgacgtccccagggccgtacgcaccctcgccgccgcgttcgccgactaccccgccacgcgccacaccgtcgatccggaccgccacatcgagcgggtcaccgagctgcaagaactcttcctcacgcgcgtcgggctcgacatcggcaaggtgtgggtcgcggacgacggcgccgcggtggcggtctggaccacgccggagagcgtcgaagcgggggcggtgttcgccgagatcggcccgcgcatggccgagttgagcggttcccggctggccgcgcagcaacagatggaaggcctcctggcgccgcaccggcccaaggagcccgcgtggttcctggccaccgtcggcgtctcgcccgaccaccagggcaagggtctgggcagcgccgtcgtgctccccggagtggaggcggccgagcgcgccggggtgcccgccttcctggagacctccgcgccccgcaacctccccttctacgagcggctcggcttcaccgtcaccgccgacgtcgaggtgcccgaaggaccgcgcacctggtgcatgacccgcaagcccggtgcctga
